United States Patent Application Publication US 2005/0208558 A1 - sequence listing, part 8

SEQ ID NO: 7106 - DNA, 2352 bp, DROSOPHILA
aaaccgtggccgcgcgctcgtcgttttatccacacatccccctggcacacaaacttctcgaaacaaacagcgaaagagcaggagagagcaagggagctgggccagctggcacagaaagcggaacaagccatcgattgatttttctcgagcgtaggaaacacaaaaacagtggaaacaaacgacgctgggtaaggcaatcccctgcagcatttccatatggaaatgaaaatggcagaggcccaggaaaccaaggactcttgctcgacgatcgaaggccagctgccagctggacctgttcgtgctgaagatgaggaggaagaagtggaggtcgaacaagagcagcaggagctgctaagcgaacggtggtcgccgttgggagccaactacgatgacgcgaatagcgccagttctggcgtggattgcgaactagaaccaggactggaaaagtcagaagcgcgacgtggaagcactggcagcgaactggcccgtctgcgaagcatagaggaggagcaggagcttctgacaagttctctgctggctttgacctcccactttgctcacgtccagcttagagtccgccaaatcgtggaggcgccagcggaggagcgggatcaacttttacgcgacctcgaggacttcgccttccaaggaattccagacgcagtccagtccaaggaatcccatccagataagcccgcaagcgatggtgaaaaggaccatggtcctgatagccagctcatccaacaactgaagtcccagctgactgagctggaacaaatagcctacgaggctggcgaacctggcatcctgccgcagcacgtattgctcgagaagcaaaagtttatcctggacgagctgcgcgccaagctcaatctccaggtagagcagcacgaactgccggcccttagcacggaacaactgcgccaccaggtcgacaatgccatcggcgagtttgtgggccctctgaagatgaaggagcaactggtggcccaactgaagacgcagataactgacttggagcgcttcattgccttccttcagtgcgatgccattgagggatccgttggggatcgactgaagcttctatccggtgcgtacaacagctacgctgcaaagcagacagcacggagttcacaggcaagttacgttgccacaaacgctccagctacgacagctactaccccgccatcctcgggattgggtgcccattcttccggcgagagcttgcacagcaaggcacatggcttgctggacaaggcttcggtcctcatgcaaatgttcgccagcacgcatctggtgaaaccacgaactcacgacgaattccagcaaaattcgctgaagaagacgcacaagggcaaccactggggggatctacgtgcccagcttgaggtggacatccaggaagtagctgcactggccgccactttgagctgcgaccgcgagaagttggccaacatcaagagagctttgcgcaaacagcaacaacaggcggagtcaaccgaattctccgacactggcaatccggttattaactcacaaaacggagcactgaccctgccgcctcgttgccggcgagcagtgccaactggtcacgaactggctccatatgcgtccgggggcgccatatcctccgactccgacgaagacattagctactccaacttcgagtgggaaaaggagagcaagagccggcggacgacgcatgcacgcggtgattccattgccactattggcagggaattgactacggttgtgcggaagaactttgcccgcacattgcagcagcttatacaacacggacttcgcataccagcggaatcggctgcctccagtttgatggttcccttcatgaggtgcctgcaccctgggcctccggtagtgccgcccgccgtcggaggagactcgcagttcctcggcttgggcagggccatgcacgcctgggaactagtactagcctattataggttgaaacacggcgaggagtacaacaacacgcctgccagaaagttgtcgcagagcttccagctggacatcgtggacgcgcaggctgtgaccgccaagcaaagtttgctcagcgccgtgggcatgattctggcaatgcatcgtccatacaaacggagtaacaacgcgcactttaaagccttcgtctgcgccggactcaattcccatttgctggtggagtggctgaacctgatcctcagctgccatgaactggtggacacgtactactcagcagacagctacgtggcccgcaccggattccgcgactcactgcgctccatcgatgctctttctcgatttgacttcgacctgccggtggacctggccatccggcacttccgcaacatctaa

SEQ ID NO: 7107 - protein, 711 aa, DROSOPHILA
MEMKMAEAQETKDSCSTIEGQLPAGPVRAEDEEEEVEVEQEQQELLSERWSPLGANYDDANSASSGVDCELEPGLEKSEARRGSTGSELARLRSIEEEQELLTSSLLALTSHFAHVQLRVRQIVEAPAEERDQLLRDLEDFAFQGIPDAVQSKESHPDKPASDGEKDHGPDSQLIQQLKSQLTELEQIAYEAGEPGILPQHVLLEKQKFILDELRAKLNLQVEQHELPALSTEQLRHQVDNAIGEFVGPLKMKEQLVAQLKTQITDLERFIAFLQCDAIEGSVGDRLKLLSGAYNSYAAKQTARSSQASYVATNAPATTATTPPSSGLGAHSSGESLHSKAHGLLDKASVLMQMFASTHLVKPRTHDEFQQNSLKKTHKGNHWGDLRAQLEVDIQEVAALAATLSCDREKLANIKRALRKQQQQAESTEFSDTGNPVINSQNGALTLPPRCRRAVPTGHELAPYASGGAISSDSDEDISYSNFEWEKESKSRRTTHARGDSIATIGRELTTVVRKNFARTLQQLIQHGLRIPAESAASSLMVPFMRCLHPGPPVVPPAVGGDSQFLGLGRAMHAWELVLAYYRLKHGEEYNNTPARKLSQSFQLDIVDAQAVTAKQSLLSAVGMILAMHRPYKRSNNAHFKAFVCAGLNSHLLVEWLNLILSCHELVDTYYSADSYVARTGFRDSLRSIDALSRFDFDLPVDLAIRHFRNI

SEQ ID NO: 7108 - DNA, 6950 bp, DROSOPHILA
ccaaccgtcgcagccaatggatgggtgatctccatctataaccatcaaaggccggaggaacgtctccctttacatctgcataagcactttctctttctctttctgtttctgtgcctggaacattttgggcaatactagtcctcaaaaaactagtctacaatatattcaaggtttctacgcaatttacattactttgcaggcccgctgaaatctactctaatattaggcttgtatgatgtcgttatttgctctcgattcttgttaatttctacgtagtctcatctaaataatacttcaaatagtatatacatggccagccaagtcaacaacaattgttgcaatgtccgacgacagcgttgcggttgcttcccacctcatcacgaagcgcaccgaaccaaccaagactaactttccgtatcttatgatcgtggctattatatatagttgatgtgtgtatttacaaatgaggacaaacccaattatctccaaggatctgggggattcacgaatcgcaaactgaattaatgtaaatgtaagtgtaagttgaatgaaatgcattttgtttttttgcggggggatattatatatggatatatggtactgtgtgtgtgagcggcaaaaaataaatagatcgagatatcacccgccactgagttaagtatttttcacattatcacgtttcattgagtttgtttcgtgtgtgggagggaacatataaactcgaacgcattaattgtagtttcattatggtgaatctaactttaataaatgggaaatatgtaccaatatttataaatgtagtggtaaccttcatagttgctgagaacgaatgacatcatgatgaatttcttcaatttataaaatagttctttcttattactttagggagaaacttagcactgaagcacaaataaggttcgcagacagttgagtgtcattttaatctaaccatacttaatcgtattcatcttaacatagaacttataaaaggtttctttgtgatttatcttcataattcatggaaatttgattacttatgttaaaaaaaaaaattatatattatttatatatatgcatttacatatacataataggtgattttcttagagattccacttccaggtaatcatcaaattgtcacagaaaaaaaaataaatcaaaacaatttatgctttggtttttccaatcacagaaatcttctgcagacattttgcccacggctggcatgaaaatcgcacgaaaaaatcctcaaatttcacagaatctccacaagatttcgttttttttttttcgaaatgcactaggaacaatggtttctcttctcttcgattaactatgaaaacctctactgaaagttcaagagatttctgtgatagttggatttttagttggacattgattggtacacaaatatttctaatacaaaagagttacaccgctcatacggagatgctaaatatgaatgcaaaaaaaaaaaggaaaaaagagattcaaaagagctctatgcgcactgcttaaaaagaatacaaaaaaaaaaaaaaaaaaagattaaccattccaccatgatttttaacttattctttgatcaaaatacgattgatattaacttttccagacaaatttctgaacaaattgtgacggtgttctgttaccggaaagcgaaacctctaaagcgggcacacccttatatatataaatttatattcaacacacattggccaacctgataatagatcaaccaacgttatcatgtttctttcctccatcgcgacaacgatcgtgtgtataaatagtgaagagtatttactgctaaacctattggttctcgtcatcatctccatcgccgtcgtcgtcgtcgtgctgctcttccagctgctggtgctgctgctgggcagcggcggcaagtaacgcggctttctgtgcctgcgcctgcatcgacgcctgcatcgacggtgcggacatggctattttcccgctcgtcttgtactcggtcatctcctattaaaggcaaaagtgcacatgtcaatcgggtcaatccaagcggtcatttatatatctaaaacatacgcgttcatatcgagccttgtcccgctcggccatcgactcgtacttctgcttgacctcgggatccacatcggaccactttcgtcccagctctttggcgatgtcgcccactccgaactcgggattaagtgccttcaccttatttctctcgtcattgcagaaccagaagaacgcagacctaaacagcggcagaatagagcatagtaaatcattattattgatctgattcgcttcattatctcttgcagtcacattgatttttatgcactatagcgtataatatgataattgactttgctacgaactcacaatgaacgttttggagcattggggtccttgatctgtttcctcttcttgccgcgtcccacaaccgctcccttgggcggcacatagttctgcatttccgcctcatatcgctgcttgtccttctcggccatttcgtggaagcgcttcttctccttgtccaccattgtctagacgaacgggatagatggcaatccactttaaaacaaggagtccttacgtcatttgatcatttcatttacttaccttccaccgttcggcgcacttccgcgagaattcggcgaatatcaccgtctcatcgggatgtttctttttgtgctcctctctgcaagtttgtacaaagtatgcgtaggcggtcattcggcctctgggcttggcatcggccttgactctgctcatggggctctgttggtttttggccacgaaaacgagaacgagaaagagatcgagaacggaaacgggattagctgctgactaagggctaatgtaagcatgtggcatattcaacttaccgccgaattgatgacattctgttgctgctgctgctgttgcatctgttgttgctgctggtgctgttgctgctgctgctgttgttgctgttgctgttgctgctgctggtgctgcagttgcgccgctgtattggcatcgacctgtccctgattggcggccgaataccaccactgggagccgggtacggctgctgctgcggctgcctgtgccatatttagacgataatcatagcccgtggtgccggctgcgttcgatgtggccaccacttgggccatcgtcgtggccggattcggaaaactgctggccattttgtatgtgaacagctgttgggtgcccacgccggctgtggtattggagctgttctggtgcgcctgctgctgattctgctggacgaccacctggtgttgttgcaactgttgctgttgtacttgttgttgttgctgagcagccaattgctgctgatagtgttgaattgtttgctgatcaatagttggttgatggatgttcattagcattattagtgcgatgccagtcgattgggctacaacaatacactacaatcatttggcttgactctcgatgtctggcatcgcactaaccactaagatggtccttaatactaacgaaagtgaaaactgtgcattttttgtttgtgagttatgcggtttaatgagtgcctgatgtttttgttgactacttgctcacaaaatgactaaataaataaataccgaatgcagcgattttctctacattgcgtttacacattgctgatttgttaaaatatttaacagtttttacactggtaaaactgaattttagtaagctaagctaagcttctttaaattatttattaagtgtgaaaaatattgttgcctaaagcaaaaagcttaaatagcattctaaaatcctccattcatcattaatacatgctaaaaaaaaaaaagtatctgtcggaactggggcgttatccttattatttactttccatgtaaataaatatgtagatactcgttatctacagataccgataaattgatgtcaataccacacaatataatactaaatcctgtccaaagtgaattctcttgtttcccattgaacgcggaatttcaatgtcaataatctagcttgttttgtttacaaagtaatagtaataatagcaccagctgttaacccatagataaaaagcttttacatgaatcgggcaagaaagtggaactattgttggagaaagaagaagcagagcgagtagcaccggttccgttttgtgaatcggattggattgtcttcatttcgattccgattccagggcttaaagtgcaaaaccagggcgccacagttacaaaacatgaatgaacccattctttttgccgaaaatagccccatcctgcttgtcaattatgaaaaagcaaaatacactttcctacaacagccaaaaaaaaaaataaataaatattagagccattttacgtggggatacatatgtatgtaaccacagaaatatacatgtgcgcataaatatttgcatagccaagtgtttgcacagccattcatttgtattttatgcacacatggataaaaataagccaatttcggattacgcaagcctgtgatttgggtcttttcatatacaggtttttatatgtgtatgtattttttttatgtacatcatattttccttatttttgcacattgtatctatttacgtacatcaataggcatgcaaaaaaacgtgcatcgcattttgccagcatatttcataagaaacgaaaagcaatgcggtttaccgtttacatcaaggcattcacgattcttggtataaatgtacatatttgtatatttatacaaactaataagaaaaatggcggacttggatgcgcacgcaaaatacaattttgattgtacagcgtcgcttttttgtttgtatgcatacttgcacatacataggcgtacactttttgcatttagtaacatgccgatttacttaataactaaaaacaaaagcgagacgcaatggatgtacaagcgcttgcatgtacatacgtatgtaagtatgtatgcagcatatatattcacaaaaagtttccactgcggctgagaaaaggcaatcaggtgccgaaatatccaaataaataataaataaataggtgcctggcttttttgttaattatacattgtcgtttggcgggaaaatgattaaaacgcggcaacctatacataaacgcgcccatgattgtatgtgtgttgtgccatgagtgtatataaatgtgtgtttgtgtgtgcgtgcgtgtgtgttttaaataaaacgccgtatacctgcacacaagcttacctgtatttgatgaaagtgttccataactgtgagatttcggatctagtccgaatgtttcaatcgtggattggctttatactgggatttccgttctatatctttcacttttattcctaaatggttaaagcatatatatttagttttagcacaagtacgtatgtatgtaatacgcacaccaacgcaaattggagtcgagtcttaagccagtttttttgtctgttttcctttttttaatactgttctacgcagtttgttgtacgtcgtattgtattgattattgcatgtatgtatgcatgtacggccacaaacgcgaatgtatgatgcacgttacaaggaaaaaaaggaacacggcacaagccaaaacttcgaaatgaaattcgaaaatttaagaatttcacaatgcacgttgtttttttgtacttctttttttttgtctaggcctttttcgcttatttgttgtttgattttatttgtttttttggttgggaaaacgcgaaacgcgggcggctttgcggatttgttttgtcgtttgtatttagcttgtaaaaaataaacaaacagcgctgcatacgctgagtttattgtatcgtatcgtatcgcttgtgttttgttggtgtggtatggtatatatgctatacagtacacagtacacagcacacagtatggtatcgtatcaatgcgaatgcggaaaatacaatatatgaggttggttcgcgcgccgctcgtaccaacaacgaatgaattgaattgaattgccgtctctgccttaccttctcactgtgcttccaaatccaaacgggcggataaatgtgtatgcgttgcgttgcgttggactgtgtgcgcaattctttgctggtgtgcgtgtgtgcgggagagcgagagcgcgaagagagtcgttatagtcattttgttggtagaattagtgttgctgagagagcgctcagtgtcatatacatacatatgtacatacacgtggtggagggaaaaggccttataaaactttttggcctgttactttcatacaaacatacgatcacgggtatgtacataaacgctggcgtgccaaacatacaaactatggagtgtgtggagtgtgggaaaaatacagaactgtatgtatgcatatgtacattacacagttcttagggccaaaatttattttaaacatacatatcttatttttaactgccagctacattcgttaatgcgacgaattctacaaaaccgatatgcatcaatgcaaacacattgatacatagccaagcatatacaactgtgctcatgctaatagtagtgcatatgaccgccactttctaaattgatgattttatatgaatgctatgttcaatttgtcaagcggtttttcagaatgaataagttcatattaattactgaaattatatgttttgttaaagagcagtgcaggtacaaaaagccatttgtaactgctttgcttgttttgcgacacagaagacgaagcgaaaaaaaaaattaattaacaaaagggaatacggaaaaaaaccgtttgatgcctttcagtgctatttccacgaacgcagctgtatgtacatacgtgtggaacacacaaacatatgtacatcgcagcgacccgctacatacacatacacattttcattttgtgtgttcccgtctgactgtactttcaattcgaattcgaaagagaaaaaaatgttctcttatgttttaaaacaaattctccctcaattctctctgtcataca

SEQ ID NO: 7109 - DNA, 2177 bp, DROSOPHILA
tcattcgttgttggtacgagcggcgcgcgaaccaacctcatatattgtattttccgcattcgcattgatacgataccatactgtgtgctgtgaataaaagtgaaagatatagaacggaaatcccagtataaagccaatccacgattgaaacattcggactagatccgaaatctcacagttatggaacactttcatcaaatacagcaaacaattcaacactatcagcagcaattggctgctcagcaacaacaacaagtacaacagcaacagttgcaacaacaccaggtggtcgtccagcagaatcagcagcaggcgcaccagaacagctccaataccacagccggcgtgggcacccaacagctgttcacatacaaaatggccagcagttttccgaatccggccacgacgatggcccaagtggtggccacatcgaacgcagccggcaccacgggctatgattatcgtctaaatatggcacaggcagccgcagcagcagccgtacccggctcccagtggtggtattcggccgccaatcagggacaggtcgatgccaatacagcggcgcaactgcagcaccagcagcagcaacagcaacagcaacaacagcagcagcagcaacagcaccagcagcaacaacagatgcaacagcagcagcagcaacagaatgtcatcaattcggcgagccccatgagcagagtcaaggccgatgccaagcccagaggccgaatgaccgcctacgcatactttgtacaaacttgcagagaggagcacaaaaagaaacatcccgatgagacggtgatattcgccgaattctcgcggaagtgcgccgaacggtggaagacaatggtggacaaggagaagaagcgcttccacgaaatggccgagaaggacaagcagcgatatgaggcggaaatgcagaactatgtgccgcccaagggagcggttgtgggacgcggcaagaagaggaaacagatcaaggaccccaatgctccaaaacgttcattgtctgcgttcttctggttctgcaatgacgagagaaataaggtgaaggcacttaatcccgagttcggagtgggcgacatcgccaaagagctgggacgaaagtggtccgatgtggatcccgaggtcaagcagaagtacgagtcgatggccgagcgggacaaggctcgatatgaacgcgagatgaccgagtacaagacgagcgggaaaatagccatgtccgcaccgtcgatgcaggcgtcgatgcaggcgcaggcacagaaagccgcgttacttgccgccgctgcccagcagcagcaccagcagctggaagagcagcacgacgacgacgacggcgatggagatgatgacgagaaccaataggtttagcagtaaatactcttcactatttatacacacgatcgttgtcgcgatggaggaaagaaacatgataacgttggttgatctattatcaggttggccaatgtgtgttgaatataaatttatatatataagggtgtgcccgctttagaggtttcgctttccggtaacagaacaccgtcacaatttgttcagaaatttgtctggaaaagttaatatcaatcgtattttgatcaaagaataagttaaaaatcatggtggaatggttaatctttttttttttttttttttgtattctttttaagcagtgcgcatagagctcttttgaatctcttttttcctttttttttttgcattcatatttagcatctccgtatgagcggtgtaactcttttgtattagaaatatttgtgtaccaatcaatgtccaactaaaaatccaactatcacagaaatctcttgaactttcagtagaggttttcatagttaatcgaagagaagagaaaccattgttcctagtgcatttcgaaaaaaaaaaaacgaaatcttgtggagattctgtgaaatttgaggattttttcgtgcgattttcatgccagccgtgggcaaaatgtctgcagaagatttctgtgattggaaaaaccaaagcataaattgttttgatttatttttttttctgtgacaatttgatgattacctggaagtggaatctctaagaaaatcacctattatgtatatgtaaatgcatatatataaataatatataatttttttttttaacataagtaatcaaatttccatgaattatgaagataaatc

SEQ ID NO: 7110 - protein, 328 aa, DROSOPHILA
MASSFPNPATTMAQVVATSNAAGTTGYDYRLNMAQAAAAAAVPGSQWWYSAANQGQVDANTAAQLQHQQQQQQQQQQQQQQQHQQQQQMQQQQQQQNVINSASPMSRVKADAKPRGRMTAYAYFVQTCREEHKKKHPDETVIFAEFSRKCAERWKTMVDKEKKRFHEMAEKDKQRYEAEMQNYVPPKGAVVGRGKKRKQIKDPNAPKRSLSAFFWFCNDERNKVKALNPEFGVGDIAKELGRKWSDVDPEVKQKYESMAERDKARYEREMTEYKTSGKIAMSAPSMQASMQAQAQKAALLAAAAQQQHQQLEEQHDDDDGDGDDDENQ

SEQ ID NO: 7111 - DNA, 5261 bp, DROSOPHILA
gtgtgatggtttcaaaagaggcgtgtagcgggttccagttggtgttgatgtaggcgaagaatgtaagccattagatttgctagagactgttgtgcataattaccctttaaggtggccattgtatttgtttataatttttcctttgtcgctcctaaaaatgactcagatgtgtagttccagatgaaccagttcatcagtatgaccgaaacatgaccattcaaaattatttaaacgtaatataccgattctagtatataccgttaaaaataatttattaaattcgattttaaattcttccaggtctaattaaatgtattttcaatttatatgctaattttctccgaacctccatgaaatgctttattaaaggacttacctttggtttttaagtttttaaaagcttttttattaaatgtcttttaaaagtccgtttatcaacgactaatcaatgaaaagaaagcaaggaaaagatgagtattccccgataatctgttacgaaatcatttcgcgtaagaatccgagatccacttgggggtatttctcccaaccgattcggacatcaggaccaatgctacacatacactattcggcctaccataactcccgcagtcctttgccggtgagaaaagctctttggctgccaattcattgataaaaattaagcacgccctatcccaagcgaggaagctggaggaaagggagggttctcccaaagcgggcgtggagttggctgacggggcttcggaattcgtgagtggcagccacctgctagctggccgagagtctccttggcctcgtctcggctctttatgaatgcccgtgtttactcaaagaataaaggaacggacgtgccgagcttttcagccccactgtgcgcatgcgctgcttttgactactgtgcccctctggttgttgttgttgctgcgcggcctgccctcaaaagctgcccgcaacatttaacagcgcgggggcgaacctaacatttgcgtcacagcttctgcttcttctcgggctttttgccgccgccaggctcattcagtttcttcagtataacggtatacgtcgacagcggagcaacgcagcccaggagtcgagtcccatccgcatatatccccacagccatatgtccatctgagcttcttcgccagcaatctgtgagaaaagtgcaccatttgacattttaaccacccggtagagtgcagcataacctttgctaggacacctaataacccccaaaaatcctcgagaagtgcagttggcgcaggttactagccagaaatattgcacgcccacgcgaaagtgcaaaagttcggggagcaaccaccagcagctgccaattggatatattcgcaagtgtgtgcgagtgtgggtgttgaaaatcaataaccctcgtcgacgtcgtcgttctagccaaagccccattaaccggccatatggcagtggtggcagaggtcgtgcagtgctagatagttcccattcgaaattgatttctgaggtctcgagaaatccgcaagtgggagtgcatttggtggcaagtgcaagatggcggctcgcctggaaatcaccgttagcttggcgctcgctgcaacgctactgtgcagcatattgggtcattgcgaaatgtccgtttacccaggtaagcctaaaaatagcgcactacacacccattcacctataagcccgtacacccatgtacccacacacgcagcctgagtgttcgggcttgaatggcgcaggaggagcgaaaggaaaggaaaggaaagctgccacctcgatttgtgtatcccctgcactagatacatgcatggcgagtcctgcgaagtgctccgaatcaaaccaaaacacccacgctcattgcttcggcaaaactaaaaagtcaagccaactgcagcgtcgtaactacataaatacacataagtggtaataacgaaattctccactcgaaatttacattcatatgtatgcatttggtataaatatatgtaatatggattagctacgattttcgtagcatacatttaagcgccttaaagcttttccgttcatcccaacagctataacaaatacttccttgatacaagcgcaacaatgggctgaacacgacgaaaacaacaaagtgcgatggaattgccacgcacgtcacagacttcggttcccagtcctccgactgtatgttggtctccctcactctgcgggaattgctcgggttgacctgggcgcgtgtgtaattggtctatttttagcctctggcaataaaacgaacttttgtttgtctatttcgaatcctttaaggctgtaggaggcagaccaccgcatttcggccattccatctatttctatttctatttcgacttcgatttcactttctattttccgatccctaacacgcagcccaggctcattaccattaccataatcatctgcccgtgcccactaatccgatgacattgatacgattcgaatccgaattcttgcaggattgcgccgccgacccattcagccgcctgtgatggatccgcagagtgagcaagagtatgcttttctggcccagatgatggagcagtatgcccgccgtcggctgcagcagcagttcgaccaacagctgcacgaaatcaacctgaagatggatcgtcagcggcagctcttggagcaggagcggtaccgccagcggcagcaggagctccaggtacagcgcgaggcggaggaggactacgagtccaacggaaacaacctgaaccagcagtacgaccagtacgacaacgcggaggcagaggccagctacggcagtccgatggaggcagtctctgatctccaaagtcctccattgtacctgcctcgcctgcccaacctaccacccttgcccagccttccgaatcggcccagcctgggcaactccccgaacaggaacagtgtgctccgcgaacggattccctttgctgtaggtcccagcgacgctcgcttctttgacaacccgaacgacccttcgggggagctggattcccgggcgctggaggactacgaggagtatgctcccattgagcccacaaccgaagtagccaccaccgccagtaagaccaagatcgatacgccagtaccggctcccgtgcccgttgagccgcccaaactgcttgacgccgccaacaccaacttccaccgcatcaatccccagtccgccgccgccgcagccgtggcgggagtgaatattccccagagcaaagaacaaccaccccatgaacttaacgcactgatcaacaagctgcaaaagcaaagcaaagcgccctctcatttgacgctggtcaacggaggtgattccagtcaggagcagattgtgctgcgccagcacctgggcatgaacagcgagatgggggtgtacatagtggccctaatagcgggggttagtgcagcggtgaccgttgggcttcttgccctcggagtaacttggtaagtaacccagagaagctcccaatgcctgttccaggagctaaccaatatatcttgacaggttccataatcgacacaaggcagcagcggacgtggaataccctgcctacggcgttaccgggccgaacaaggatgtctcgccgtccggtgacagaaagctggcccagagcgcccaaatgtaccactaccagcaccagaagcagcagatcatcgccatggagaaccaggccacggatggtagctgcggcatgtcggacgtggagagcgacgacgacaacgaggagggcgactacacggtgtacgagtgccccggcctggcgcccactggtgagatggaggtgaagaatccgctcttcctggacgagacgccggccacgccgtcaaacaacctgtcgtcccaaaccgctggagctgccaatgcggcagcagcgaccaataacaacatcacgcaggctaccccccagcagccggccaccctgaagaagggaacggtcaagccgaacataaatctcctgaacgcaacgggcactgcagcagcagcagcttcagccgcatcagcagcctcagcgaccggaggggaggagcccaagcagaagcgcaagagcaagaagtaaggcgactggacattgttttccctcttggggcaattggtaaagtttgactgatccattgtcagccaacagacacatcctcttacacagattcaaaaacagaccagactaggtgctgggagccatctacgcatattacagatacttcagggaatttaattccgggagccaagcaaaccacacacacgacactacacacatctgtcactattcttccttccctatatatgcataagtccggtaatgtaatgtaattgctatgcagtaagaatagctccagtaaaccgtgagtaccccaaacccgaacccaatcccaatcccaatctcatccgcccagtttccacccgctgtcagttgcacaacgctgatgattctattacgatgcggcaagcgtaatcctgtgttgcatggcagcgtgggttattgtatatcaactttttttgtcactgcgaatcgttggatttacggtctggagaagctgaggagcttaggaggagggacaaccaaccgaagcaaactaacatattatattattataaatatatgtatacatacacacatatttatatatagatatatattcatgtaattattgtattatatacacgaaggcggacacctttttacttacctgtctgtgtggtgtactatcttctctcatttttactacgctttgtgatcgatcctaaattatctgtgtcaatttagaaatacaattccggcatccaaactttttgcatgcgcatgcaaatatatttcgtagagcaggagacgcgactagaggaggagaggattatttacaagtaaaacttaacaataatttccctgcacattcatgtaaagtaaatgaaaaacgactgataacacacaaaaagaacacgcgtctattgtacaaaaaagagaaatcgatacgaagaaacaatttatttacctattagtgagagattattaatggaaactatcagcggaaacaattcccagccccaaaaactactaaaggaaactgtagcgaacattttactgtattgctgtaaataatcatgaaacattgggcaaaggacagagttagaaaccattgcggccgaaacaatacactgaatacaaccgaattgaagaacttgcgagttcaaaaactagctaaagaaaacacaacacgaatattatatttctattaactaggcgaatgcaaagcatcttggagcattgaac

SEQ ID NO: 7112 - DNA, 2359 bp, DROSOPHILA
cttcttctcgggctttttgccgccgccaggctcattcagtttcttcagtataacggtatacgtcgacagcggagcaacgcagcccaggagtcgagtcccatccgcatatatccccacagccatatgtccatctgagcttcttcgccagcaatctgtgagaaaagtgcaccatttgacattttaaccacccggtagagtgcagcataacctttgctaggacacctaataacccccaaaaatcctcgagaagtgcagttggcgcaggttactagccagaaatattgcacgcccacgcgaaagtgcaaaagttcggggagcaaccaccagcagctgccaattggatatattcgcaagtgtgtgcgagtgtgggtgttgaaaatcaataaccctcgtcgacgtcgtcgttctagccaaagccccattaaccggccatatggcagtggtggcagaggtcgtgcagtgctagatagttcccattcgaaattgatttctgaggtctcgagaaatccgcaagtgggagtgcatttggtggcaagtgcaagatggcggctcgcctggaaatcaccgttagcttggcgctcgctgcaacgctactgtgcagcatattgggtcattgcgaaatgtccgtttacccaggattgcgccgccgacccattcagccgcctgtgatggatccgcagagtgagcaagagtatgcttttctggcccagatgatggagcagtatgcccgccgtcggctgcagcagcagttcgaccaacagctgcacgaaatcaacctgaagatggatcgtcagcggcagctcttggagcaggagcggtaccgccagcggcagcaggagctccaggtacagcgcgaggcggaggaggactacgagtccaacggaaacaacctgaaccagcagtacgaccagtacgacaacgcggaggcagaggccagctacggcagtccgatggaggcagtctctgatctccaaagtcctccattgtacctgcctcgcctgcccaacctaccacccttgcccagccttccgaatcggcccagcctgggcaactccccgaacaggaacagtgtgctccgcgaacggattccctttgctgtaggtcccagcgacgctcgcttctttgacaacccgaacgacccttcgggggagctggattcccgggcgctggaggactacgaggagtatgctcccattgagcccacaaccgaagtagccaccaccgccagtaagaccaagatcgatacgccagtaccggctcccgtgcccgttgagccgcccaaactgcttgacgccgccaacaccaacttccaccgcatcaatccccagtccgccgccgccgcagccgtggcgggagtgaatattccccagagcaaagaacaaccaccccatgaacttaacgcactgatcaacaagctgcaaaagcaaagcaaagcgccctctcatttgacgctggtcaacggaggtgattccagtcaggagcagattgtgctgcgccagcacctgggcatgaacagcgagatgggggtgtacatagtggccctaatagcgggggttagtgcagcggtgaccgttgggcttcttgccctcggagtaacttggttccataatcgacacaaggcagcagcggacgtggaataccctgcctacggcgttaccgggccgaacaaggatgtctcgccgtccggtgacagaaagctggcccagagcgcccaaatgtaccactaccagcaccagaagcagcagatcatcgccatggagaaccaggccacggatggtagctgcggcatgtcggacgtggagagcgacgacgacaacgaggagggcgactacacggtgtacgagtgccccggcctggcgcccactggtgagatggaggtgaagaatccgctcttcctggacgagacgccggccacgccgtcaaacaacctgtcgtcccaaaccgctggagctgccaatgcggcagcagcgaccaataacaacatcacgcaggctaccccccagcagccggccaccctgaagaagggaacggtcaagccgaacataaatctcctgaacgcaacgggcactgcagcagcagcagcttcagccgcatcagcagcctcagcgaccggaggggaggagcccaagcagaagcgcaagagcaagaagtaaggcgactggacattgttttccctcttggggcaattggtaaagtttgactgatccattgtcagccaacagacacatcctcttacacagattcaaaaacagaccagactaggtgctgggagccatctacgcatattacagatacttcagggaatttaattccgggagccaagcaaaccacacacacgacactacacacatctgtcact

SEQ ID NO: 7113 - protein, 536 aa, DROSOPHILA
MAARLEITVSLALAATLLCSILGHCEMSVYPGLRRRPIQPPVMDPQSEQEYAFLAQMMEQYARRRLQQQFDQQLHEINLKMDRQRQLLEQERYRQRQQELQVQREAEEDYESNGNNLNQQYDQYDNAEAEASYGSPMEAVSDLQSPPLYLPRLPNLPPLPSLPNRPSLGNSPNRNSVLRERIPFAVGPSDARFFDNPNDPSGELDSRALEDYEEYAPIEPTTEVATTASKTKIDTPVPAPVPVEPPKLLDAANTNFHRINPQSAAAAAVAGVNIPQSKEQPPHELNALINKLQKQSKAPSHLTLVNGGDSSQEQIVLRQHLGMNSEMGVYIVALIAGVSAAVTVGLLALGVTWFHNRHKAAADVEYPAYGVTGPNKDVSPSGDRKLAQSAQMYHYQHQKQQIIAMENQATDGSCGMSDVESDDDNEEGDYTVYECPGLAPTGEMEVKNPLFLDETPATPSNNLSSQTAGAANAAAATNNNITQATPQQPATLKKGTVKPNINLLNATGTAAAAASAASAASATGGEEPKQKRKSKK

SEQ ID NO: 7114 - DNA, 3567 bp, DROSOPHILA
ctccgcttctggccatgaggcaggcggaaggcggagcaaagagtaatccaagcacgaagaagactgtttctgaaactactgtttagctatccccaaatttttccaatgcttgtcttcaccccgcactgtcccccccctcttaccaatcacccatccttacaaaactgtgtgcgtgtgtgtgctgatagtgtgtgtgtatgtgtgtgtgtgtgatccccaagatacccgttacttataaatatgcataaatgcaagagctagcttgataacttgacgtgcgagggatgtggtggtgtccacgctggccactgagcccctccgtgcaccaccaatagctgggctctcggcacgaagatgtgacaatgttcgatctcatccgaagtactttccaaactaaccgagctttttaaacacaatccaccttttgtgtctgctgttcctgctgctctgaaaccaattggtggacgcatcgcggaaaagggagcaccgaggcacaaaagcaccgaggcacagccctcggaaaacgcactcaaatcaaatgaaacgtccagagatatgaatatttttttgcaagcgactacacctaatttgcagcacaggcaggcggggatggggatggggatgcaagtccgtcttggcccaaaacgcttggcgattcgattcgattcgattcagatgggacagttgggcagtgagcagtagggcggtgagaaaccgtagcgggggactactgttcgtctatataaactgtgtataactgtgaggcattgacaagtatttgagatgatctgtatttttgtaagcgtaatatttaaagcggcagccaataacgagacaaccaaatccagagaagcaactataaagcgtaagatatcgggcgcagcagccaacacacgcgacacacaatttatttgctcaacgcagtacacaccacacatgatacatacagcataaatgtaaatatatatatatttatctgcatacatatatatatatacagagtaagttacgcaaagtatgaggcttgcatttacatttacgagcgggatatatcctccatatgtatatgttatcactaatttgcaaagctaaactaagtccatatatacaaaccaaatatcggaggtgcaagtgacgaacacacactatattgaatgtttttgcttgttaaagtaaataataaaaatgaaaactcgaaatcacgaaatccatagccatcgaggatcacaatccgcccatttacggctgagcctgttcctgttcctgctgcagtttgtcccgcttgctctgctgggcagtcaggtggttctgcacgaagctgtggaagttttgttcttcggcggtgcccttcgcgtcctcctccatctcctcctcgtcttcgatttccgccgactcgggcaccagactaggtgccattaggaaaatgctgtttccagtgtgcggcggtgggtcctgaaatagttaagaccctgcagtgggtgcacaaatagccgaggaactgttcctacctgaagcgacaatcccaggggaacggcatggccgtcctcttccacatgatccactggctttggacccgtcgcactctccgccagtcgctcttggcgcttcttttcgtaaacaggcttgtagtccgtctcgtactcgtccacgctttcgagaatcttcgtcagtagctgggtgaagcctacgcctgtcttggccgagacgccgcacgttcttagattctcgtagaaggtgtccagggtgagcgacatggtgcgcgtgaggttgctcacgaagctgtgctcctcctcctgggcctcctggaaggcctcgaagtctgtcatccaatccatcacaaatccgcagtcctttaggtcgatctgtttgaagcggaaaagaagttttctatacatctggatatctgggttgccgggaaagtcgttaccttgttcagcgccacaaggaagggcaaacgggtcttgtacaggatggagcaggcgtacagcatgttggacatgaaggtggtagggcaagcactgcgctccacatccattacatagaccacaatggtgggaaacatggtggccagtccctcggttatgatgctcccggaagccgaccagttaaacacctcgatctgtccgggcgtgtcgatcacacaccacttgtgtccgcgctcgccagcgcgacgcactagctccgcaaactgtgccattttggtggtgaacatattgagcgcggtcacaatgccaccgttgggacccagttggtactgcttcatcacctcccggtagttgaccgtgtcccgtatgtccacgtgcgccgcgtacggtacttccctgcacgccggatccaggttgaccacgtacggattgaacttctcctgggcgtgctggatgagcttctgtgtgaacgtggtcttcccgctgccggccattcccagcaccagtatgcacacgggcgactcccggattccctcgctcagcgacagcgcctccagcttgatgctctccactccctctgccatttctctcacggcttcactaagaatcaaaacaaaaacaggaggcgcaaaaacaagcgtgcagaggcagtgtgaccgtcctatggaaagtgtgctctttgcgccgcctgaattcgcttcagataccaacaaacatcagctgttgttgctgctttttatcctgcgtggaaacatgtcggccattacatagttaacacactcccttaatcgcagcagccttcgtggaatcacacatcttcagttttgccagttcagtttttgcttgcccgccaaaaaaacaaatcaaaaaaaaataccgaagagtttagaacataccgtatatatcgaaagccataataagctttaaactagttgtacagtaataaaaatgccaccaccagaagccggcaattgaagcgcgtttatttgccgtgcattagttttattatttggcattgttttacataataaaagttgtgaagcaatggagacccgactggaagtgctcttgcgggagccgaatccattgttcacccgttggctggagcgctggctgcgcgaagcggagcgccgagaacagaagtcccagtttagcctgcgccaggcgttggagtccctaaaaagctaccctctgccattggccagcggacgagactgttccattctgcgcggctttgggggcaccctctgccagctaatcgacgaggaacttcgccatcacagaggcctccaattgctgccacaggaggccgtggttcaggagcgctacgagcagcaggtccaggcggtagtacgcaaggttcaggagaagcagctggaacaccagaaacgccagaataaatgcgacaggcccaggaagctaaccaaaaaagatctggcggagctggcagcccttgaagagcgggagcgcgtcgtgcgaatgaaaccaggtcaattccagttactccttttggtggatactcaggaaaccagtggcaaaaacaagagagttctggaccagacgaggagctacttggagtccttgggagcccgtcatgaagtgcgtcgcctgacaatcggcgatttcctttgggtggcccagg

SEQ ID NO: 7115 - DNA, 1446 bp, DROSOPHILA
cacgcttgtttttgcgcctcctgtttttgttttgattcttagtgaagccgtgagagaaatggcagagggagtggagagcatcaagctggaggcgctgtcgctgagcgagggaatccgggagtcgcccgtgtgcatactggtgctgggaatggccggcagcgggaagaccacgttcacacagaagctcatccagcacgcccaggagaagttcaatccgtacgtggtcaacctggatccggcgtgcagggaagtaccgtacgcggcgcacgtggacatacgggacacggtcaactaccgggaggtgatgaagcagtaccaactgggtcccaacggtggcattgtgaccgcgctcaatatgttcaccaccaaaatggcacagtttgcggagctagtgcgtcgcgctggcgagcgcggacacaagtggtgtgtgatcgacacgcccggacagatcgaggtgtttaactggtcggcttccgggagcatcataaccgagggactggccaccatgtttcccaccattgtggtctatgtaatggatgtggagcgcagtgcttgccctaccaccttcatgtccaacatgctgtacgcctgctccatcctgtacaagacccgtttgcccttccttgtggcgctgaacaagatcgacctaaaggactgcggatttgtgatggattggatgacagacttcgaggccttccaggaggcccaggaggaggagcacagcttcgtgagcaacctcacgcgcaccatgtcgctcaccctggacaccttctacgagaatctaagaacgtgcggcgtctcggccaagacaggcgtaggcttcacccagctactgacgaagattctcgaaagcgtggacgagtacgagacggactacaagcctgtttacgaaaagaagcgccaagagcgactggcggagagtgcgacgggtccaaagccagtggatcatgtggaagaggacggccatgccgttcccctgggattgtcgcttcaggacccaccgccgcacactggaaacagcattttcctaatggcacctagtctggtgcccgagtcggcggaaatcgaagacgaggaggagatggaggaggacgcgaagggcaccgccgaagaacaaaacttccacagcttcgtgcagaaccacctgactgcccagcagagcaagcgggacaaactgcagcaggaacaggaacaggctcagccgtaaatgggcggattgtgatcctcgatggctatggatttcgtgatttcgagttttcatttttattatttactttaacaagcaaaaacattcaatatagtgtgtgttcgtcacttgcacctccgatatttggtttgtatatatggacttagtttagctttgcaaattagtgataacatatacatatggaggatatatcccgctcgtaaatgtaaatgcaagcctcatactttgcgtaacttact

SEQ ID NO: 7116 - protein, 382 aa, DROSOPHILA
MAEGVESIKLEALSLSEGIRESPVCILVLGMAGSGKTTFTQKLIQHAQEKFNPYVVNLDPACREVPYAAHVDIRDTVNYREVMKQYQLGPNGGIVTALNMFTTKMAQFAELVRRAGERGHKWCVIDTPGQIEVFNWSASGSIITEGLATMFPTIVVYVMDVERSACPTTFMSNMLYACSILYKTRLPFLVALNKIDLKDCGFVMDWMTDFEAFQEAQEEEHSFVSNLTRTMSLTLDTFYENLRTCGVSAKTGVGFTQLLTKILESVDEYETDYKPVYEKKRQERLAESATGPKPVDHVEEDGHAVPLGLSLQDPPPHTGNSIFLMAPSLVPESAEIEDEEEMEEDAKGTAEEQNFHSFVQNHLTAQQSKRDKLQQEQEQAQP

SEQ ID NO: 7117 - DNA, 3508 bp, DROSOPHILA
tcacccaaatcacccaaattgagtgattcagattcacttgggctgcagggcataacagacgccttttaagcccagttcattaggatggtgatatcatcggcggctgcttttttcccgttctgcgttcgaatgcaaccttaattcacgcccctataccgttcaaacggcagtcgaatcacgcctaatatggtccacatttaagctggctcaaagcgtttcccgccgccaattaaacacgatgacgttgaccgccaaaccgcccgttccattcatggtttaccgcccaatgctggcacccacgcttcggccttgcctttgtttttgcttctgcttgccaactgtttcaactccgctggagtcgattacagcaattgataattgccgcagaggcgttgttttctggtttttaacggccttttgagccgccaattgctggcaccttcgtgttaaaatcgaaaggaattcaagcttgggcaattaaacagctggtcttcaatcgcaagtaaagcaacaaatttgatgcttaacaaaagtattagttttcctacaaatgtccatatgcccaatctaaattctctcatagtcgaattagtttttaatttggcttcaatacataaagaatatctaaatgggttaaaacacacccatttatccaaaattttgaaagttgaaatctggaatcggctgcccactaattatttattttcccacgacccttcacctttcggtctattgttatcattttgttctggtatgtagatataataggcttatagacttactggtttcgaaagacgtcagaagtcgaaagtaaattcgtcatgaaaagagcatttgttttgttgttgtaacctaatgggctattattgcaactgctaatagctctgcaaggctgcatttaaaacatttaggctttaattggttttacctaattggtacctacaatcaaaaatttaaataaagtatttaacatactattccatagaaaaatgaatgttttatttaaacttttgttgtatttttcgtttttgttcgccataaacatataaatacagaaatttatttttatacatattttatgtgcatgaaatttctttaaattaaataaattgcttacagttggatgctaaagcgtgaactgttcattagcataagggcgcaccctgtatttttacaacttctgctgattcactaacagtgcgcgcttaacatattctgttaagttaacagtaacaaagttgatttcacttgttcgttttccatttattactatcgctttttattattgtttaattacgaactaacgtacatattattacacacatacttgggcataaacatgtgcatcactacgagctataacacgttgatttcaaatactaaattcgccactcccccaccgccttacgtatacgtatctcactgccccatcagctgctcaaaatccgttacgtaatactgtgcacggcgatagacctccggccgcacgacattgccaccgaaacctataaagtagttggctggcggtacggcctccagatcggtggctccatcgccgatcatggtgattagggaatcgtcgctattctccttccttatcagggcgatagcctctgcctttccgccggaacgcgaagtgggctggttgatatcaaagctatcgtattcgcccaaataatcgaacagcatcttgttggcatagacgtttttcaggggaatacccaattcattggccacgggcgcaattaggcaatcgaatccgccggagatcaagtaaacctgttttccctccgccttcaaatggctgacgaaacgcttcacgtttttgctcagtgtactgggtcgctcctggatgaaatccctcacttgctgctgtgtcggccgtatgatgttcaagcgaattttgagggcatcctggaaggtcatggcaccgcccatcgcctccttggtaacgcgagccacctcgctccccttgccacaatattcggccagttcgtcgatgccctcctcgcaaatcaccgtggagtccacatcgaaacagacgatctgcgactgctggatgaccttggccgccaactggggctgcttgggcggtgttatggccgaggccacagtggttttcgccgcgccaccggtggtgccattgccattgcaattcagctgtttggtcagcagattatggccatttgtggctgctgcaggacgcgccaaactcaatacggaaccgctcatctcgaccggcgaacacgttgtgttttttggaagcggtttaagttttggcttttcgtttaacgtttggcgtaaaagcttcggctgtgtttggtgcccaaaattttccactgcttctctttttgtgtatctcttatatcttgtgcttttttgttgtgtatgttttctcgtttctttttgcacacgcgcttcgcgttgcgggccagctgtttttgtttgataagtggttacggtttgtgtgtgccagcgggttttccttagtcgaactgctcgcgatgactgatttttcacaagtgactcaaaaacagtcgatcgcccttttaagaaaacccgctcaacgcacacaaaagcggtttctctctttttgtcgttctctcttttcacactgaccacacggaacgaaaaaatgattaccgaccacacggaaagaaaaatttatgtccagacgaaactatttttgtccaactagctgatttgcataacaatttaagccacaagaaactagattaaaattttacatttaaatacattatcaaatcgaaatatcaataattgtaatttattcttacaaaatgtaaacgcagttgctttcttttcagtgtagcgatcgaacgataagcattacaagtgtgcgagtgggagagaaatgcgtttttgttacaaactccaaaccgttttcgtttttcggtcagttcaagaagacttccagaataccctaacttctatggcttatatttttatccgcgaattacgctcaattttcatttaatcagtttcaattgagagagaattgctttgggggaacgtgaacctttgatcacaacatgtgctgcatgaatgcgacaatgtctgcttatcacaaaatatataaacaatagaaacaattatggttgagctgtcattaaactcgcgacactcgactgcttagaagaaccgcctagaaccagattttccagcaggagaccatcgctccttatcttttctggcaccatttcatacttgaagattgccaggagacctggttctgggtccagacatcgaaagactacctcaaaaattatcgacaaacaaataacaagtgtggcatttatgaccccggttctagaaatgttgtctggtaaaatccaaacacgggcgcatgctgcttatcactttgaaaacgaagtgtactttttgcgtctggttgatccccctgttttcaatactttcttttttgcattaatgcttaatcattgatgtggaaaataaccgaaatctcagctgattaacgctggtgtaa

SEQ ID NO: 7118 - DNA, 1508 bp, DROSOPHILA
tcatcgcgagcagttcgactaaggaaaacccgctggcacacacaaaccgtaaccacttatcaaacaaaaacagctggcccgcaacgcgaagcgcgtgtgcaaaaagaaacgagaaaacatacacaacaaaaaagcacaagatataagagatacacaaaaagagaagcagtggaaaattttgggcaccaaacacagccgaagcttttacgccaaacgttaaacgaaaagccaaaacttaaaccgcttccaaaaaacacaacgtgttcgccggtcgagatgagcggttccgtattgagtttggcgcgtcctgcagcagccacaaatggccataatctgctgaccaaacagctgaattgcaatggcaatggcaccaccggtggcgcggcgaaaaccactgtggcctcggccataacaccgcccaagcagccccagttggcggccaaggtcatccagcagtcgcagatcgtctgtttcgatgtggactccacggtgatttgcgaggagggcatcgacgaactggccgaatattgtggcaaggggagcgaggtggctcgcgttaccaaggaggcgatgggcggtgccatgaccttccaggatgccctcaaaattcgcttgaacatcatacggccgacacagcagcaagtgagggatttcatccaggagcgacccagtacactgagcaaaaacgtgaagcgtttcgtcagccatttgaaggcggagggaaaacaggtttacttgatctccggcggattcgattgcctaattgcgcccgtggccaatgaattgggtattcccctgaaaaacgtctatgccaacaagatgctgttcgattatttgggcgaatacgatagctttgatatcaaccagcccacttcgcgttccggcggaaaggcagaggctatcgccctgataaggaaggagaatagcgacgattccctaatcaccatgatcggcgatggagccaccgatctggaggccgtaccgccagccaactactttataggtttcggtggcaatgtcgtgcggccggaggtctatcgccgtgcacagtattacgtaacggattttgagcagctgatggggcagtgagatacgtatacgtaaggcggtgggggagtggcgaatttagtatttgaaatcaacgtgttatagctcgtagtgatgcacatgtttatgcccaagtatgtgtgtaataatatgtacgttagttcgtaattaaacaataataaaaagcgatagtaataaatggaaaacgaacaagtgaaatcaactttgttactgttaacttaacagaatatgttaagcgcgcactgttagtgaatcagcagaagttgtaaaaatacagggtgcgcccttatgctaatgaacagttcacgctttagcatccaactgtaagcaatttatttaatttaaagaaatttcatgcacataaaatatgtataaaaataaatttctgtatttatatgtttatggcgaacaaaaacgaaaaatacaacaaaagtttaaat

SEQ ID NO: 7119 - protein, 270 aa, DROSOPHILA
MSGSVLSLARPAAATNGHNLLTKQLNCNGNGTTGGAAKTTVASAITPPKQPQLAAKVIQQSQIVCFDVDSTVICEEGIDELAEYCGKGSEVARVTKEAMGGAMTFQDALKIRLNIIRPTQQQVRDFIQERPSTLSKNVKRFVSHLKAEGKQVYLISGGFDCLIAPVANELGIPLKNVYANKMLFDYLGEYDSFDINQPTSRSGGKAEAIALIRKENSDDSLITMIGDGATDLEAVPPANYFIGFGGNVVRPEVYRRAQYYVTDFEQLMGQ

SEQ ID NO: 7120 - DNA, 3592 bp, DROSOPHILA
cgctattattgggtcttttggtacccataattaagattttgtttgtaaaaacagaagccttataattttttttcttccgctcaagctgtatggctgtgtgaccagagttcgaaatataatattaccgacatggctgttagcgattaattcagatatttctgaatagatgtggctactttcagtgagaacaaaggaagtgaaagtcggcaactctggcaaaaatactgaaaaacattttaccagaattgtttctcattttatttttacacaatttgcagttttacaatgtgaaactaaccaagaaaaacgggtctccgtctagtaggcatcaacgcgtgggggatccgcaaaaaattcttgtcccttacgctcccccttgagccactgcttgtagcgttcgtttcgcattgcctgaaagaggaatttttagcattttagacaaaattacagatcgttagggatatgaagctacggaaaaactcacatggaagcgcatcagttgcttctgcatgccgacgcactcctgaaagtcggagatcaggtcggcgcactcccgttttccacgctccaggccataggcctcgaagcactccatcattttcatctcgaattttccgcacttgtcgtaggtctggtggttaattaggcacccggtcagatcggttaagggcaggcgtagaaagggggtaagcgacattttgtctgtggagcgaagcacacacactgtgacgtaacaataaacaaggggtttaagccttcaagccgttagcagtctctggcccccaagaatttcaatgtattctctacaacgttaagtagagtatatcctgatcacacaccttaaattgttggcaatacccaaggaattgtcttatattgccttaattccagcacaaaaacaagactgtcatcgatttctgatatcgggtatcgtttttttcgagattcgacagctgatagtgttggttagcgcgcgaaccgcttccacgttttgtttataattttaattacacgagaagctatgaaaaaccaggatttggtggaatatttaaggtcgtgcggggtgtgcgaaatttgccagctgcgttacctgaaggccagaggcgcggagtatagaaacatcaatgagactttgcaaaaggtaagaacggtttaatttgaatttgttgacaactaattgatgtctaacttgtccgtttaaatgcccagttggatgtaaaactaaatgaaaatgtggaaaacgaagagcttgttatatccgaagggagtcaaccatctaaaagggcccgtctgggcgtgtgttcaacgtgcctgggtttattctccaaagactttcagaatgagctgctcagcagcattttggcatcggatttcgcgaaatacgattgccagaaaatcgttctggcgatttgtctaccgatgtcgcttcagttgagacagctggccatgtggtttgccttgcgaagaagatttggaccatctatagacgaaaacaatcccccagacgtgcctataaaagaggctgtcaagctgatcctacaccctataatctgtgaaaagctggccaaggtttacgatgccaacggtctgatgatcaatatagacctcacgcacagtctggaaggcgaagaggtggaaaaactggtcaaattaaacaaagaagcctttcccgccaaggcctcgcatcaaaagcgcattgaaatttcgcgaggtttactagagaaacagtatcaaccctccaaagttaaggcggaaacctatgagaaatattttcagataccctgctctaacgtagaggaatctataaaacttacttccatagacctgcagggaccattgatttgtgtagctggcagatatcgaaagctgagcagggaactttcacatactccctggattttgaatggccaaaggctcatggaggacagtatcgaggaaattataattaggcatgtcggtccccactttacagagaagctgggcaaaatcaccttcatgtcgagtggcagagaagatgtggacgtccgatgcctggggaaaggaaggccttttgttctagaaattccaaatgccaaaaggagttgcctaactaaagatgaagcctttgcgatggaacgggctgtggatgcgtctggtatggtgtctatacatcacctccaagtcgtgcccagagaagaattaacccacataaagacgggagaagagcagaaaaagaaattctatcgcgctctttgtgccctgcaagaaccagtatcagtaaagattctggaacaactgcaaatatcagcaagctttaacatacaacaaaagacccccatacgagttcttcatcgtcgtccattgcacacgcgtcccagaacaatttacagtgtcaccgccaaggtgcatcgtggaaatccaaaagccttgatcatcgatattgtcactcaagcggggacttacataaaagagttagttcatggcgaatttggtaggaccacgccatcattgtcctctattataggcaaacccatggatattcaagctctagatgtggtgggaatcgatttagattggccacatgaagtagataactcgaaacacaaggaatagcgatattattgttaggtacaaatccatttaaatgttaaatgcttaacacttaaattgcaaaaatgcagagaataaacaacaacatatgtggatgaattttgattactaagttcattatatgtttagttcaaaatcatcaaaacccagattacggggtataaccctagcctttttttcggtctattcaaacttgtccagtattattccgtgactttgaatctcgatccccaaaatattggtaacagagttagacagcgagccagaggacaaagcggacatgcgcagttaatgtaatttggagtcaagttgcgtgctctcaccataggcaggttccaatattggctacaaaagtataaagtaagcggacaaattcggcattcgttgctagcgagttgctctggtttgttatggtcaagtcaagtggagtggataaaatttgaaagtgaccgagcatagtagccaggccatttgcaaccggatgcaagcgtgcgtgacaattaaaacatgagcccgtgtgcgcaatcgggagtcagttggttagataattgaatttaaaaagagcggcccagtatgtttttccggcgcgttttggatagtgccagaaatcatttgccccctaagtcgaccacggaaagtccggcagtgcattattacagcgaggacagtgagagtgtcacatatgtgagtggtgccgtcgactgtgaagtcaaggacagtaataacaaccagtcagcagtcggcgcgggtgctccactaccagctataatgaaaattcagcgccgagcggaagctcctatcggtgcagtgcagctaacgccgctgtgggaacacatactgcgcacccgccgccttccggaaacaattttccctagcgccatgtacgcggagttccatgagcgcctgcaggacccagagtggcaggtgaggcagcacgctctgcgagtcctcgttgacgtcctggtggtgatgcaagacgaggccgatggccatatggagcggg

SEQ ID NO: 7121 - DNA, 1524 bp, DROSOPHILA
attttaattacacgagaagctatgaaaaaccaggatttggtggaatatttaaggtcgtgcggggtgtgcgaaatttgccagctgcgttacctgaaggccagaggcgcggagtatagaaacatcaatgagactttgcaaaagttggatgtaaaactaaatgaaaatgtggaaaacgaagagcttgttatatccgaagggagtcaaccatctaaaagggcccgtctgggcgtgtgttcaacgtgcctgggtttattctccaaagactttcagaatgagctgctcagcagcattttggcatcggatttcgcgaaatacgattgccagaaaatcgttctggcgatttgtctaccgatgtcgcttcagttgagacagctggccatgtggtttgccttgcgaagaagatttggaccatctatagacgaaaacaatcccccagacgtgcctataaaagaggctgtcaagctgatcctacaccctataatctgtgaaaagctggccaaggtttacgatgccaacggtctgatgatcaatatagacctcacgcacagtctggaaggcgaagaggtggaaaaactggtcaaattaaacaaagaagcctttcccgccaaggcctcgcatcaaaagcgcattgaaatttcgcgaggtttactagagaaacagtatcaaccctccaaagttaaggcggaaacctatgagaaatattttcagataccctgctctaacgtagaggaatctataaaacttacttccatagacctgcagggaccattgatttgtgtagctggcagatatcgaaagctgagcagggaactttcacatactccctggattttgaatggccaaaggctcatggaggacagtatcgaggaaattataattaggcatgtcggtccccactttacagagaagctgggcaaaatcaccttcatgtcgagtggcagagaagatgtggacgtccgatgcctggggaaaggaaggccttttgttctagaaattccaaatgccaaaaggagttgcctaactaaagatgaagcctttgcgatggaacgggctgtggatgcgtctggtatggtgtctatacatcacctccaagtcgtgcccagagaagaattaacccacataaagacgggagaagagcagaaaaagaaattctatcgcgctctttgtgccctgcaagaaccagtatcagtaaagattctggaacaactgcaaatatcagcaagctttaacatacaacaaaagacccccatacgagttcttcatcgtcgtccattgcacacgcgtcccagaacaatttacagtgtcaccgccaaggtgcatcgtggaaatccaaaagccttgatcatcgatattgtcactcaagcggggacttacataaaagagttagttcatggcgaatttggtaggaccacgccatcattgtcctctattataggcaaacccatggatattcaagctctagatgtggtgggaatcgatttagattggccacatgaagtagataactcgaaacacaaggaatag

SEQ ID NO: 7122 - protein, 500 aa, DROSOPHILA
MKNQDLVEYLRSCGVCEICQLRYLKARGAEYRNINETLQKLDVKLNENVENEELVISEGSQPSKRARLGVCSTCLGLFSKDFQNELLSSILASDFAKYDCQKIVLAICLPMSLQLRQLAMWFALRRRFGPSIDENNPPDVPIKEAVKLILHPIICEKLAKVYDANGLMINIDLTHSLEGEEVEKLVKLNKEAFPAKASHQKRIEISRGLLEKQYQPSKVKAETYEKYFQIPCSNVEESIKLTSIDLQGPLICVAGRYRKLSRELSHTPWILNGQRLMEDSIEEIIIRHVGPHFTEKLGKITFMSSGREDVDVRCLGKGRPFVLEIPNAKRSCLTKDEAFAMERAVDASGMVSIHHLQVVPREELTHIKTGEEQKKKFYRALCALQEPVSVKILEQLQISASFNIQQKTPIRVLHRRPLHTRPRTIYSVTAKVHRGNPKALIIDIVTQAGTYIKELVHGEFGRTTPSLSSIIGKPMDIQALDVVGIDLDWPHEVDNSKHKE

SEQ ID NO: 7123 - DNA, 3448 bp, DROSOPHILA
gtatataaatctacaagtatattccagctctgcgactgggcacttggaaactactatgctagatcaaagctgttccttgatttccacagaaaccggcctactactgggaacgaaaattcggctgatgattccttggatttgcccagaagcaatcgcatttttgattacaataactgcgtaatctaacaaataatttcgcctacgaggaataccacttcagagttacgtgcataattaatgaaggcgaattccagaaacagtgcatgatttgccgaattccgggcaaatcggtggccaatatctgtcggcggttgcgttatcggagctacctgctcatgagcccagatatgggctgtggactggacactgaagggagggtcatgcccggcacttatcggcccaccataagctgacattgcggcaggtcggaaccggacggcagcataatgctccattcagatcccgagcatggtttattttgttggattgaagctatctgccccgccgctcgcctcttatctgcgacacctgggcacttgggcccagtcttggtgcctggtcttgggttttattggcccgacggagcgataagtggggcccgttgtcttttgggtgccataaaccgatggcccgaatcgccattatttattgggagaaaaaccgaagtagctgtccaatctaatccgttcgtctgtcgcatgctaatttatgggcgactaatcctcacggggggtccaattcctccaccagcgattcggtaatcttcctcatcgacccgagtccaccagattgcagctgcaccggatggcctccagtggatattgctgttggattgttggttaactgaattagtttggacttaccgatgacatcagcgcggccaatgacttcagaatctcgaatgtcattcaaacaaaatctctttattttgataggatgggtctcccccatacttttacatgctatcttaaactgaaaacaaaaacaattcgtcggcgtcctagaagatgaagtcttcgtcctggccctcctcttccagcaacgagaggcttctctcgaagcgcttgatgtcctggtaccagccggggtccccggacgatatatcctccggcctgccgcccttgtggcggtacaggaactcggcgtggccctggccgggaactccgttgaccgtgcaggccacaaactggttgaacaccttagactcccagtcgccgccgacgtagcgcagcgcggaggcctccacctggatttgcacgaggtactcccgctcctcggtgcgcacaatgaaattctggtgctgcggcggcgttcccttttcgccgtacgagtacagctcgaagttgctcccggtcagcggctgatactgccgctcggggctgcacacgtagcccaccttcagggaggacaggaagaaggacggctgactgaggctgcccaccaccatgctgctgccatcgtccataaagagggcaaagtacacgtaccggttgatggagcttaggcagcgctcggtgccgaagctgtggtcccggaagcccaccattttcagcgccagctccttgccatcgagcgtgacctggccggccagttctccgttctgttcgtagtgggtgcgcttctctacgatgtggttgacgctgcgcagcaggctgtagaacttttcgttccaggcctctctggctatggagtcggctatcagggcgctgctcagatctctgttgtagtcgaagtgctcagcggaggagctttcgaaacggaggtccaagtccacggctacgtcctgcacgtccggcccttgagttttcagcagtccggagtacttgagccgccacacacgcatagatgcctcctggtagacgtggaagcctccaccctggaacgcgttgctctccgctccatccgcggtggtgaagtataccatatcgggcagattcggcgaactgaacaggccgctttcgggaagccacaggtacagtgccgccttgaggactccgcgcctccttcgctccaaggtgaccattagtttctggccctccttgttggccgccatgaagctgaccacgtcatagctcttcgggtcgttgctgagctgctgcggcctgtcgaccttggccaggtgctcctcggagccgagcagctcctcgttccgacggtagatgcggtacctcaggcggcgaaggacaagcagggcgatccagaacttcacccggtaaaagatgcctttcagtgggtacttgccgaagattagtggcggcttcaggcccagtagcttaagtgccacgaccaccaaggccgttagaatgccgaagatcagcccgagcgctgcgatcatgttgtgtcccaagatgctcaaaatctgttcaaaattaaatcctctttggagttccgcggaatgtcgatcctcgtcaaaaatgctccgttaccgaacggcttggccaattggacgcgactgcgaggcctgcactggacaatgtgtggggaagtgggtcttgtgtcccgcttatcgccactcgataagccgccaccgtctaaacccacttttcggccccacctcctcggactgggcttatcgggtcggaatcgacgggctttgcggcgatgcatgactagctcgctaaatctggatctgtctgcgctcgcgatttctgattgatacattagctggactcgtcatcgtcatcgtcgccaggagcggccgatagccagctccagatagccgtggtgcaggctatcttctggtgcaaagtctgcttgcgtagaagttccacaacgattggccaagataaaaaattgcatagaccgagtgcttcagcaaatgtgttcgtgggtacttggatgtgacccgactggatgtagtggggctctggagctgacaatctcgccaaaagagagattttccaagtcgatggatgtgaaaactagctggagtgctgaaacctagccgttagaattcgattcaagtgcttcaagtgccagactcccattgccaacactagaaaatgtccttaagggacgcgaagagcacttgccaacactcggaaatcgcgcctgcgccggaaaacaacaagcgcctaatcaataaaaacataaaatttagtgcgcaaggagcatcagcatcagcagcaggaacaggaacaggacaaaaacaatattccccaaggactccaacagaacgcacagcaccttccgttgaggccgagaaagccacattcgattggcaggagcttcgaggacagaggatacgcagctaccaggtctgcagcccgcaagagtgaacattgaggatttgctgtcgcaaaggtaacaactgggaaaagtgttggaggagggggggggggggggtcgcggaagtggaggcagttgtgactcgaataaccaaactcttttggaccagggcccatctgaggctctgagcagccaggtgaaccagtcaggtccagggaag

SEQ ID NO: 7124 - DNA, 1448 bp, DROSOPHILA
gtccaattggccaagccgttcggtaacggagcatttttgacgaggatcgacattccgcggaactccaaagaggatttaattttgaacagattttgagcatcttgggacacaacatgatcgcagcgctcgggctgatcttcggcattctaacggccttggtggtcgtggcacttaagctactgggcctgaagccgccactaatcttcggcaagtacccactgaaaggcatcttttaccgggtgaagttctggatcgccctgcttgtccttcgccgcctgaggtaccgcatctaccgtcggaacgaggagctgctcggctccgaggagcacctggccaaggtcgacaggccgcagcagctcagcaacgacccgaagagctatgacgtggtcagcttcatggcggccaacaaggagggccagaaactaatggtcaccttggagcgaaggaggcgcggagtcctcaaggcggcactgtacctgtggcttcccgaaagcggcctgttcagttcgccgaatctgcccgatatggtatacttcaccaccgcggatggagcggagagcaacgcgttccagggtggaggcttccacgtctaccaggaggcatctatgcgtgtgtggcggctcaagtactccggactgctgaaaactcaagggccggacgtgcaggacgtagccgtggacttggacctccgtttcgaaagctcctccgctgagcacttcgactacaacagagatctgagcagcgccctgatagccgactccatagccagagaggcctggaacgaaaagttctacagcctgctgcgcagcgtcaaccacatcgtagagaagcgcacccactacgaacagaacggagaactggccggccaggtcacgctcgatggcaaggagctggcgctgaaaatggtgggcttccgggaccacagcttcggcaccgagcgctgcctaagctccatcaaccggtacgtgtactttgccctctttatggacgatggcagcagcatggtggtgggcagcctcagtcagccgtccttcttcctgtcctccctgaaggtgggctacgtgtgcagccccgagcggcagtatcagccgctgaccgggagcaacttcgagctgtactcgtacggcgaaaagggaacgccgccgcagcaccagaatttcattgtgcgcaccgaggagcgggagtacctcgtgcaaatccaggtggaggcctccgcgctgcgctacgtcggcggcgactgggagtctaaggtgttcaaccagtttgtggcctgcacggtcaacggagttcccggccagggccacgccgagttcctgtaccgccacaagggcggcaggccggaggatatatcgtccggggaccccggctggtaccaggacatcaagcgcttcgagagaagcctctcgttgctggaagaggagggccaggacgaagacttcatcttctag

SEQ ID NO: 7125 - protein, 444 aa, DROSOPHILA
MIAALGLIFGILTALVVVALKLLGLKPPLIFGKYPLKGIFYRVKFWIALLVLRRLRYRIYRRNEELLGSEEHLAKVDRPQQLSNDPKSYDVVSFMAANKEGQKLMVTLERRRRGVLKAALYLWLPESGLFSSPNLPDMVYFTTADGAESNAFQGGGFHVYQEASMRVWRLKYSGLLKTQGPDVQDVAVDLDLRFESSSAEHFDYNRDLSSALIADSIAREAWNEKFYSLLRSVNHIVEKRTHYEQNGELAGQVTLDGKELALKMVGFRDHSFGTERCLSSINRYVYFALFMDDGSSMVVGSLSQPSFFLSSLKVGYVCSPERQYQPLTGSNFELYSYGEKGTPPQHQNFIVRTEEREYLVQIQVEASALRYVGGDWESKVFNQFVACTVNGVPGQGHAEFLYRHKGGRPEDISSGDPGWYQDIKRFERSLSLLEEEGQDEDFIF

SEQ ID NO: 7126 - DNA, 9405 bp, DROSOPHILA
cgccaaattactgtgctattttcagtgttaccagacattatatagacaaagacctagaacgacaattgaagttttaaattgttaagaaaaagaacttataaaatttactatatatatgaaatattcgtagtaagaatattatgttgggcagtttatcaatgtttccgacacagcaaccgcacataaatccttattttcaaagtataagcttaaaaagctaaatatggcgataaaagcgccaacttagcagcttcggccaacccataacagcggaatcagctgttcgccagtgaagaagaagagcgtgcgcgagcgttcggtgaatgaaattaaaatatttgactttttattgtatttagcagacggaaacggatcaaaaaacgtaaataaatgtggtaaacaagctgataagccgctgataaaagaaagttttatgataaacccaatgctcaccctcgaaatgaaatagtattggtgcgtagaagaaccaaccgcctatataaaaagtttaattgaagtgtgctcaaaaaaaagtgaaagtgcatacagaaccctcacgcccacgcccatgacgcccctttttgaggggagtggcagtaacggccgtccctctcgatttaccctcatttgtgtgtgtgtgtgtgtgggtgtgcgtggggggcgcctgtgttgcgcgaccttcacgcaaccttcaacatgcagcaacacgttgtgtgtaatctaacattgttttttttgcgccaataatctgaaagaaacaacaactgaatcgaataaagagctaacaaaataaaagtcaaaataaagccaacaaccggctgccaatggcaacacaaaaacaaaaatcaacaaattctcccagcaaacaaaaaactgcatttcgctctcgctctctcgttttctctctctctctctctctctcttggcgctctctttcatttaacccgtttgcttttgattttcgaattcaattcaacttcaaaagtcgagcggaaaagttggacgcgcgaaaaaccagagatccttgctcgagtgaaaaagtattaccgttcgcgttatcaaaaagcctcgaatcgtgccatttgaattgataacgtagctatagacaaaaatctggtttgattttcgtatgctaattagctcgtttttcattagcatttctaaaccttcgctaatttgcgtattagtttcgttacacgggtatggtgaaatgattgcccttatgttttgaacacaaaaaagctctataaagtaataatgaaaaaataaataatcaactgagattaagcccttgttttaaaatttaaaaaaaaaaaaaaaaaattgtttttatgttgtttacttaacttaaaaaaaacgtctaatcaagtataagtttaaatttccaagtccaattaatgggtaacgcactgccttcataataagttgaatagttcataattgattcaattgcattatttgtagagaactatttacaatgagcttgcttttcttacgtcattttggctaaacaatttacaatcctcctccagcgacaattgcaaaacaatttcgatgactcttacagataaacaaacacacaaagttcaacggcattcattcgagtaaaaataagccaggcgaccagagaaactaattattttgttgatttggcacattaattgcccgcaaaacgagtcgcgtgtgaacgaaccaaatagaactacggaccaccagacgtttacatcgatatatagcagatatagctgatatagcctgagattccacagatcggccacaaaatgaacgaccgtgaattgggctgtgcgggcggacagtttatggatcgcgggcggatgaatcagaatggcgttgtccagccgctgctcactggtaagtaggtagccaaatgtcgccaacagatggcgctcttgatagtggtaaaaagcttgtagtgatgatgggtaccaagatatgacaaacataagattatatactgttgtaccttttaatttctccattttttgtttgttcaaaataattggaatatatatagttgaaatataaatgtatatatagaatttctaatctttaaagccgactgacatttgggcacagacattttggcgcgctatgcgctgctttggccggctttttacgagtattgcacttggtataggtacatacatacagcatatatttttaggcaatgcagacacgagcgcaaataaataaaagcgaaccgatcttattaggtctttgcacttagataagaatttgcatttcattttcgggcttttgtccatttatttgggtggcgttaatttgcaccaccagcaattgacgctccatgctatcttatctgcataacactctgaacactttgctacttagtacagaggaacctacctaagttaaacccgcagtattgttaaaaactaataatgaatccttttttttcagatttgtaccaaataaccatggcctatgcctattggaaatccgataaaaccgatgatacggcggtattcgatctgttctttcgcaacaatccattccatggggaattcaccattttcgccggactcgaggagtgcctcaaattcctggatagctttcactattcccagagcggtgagtgtcatagacagcataatattttcattctaataagctaatcaactctttttgaaccctttcagatatcgaatacctgaagcaaacactgcccgagggcattgagcacgagttttttgagtacctcggcaatctgacggcgcgggatgtcaccttgtatgccattgatgagggcacagtagcatttccacggtgtgttcgcatgggatccatcaaattagtacctgtctatatatacgcatgatgataggcttcttagtgtgatataagtttaggaaattccagcagatataagtttagctatcatctattattggtatagacaaagttcaagtttaacacacatttaaatgctcatagactatggacattaaatcaaattcattttaaaatgtatcttttattgttaaaaatatttttagaacagacatcataacagtcagccattatttatcttaatataattttatgtccataacacagttctcattattgcaactgataagacttaagatattttattttcattatctttcattatcttatctgaaagcaaagtaattggattacccagatattatgtaaactttaaacactccagataagtaaaatgtatttgtccacttttagagtacccatcattaagatcgagggacctttgatcatcgtccagctgctggagacaacactactcaccttggtaaattatgccaggtaggcatcgcttatacactatctggaaatttcctaataataccacctccacttgccacacaacacaacagtttgatggccaccaatgcagcccgttatcgcatggtagctggtaaacatgtcaaactattggaatttggactgcgtcgtgcccagggaccagatggaggtctatccgcatcgaaatactcctacacaggtaactacaccgccatcaaatatgaactctagcaggccccaaactacgagtctcttggagttctttaaaatcgtgacaagaaaggtcagccgtgtgcgatatgaatattttttcggcattgccaaattgcatgcagacagctcattatcaattaaaaataataaggggaaagggaaacatcaggattcgggcacagagtttatttacagtcaccttctgttggaaagcttacattgtgtgattccgatctacaaattcttagatgttatatatgaactatatacttttaatcacaaatacgagcctaaacgaacattttgtttgtcagcgcttaagtaattatccataataagtttacagggcatttaagtagtccataggacagcatatctgaggcattgatcctttcaaagggcctgcaggaagtcggtgcttttcatattgcctctggccgacttttatgatgtgcatgcatgcaaagcacgtgtcactgtcaggagctgaggcttcgctgactctgatttccgattttgccatttctcaaggccctccctccgaactatgagtaattctccgccttcatcaaggcttccggctcgtctccacctgctcctctcgcgacaaagttcaagaactctagtttatgtgttaaactaaatgcgcccgggcggcagtaaaatgcccaaagtgggtggcacacgcaacgcctacgtggggtgtccatgtatatggagtatatcggtgccaggcacccatcgaatccggattcgaacatggcaaaccctgctcctgctccggagcctctcgattggcgctcacacatcgtaactttttcggtttcgtttgtttggtaagcaacgctccaagtttttaatgcgttccacattgtgcttggactatacatatatcatctatatagtatcaccccaaaatcgcgtggcgtcaaggttcccgtcaaggttttttttttgtgataaagtgaagggaaattgaaatgtttatagccggaattttcgctcttaatggaggaaaataatgtaacgaaaccattaagcgagtatttaaaagtttggaggctttgtatccttgtgtaaatgtataaactaaattatacgatcattccttattcttttaccaggcggttttgatggcacctccaatgtgctggctggaaaattgttcaacatacccgtaaagggaacgcatgcccatgcctatatcactagtttcagtagtattggagagctgaagacccgtctaattaagcacaagcagacaggtgagtaaatgctgtactaagcattaagaaaccataatgataaactccatttcctaggcatcctggaagatttgctggagcatgctgtcaggcaccgggcattgctgtcgcatctccttgacgtttctacggaggaatctagtgagggggaactggctgcgatggtctcctatgccatcgcattccctgatggattcatggcacttgtcgatacgtacgatgttaagaggtatttcgcttttaggcagattctctcggaacggttttagttttcggtttattcctacgtttgtgatattatcccataactatcccggtaaccctcttcttgccctcgtttattttgagtatggatttctttgttatatttcgtattgtatttgagactctcgagacgtgcaccagccagttacaaaaacccaaaaaccagagtaactattacatacatacatagctaacaaggctccgccaatgaagagtttttaattttccctgcctcatcccaatcatttcttgagcttttcatttcgttctttcgtttgagtaataatcaaaagtattatccaacagccgagaaacagaacaagccaacacagaaccaaagcatatcaatgatatcaagtctgagaacagtccgccaaagccaaaggcaagtccctcgaccaatggccatcaaaatggtcagggcgttggccacgtaaacggccacaagaccaccaatggtcatcagaatggctctgctcagaataatggcagtagaacgccaaaagatacagatatacaagatactagtaccagcacaacaactacgaaaacaactgcaacagcaacaggaaccttaaagacaacaaccacagtgtccaatgggacggcatacctaccaaaatatgtcgagaagtcattcaggtaaatgtcgttatcgaaagcagaccaatcagtaatagaaaaatcaaatgattaaataggcgaatttaaaagcatttacttaatctatctttccattgtcatttccttctaacctaatcctaatcataaatcacatctgcatttttaacagcattttcttctgcttttttgtttaagactttacgctcattatttcaaatgtaactaacaaaaatctaatttagaagttactatcctggatcattttgttagctctactattgaactatgatttttactaatataagccttgcatgacgacgtggagaaatattcaactagaatttcgatacaaaattcaaaatttcaaacctcatatacatatgcatatatgcgtttatatatctaagctaatatatatataatatatgtccatgtatatgtcctctgctttggtgtcacgaaattggtcaaagatcctcgagagtgggaactaatccgggcaatagattcgaacaatgaaaatcaaccagaacaggtgaagtcattttattttatttatttaatttatcgctttgctttctccctgttgcccgcccaattttctacagtgtaatttttcgtatcactttcttctactaacacacgctcaattatcattatacatttttccgtttcatattattttttctaactgacttttgtttattatgctttttattttttctcgtcctaaatgtgaatgtgaaacaaatagaaatcgaaaacataatcgaaaccgaatcagaatcagaaaaccataaaatatcgaaagcaaatgaaaagaatttacgaacctaacatagtaaacaaatgacttccggcactattttggcagaggtatgtaaaacacacgtcttcaaccaacaaaaacatgagaaaatatcatatggcatacaattcacctactcaaaagcaaaaaatacgacaaacgaaaccaaagttcatgcataatgatatacgatccttaagctcacaaacacataaccaggtgcataaaacaatcaagagaagtgcaattaaaacaattttctactgaaccttgatcataaccaaatagtttattaacaaagctaaacagttttgttgaacaaaacgtaaaaaagtaaacttgttcgctttatttctgcattgttttaagcacataaatgaaaaagaaacctacgaaatcacgcactgattcaccctaatgctgtcatagactaaaccccgttcttattgtcctcgtcttcagttcgaaaacattttggttttaggaaattaaacttaaattttcttgttttctgtgccccagttttgtattgttacatacatatatttttcgaaacattttatttacgaccaacaaagagaacttcaaaaatgttttttcttttttcgttggttttatgacctgtacatagttaagaaaagcgtccgagagagcacactgcatggcttgaaaaacaaaaccgaataacttcgacttttttgtgctgctgctccccttatgagaaaattatggcattttcccaggcttcaaatttcgaacacaaagagccgcacctgcaaatcgaagagaaccaatttgagttctgaaacacgttttatagctccacctcactttcgaaacatttgaatttgcgtaattctcgctttcaaactagtgaccaaaaaccaaatttaaaatattgtatagcaaaatgagtaaaatgagtttaacgttgaattgaaaaccaaaaaccaagcagcacttgttggaatccatagatgcgacttctaaacacatgcttgtgatttcttctccacaggagtggcttgctgaatttcagcgctgtggccttggccctcaacgatctgggctaccatgcgcttggaattcgaatcgactccggggatctggcctatctttcctgcctggcacgcgaaacgttcgagaaggtggcggagcgattcaaggtgccgtggttcaacaagctgaccattgtggcgtccaacgacatcaatgaggacaccattctgagtctcaacgaacaggggcacaagatcgattgctttggcattggcacgcatttgggtgagtttgctgtacttatgtacatttgaaatcttgaatgtgttgtaaatattgtgtattttgcagttacctgccaacgacagccggcgctgggttgtgtgtacaagctcgttgagatcaacggccagccgcgtatcaaactgagccaggacgtggagaaggtgacgatgccgggcaacaagaatgcctatcggctgtatagcgccgatggtcacgcgctcatcgatctgctgcagaaggtatcggagccgccgccagcggtgggacagaaggtactgtgccggcatccgttccaggagtcgaagcgtgcctacgtgataccctcgcacgtggagtcgctctacaaggtgtattggaagtcgggcaagatttgccagcagctgcccacgttggagcaggtacgcgagaaggtgcaaatctcgctgaaaacgttgcgcaacgatcacaagcgcacgctcaacccgacgccctacaaggtgggtgtaatcatttgatttggcttacgaaaagggtctaaccaatgtctcactttttttcaggtggctgtcagcgataatctctacaacttcattcacgatctgtggcttcagaatgcaccaattggcgagctatcatgatctatataaggaggatctggcaaggatgcgctaaaacatttccgagaaatttacttacctttggttttcaatatttgttggcctcgattttggggtcgtggtggattagttttttttttagtcaattgctggtcatatgcattgtagagctggaactcgttccgtcacacgaggatttcccgctgactatgaagcacaaactcccacgcaatttagcgagtgaatttcaaatcaatagttttaacgtgtttatctaatatttactactactactactactactatgtaaaacgcacatcatattcaggaatgtgtaatgtgccttaaacgagaagcggaagcggaattagaatcaggatgcacaggaatcacgaacccaaatcgagttactaagttacaaccaaatatcggaacggaataaatatgtctttaatatttttctagtacttaagtgttgaaatgttgcgaacgaaggatgaatgttagaagtacaaatgctttttaggacatttgcacgcagtagggcacaacacatcaagcacacaactataactactctatctatatataactacatacatactgcgattatgtatttaactaaaaggtaaaagagcgccgcaaagagaaatcaactttctacgacagtttgggaatagtttttagtatctgtatcttttatttatttcgaatatgcaaagacagtgttttcatttaaacttctttgtcggtttgacaaataacatgcttctttctgtggcacggatcatcgttcattttgctcctaatcagctccacacagttctcatcttcattgccgtgattgggttcgcccgcattccaattgaggaattcaacttccctgccggatgccacggatacgtaggtgttactgctttgcaagtcgtttatgcccagccagtagctcttgtcgtccagtctcgctgaaatggcgtccagctcctcttgatccttgatggcggctatatagccacccatg

SEQ ID NO: 7127 - DNA, 2104 bp, DROSOPHILA
ggacgcgcgaaaaaccagagatccttgctcgagtgaaaaagtattaccgttcgcgttatcaaaaagcctcgaatcgtgccatttgaattgataacgtagctatagacaaaaatctggtttgattttcgtatgctaattagctcgtttttcattagcatttctaaaccttcgctaatttgcgtattagtttcgttacacggataaacaaacacacaaagttcaacggcattcattcgagtaaaaataagccaggcgaccagagaaactaattattttgttgatttggcacattaattgcccgcaaaacgagtcgcgtgtgaacgaaccaaatagaactacggaccaccagacgtttacatcgatatatagcagatatagctgatatagcctgagattccacagatcggccacaaaatgaacgaccgtgaattgggctgtgcgggcggacagtttatggatcgcgggcggatgaatcagaatggcgttgtccagccgctgctcactgataatgaatccttttttttcagatttgtaccaaataaccatggcctatgcctattggaaatccgataaaaccgatgatacggcggtattcgatctgttctttcgcaacaatccattccatggggaattcaccattttcgccggactcgaggagtgcctcaaattcctggatagctttcactattcccagagcgatatcgaatacctgaagcaaacactgcccgagggcattgagcacgagttttttgagtacctcggcaatctgacggcgcgggatgtcaccttgtatgccattgatgagggcacagtagcatttccacgagtacccatcattaagatcgagggacctttgatcatcgtccagctgctggagacaacactactcaccttggtaaattatgccagtttgatggccaccaatgcagcccgttatcgcatggtagctggtaaacatgtcaaactattggaatttggactgcgtcgtgcccagggaccagatggaggtctatccgcatcgaaatactcctacacaggcggttttgatggcacctccaatgtgctggctggaaaattgttcaacatacccgtaaagggaacgcatgcccatgcctatatcactagtttcagtagtattggagagctgaagacccgtctaattaagcacaagcagacaggcatcctggaagatttgctggagcatgctgtcaggcaccgggcattgctgtcgcatctccttgacgtttctacggaggaatctagtgagggggaactggctgcgatggtctcctatgccatcgcattccctgatggattcatggcacttgtcgatacgtacgatgttaagaggagtggcttgctgaatttcagcgctgtggccttggccctcaacgatctgggctaccatgcgcttggaattcgaatcgactccggggatctggcctatctttcctgcctggcacgcgaaacgttcgagaaggtggcggagcgattcaaggtgccgtggttcaacaagctgaccattgtggcgtccaacgacatcaatgaggacaccattctgagtctcaacgaacaggggcacaagatcgattgctttggcattggcacgcatttggttacctgccaacgacagccggcgctgggttgtgtgtacaagctcgttgagatcaacggccagccgcgtatcaaactgagccaggacgtggagaaggtgacgatgccgggcaacaagaatgcctatcggctgtatagcgccgatggtcacgcgctcatcgatctgctgcagaaggtatcggagccgccgccagcggtgggacagaaggtactgtgccggcatccgttccaggagtcgaagcgtgcctacgtgataccctcgcacgtggagtcgctctacaaggtgtattggaagtcgggcaagatttgccagcagctgcccacgttggagcaggtacgcgagaaggtgcaaatctcgctgaaaacgttgcgcaacgatcacaagcgcacgctcaacccgacgccctacaaggtggctgtcagcgataatctctacaacttcattcacgatctgtggcttcagaatgcaccaattggcgagctatcatga

SEQ ID NO: 7128 - protein, 541 aa, DROSOPHILA
MALSSRCSLIMNPFFSDLYQITMAYAYWKSDKTDDTAVFDLFFRNNPFHGEFTIFAGLEECLKFLDSFHYSQSDIEYLKQTLPEGIEHEFFEYLGNLTARDVTLYAIDEGTVAFPRVPIIKIEGPLIIVQLLETTLLTLVNYASLMATNAARYRMVAGKHVKLLEFGLRRAQGPDGGLSASKYSYTGGFDGTSNVLAGKLFNIPVKGTHAHAYITSFSSIGELKTRLIKHKQTGILEDLLEHAVRHRALLSHLLDVSTEESSEGELAAMVSYAIAFPDGFMALVDTYDVKRSGLLNFSAVALALNDLGYHALGIRIDSGDLAYLSCLARETFEKVAERFKVPWFNKLTIVASNDINEDTILSLNEQGHKIDCFGIGTHLVTCQRQPALGCVYKLVEINGQPRIKLSQDVEKVTMPGNKNAYRLYSADGHALIDLLQKVSEPPPAVGQKVLCRHPFQESKRAYVIPSHVESLYKVYWKSGKICQQLPTLEQVREKVQISLKTLRNDHKRTLNPTPYKVAVSDNLYNFIHDLWLQNAPIGELS

SEQ ID NO: 7129 - DNA, 3444 bp, DROSOPHILA
catccagactatttgccctgatgaagtacctcttgtggatcagcttacttttcattggagaatcccatggatacgtgcgcctcacgaacctcaagtgcgaaagctatgacaaatcattcgtcgtctttcccgaatgccgactaaaagtgcttggcaggggaattatcggagccaacatacacgttaagcttctgaaactgccaataaataggatggtcgtgagattcatcacttaccggaagctaaacggataccatccgtttctatttaatgtttccgaggaacactgtcgcgtcctaaggtatccaaatcgtctcagagtcttctactatttctacaccgcctttatgcccttttccaatattaatcatacatgtccctataatgtaagtatttagtttcgccaatatgacaatcatattaaatcatattaaaatatatattttaaggatgatatttacataaggaactgcaccttggatgatcgtatgtttgccaaggtcccattaccaaagggtagctataagttaaccctcgaaatggatgatggtgtcgtgaactggatttccatcataaacatccactttgaaattgacgttgactaagatgaacaaaacattagaacacctaatggatctaacacaacgaacacatatttattttgcgttaatgttttaattattcctatgcccgctatatgatatagttgtccgatctggcccgttccgacttctatacttaatgcaatacaaagttcgttaatgcaaattgctttaaaactgactaattacatcggttgttaatactcttcgagaatacatacacaatatggcgtcttatttacttctctgctagatcattctgagttatatttataatgtattcatatttactttgctcaatgctcaatttatcgccccgctgtgttatcggcgagttatcagcagcgtggtcgttatcaccggcgtttttaaaaaactgattgcggcaacaagacgtctccgttttatcaatagttaatgtttattgaaatttcttttctctcgtttaaggtttaggtggtcagagtaaacgcctccgcagttgggcagcagatacaaaatgttttctcgcgtgtcgtgtctttacaatgtttcatttaagaatatgaaggatgtgtggtgtgtgctcatttgggattgatttatattttggaacaattttgggagttagcagaacttccatcggttgccgcactcgttgcacatgacgaaggtggtcataggttcatcggcggaacgagtctgcagctggttgtaggtgcagttgcgcttcttgcacttggcgcacttgaggagatcggtcttggtgccctgcacggtggccagctgggcatcgttgatggcctccttgacgaacttctcgcgcagcttcttcatctcatcgctggccatctcctccggcgtcattttggccagctgcttggcagtgacggcgccgcacataaagttgcctcgcaatccaggatttttggggtccttcagattggccacgcgtgacctaatgcgattcttgtacttcatatccgtgttattgaactcggagtaaatggcatcctccagttcggcggccatttcctccggctcaccgcatccttcgggcacttcaccaatcttcagtgcggtggccagcatttcgcggcatttgatgcggaccgcatctgtcatgccgccggagggaaacgaggtctgtgacgaggatgtcgagcctttcttctctttatccttggatgagctggatgaactggacttatccttgccggagattgacgacgacgacttggcggcactggtggacttcgaggcactgctgttgttggaggagccctccttagcggagctgttgttcggtgtggttggcgccgggctggcgaggaatcgtttccagttcttgatcagcgtcttggccagagcgatcacctcgtcgtccttgctactcttgcgcagctcgtttacggtcatgccgatgcgcgttttggtcagaatgtcgagattgatgttaagcgtttgcagggccttcagcaggtccagagcctgatcctgtccctgtacggtggatatatgtatatttgtgacatgatgcgcggcacgttagctaatcccgatacttactgtgccgtcgctggccatcttgctcatcttcttttggattcgaaacacttcctcctccacgctcattttggcccacttaatttgatcagaggttaggttaactggcgtcggctgtcggctttaatcggtgctgcgggtctgcgacagttgtttatgcggaagccgggctatttctttttttccctccaataaatgttgtttactatttttttcgtttctgtattcgcagaacgagttgacagaacaccctaacgcgttttagtgttaccgggcggtggcttgtcaagaaatgccttcccatggctaatacaattcccaactggaagtagtttgggtttcagaagtcaacagtgttaccgtattttaatgtacatctggcttttaagcgagtacacacacatagcattgcgatgttttttaaacttgcactgcttgcaagcagggctccactgtatttcaatgaaagaacagcgtgttgggcgtttttgaattatactaattaccttcaataacaattccctatatatcacttagttttaataaataaatcgtttgagtgtggtctagagatgatgtattatgatgaagtgcggttgttggggacaagcgggatacgtctgcgggtcaaatcggcggtgggacatagtgagagggcaacggctccaaaaccaagcgttgcgaacaatcaccaacgcgccctggtacgcgagaaatgttgatatcgcacatgacctcagcatccaccttcagtttgagaacaaattaaatcaggcacataccagacaaccaggagaacactgaggaggcgtcatcaaagatatctttggacacgtggcataaacaagccaaactattatctaatcaatatttttatacaaattttgtatgtttccatgttatcttcgttgctcctgttagttactacgtttcatagcccttaaattggttgcttaacgtaaaataaaattatattgtataaaaataaagaggaattcacctataacaaacgaaaaagtaaataaataagaacttccccatgttaaaaatgccaccaccatctttacatataagtatgtacatatgaatgaatcacttaggttgcttgaatattacaatttcattaatagctaaatcacatttgatgtgttagtggaaaacggctatatatataaattatcgaaattgtgaatatcgaattgcgatagcacaatgggaaattccaccactagatttttggtacttttaacagatccttttcggttttgcgttgcgcgaagtgatctgaacttatcaa

SEQ ID NO: 7130 - DNA, 1378 bp, DROSOPHILA
ggcatttcttgacaagccaccgcccggtaacactaaaacgcgttagggtgttctgtcaactcgttctgcgaatacagaaacgaaaaaaatagtaaacaacatttattggagggaaaaaaagaaatagcccggcttccgcataaacaactgtcgcagacccgcagcaccgattaaagccgacagccgacgccagttaacctaacctctgatcaaattaagtgggccaaaatgagcgtggaggaggaagtgtttcgaatccaaaagaagatgagcaagatggccagcgacggcacaggacaggatcaggctctggacctgctgaaggccctgcaaacgcttaacatcaatctcgacattctgaccaaaacgcgcatcggcatgaccgtaaacgagctgcgcaagagtagcaaggacgacgaggtgatcgctctggccaagacgctgatcaagaactggaaacgattcctcgccagcccggcgccaaccacaccgaacaacagctccgctaaggagggctcctccaacaacagcagtgcctcgaagtccaccagtgccgccaagtcgtcgtcgtcaatctccggcaaggataagtccagttcatccagctcatccaaggataaagagaagaaaggctcgacatcctcgtcacagacctcgtttccctccggcggcatgacagatgcggtccgcatcaaatgccgcgaaatgctggccaccgcactgaagattggtgaagtgcccgaaggatgcggtgagccggaggaaatggccgccgaactggaggatgccatttactccgagttcaataacacggatatgaagtacaagaatcgcattaggtcacgcgtggccaatctgaaggaccccaaaaatcctggattgcgaggcaactttatgtgcggcgccgtcactgccaagcagctggccaaaatgacgccggaggagatggccagcgatgagatgaagaagctgcgcgagaagttcgtcaaggaggccatcaacgatgcccagctggccaccgtgcagggcaccaagaccgatctcctcaagtgcgccaagtgcaagaagcgcaactgcacctacaaccagctgcagactcgttccgccgatgaacctatgaccaccttcgtcatgtgcaacgagtgcggcaaccgatggaagttctgctaactcccaaaattgttccaaaatataaatcaatcccaaatgagcacacaccacacatccttcatattcttaaatgaaacattgtaaagacacgacacgcgagaaaacattttgtatctgctgcccaactgcggaggcgtttactctgaccacctaaaccttaaacgagagaaaagaaatttcaataaacattaactattgataaaacgga

SEQ ID NO: 7131 - protein, 313 aa, DROSOPHILA
MSVEEEVFRIQKKMSKMASDGTGQDQALDLLKALQTLNINLDILTKTRIGMTVNELRKSSKDDEVIALAKTLIKNWKRFLASPAPTTPNNSSAKEGSSNNSSASKSTSAAKSSSSISGKDKSSSSSSSKDKEKKGSTSSSQTSFPSGGMTDAVRIKCREMLATALKIGEVPEGCGEPEEMAAELEDAIYSEFNNTDMKYKNRIRSRVANLKDPKNPGLRGNFMCGAVTAKQLAKMTPEEMASDEMKKLREKFVKEAINDAQLATVQGTKTDLLKCAKCKKRNCTYNQLQTRSADEPMTTFVMCNECGNRWKFC

SEQ ID NO: 7132 - DNA, 3648 bp, DROSOPHILA
actcgaatcaaaaagcggtcaaacaagcataaaacggcaacgacagccgcttatcccacgtgcatagtgccaattttgttaccccaaaagcaattatttgtatccggcgtcttgaaaccgtccttaatatcaataccaaatagcaattcaaacggaaactttaaaagaaacctaaactaaaaccgagtgaaggcctcttacattaaaagtccccgaaaaatgccgcaactatctcagaaaatcagctgcaaataactatttagttgtgacagaaaactatcgcaaagatacaacaaaatggattgaactatcgtgatactaaacattttatcaactaccacagggtcgcgtacgaaccaagacggtgaagaaggccgctaaggtcatcatcgagaagtactacactcgcctgacgttggacttccacaccaacaagcgcatctgcgaggaggtggccatcattcccaccaagcccctgcgcaacaagattgccgggtaagtgccgctcaaatctcgttagtgagtggatctataatccccaaattcctttccagctatgtcacccatttgatgggccgcctgcgtcactcccaggtgcgtggtatctccatcaagttgcaggaggaggagcgtgagcgtcgtgacaactacgtcccggccgtctccgctctggagcaggacatcatcgaggtcgacgccgacaccaaggagatgttgaagcttctggacttccacaacatccgtggcctgcagctcacccagcccaacaccaacaactttggtcgtcgcaactaagatttgtatagcgcgtagatgatgatgttctgatttgcatgggatcacaataaatttgtgtgaagtgcatttaaagtgtatgtttttgtgtttcaattaattatgcgtattcgattgaaaaatatccaaagtgaacatcgtttccaaagtggctcaccaggcaggaaactcgatctaaattcaagaaccccaagtctgtgttccgtttatcatctttattcgcattcgaatggaaaatactgtagacatgcacatatttgtaaatatgtttatattcaatccataaatatatgggttcgtttttacacagacgatatataaaagatattctacgagtgcacaatatttaaatctaatcgtgtacgctgatgccagtatatataattatttgttatgtatatgatgggtggtagctatacgtatgattgttccctccggttcaggaagatgctgatgtaatgggcgacgcagcctgatcctgctggggtcttcgcaccggattacgcaagaccagctcggaatcctccgaaatgatgggcagcgcgtgtgcccagtggtagttgatcagatggctaatgctgtcgaagatgcgatctttggttcggaccacgccctcgggatcgatgagaagcagatgcttgggcgtcttgccctctaatccggttagtacgtactggccccgctttccctgtgactcgcgcaccagaaagtcgccgtcctgctgcagcaaacgctccgatattggtctggatatgcccgcatggaaccacacctccgctgtgagcgggcattgcggtccgtcgaacacatcgcgaacagagggcaaaacagaattggcagctgtggtcgcttggaggggatcaaagtggcctaacttattggtcgtctgatcgggaggcggggagttgaggtcgatgaggttgctgctcaggcgatcgcgaggcttcttcagattcagttgtgccacacgaggcgcatgcggatggagaggttgctgcacctgctgttgttgtggttccggcacttctggtggcagcttgtttggcaaatcgttgtagtactccttcacattctccttgcagctttgattgatgttacaatccgccgagggatcattgagcctactgagagcgttgaagcgcaaggcaaacgccttgccaatggtcactattagatcctcgctttggccgccagcgcattccaggacataacatgcccgccattcatcctcattcttggctatgtaggcgaggaagtcgagggtgtcattgtcaccgccggacgcgaacgatatgcgcggcatattgtgattggctataacctcgcccgtttccacgttgcttagcgacagagcacggctcgatacattaatgatgatgttggtgccggcgtgctgcatgctgggtcgatccgatatgaagttggttaatctccgcttgccagcagactttaaaccggccgcctcgcaaactcgattgatgcactctctgcaggcaagggcaaacaaacatgacaatactgctgtgactcatggctattgctcacttaccgcgctaactgcgtacgggtctcgaagtccagggatttcattgaggtcttgacctcaacgcatcccgtgtaccgcacgttgaatgcaacacccacgcccattatgacgtcgtccggatagatgcagccgtcgctggttgtcccggaaccgctccggttgccggcatcgccattcttaggcatttgtgcggtggctgtgggcgcttggcagcgatttggcttcttgctggtcctttttccgcagctgtaggctgcaagcctttgttattagtaattcggatattactcaaggtgggaccgtattcgcgaaagtgtggccgcactgcagcgctggaagtgtaaccgcagctagcaggcatatcgatagttgctcagtggtggagctgaaagggggttctaacgagcttatcatttcaataatgcaaaagaagatataaaaatgtaactgaaaatgctagttgcttggattacgttactcaaatttcgatatcttgaaaatattggaactggcactctttaagactcccatccctaaccaatcgattgaccggttagctgcatgccatctctatgtggcaagccaaagcttcgcctggctccaaagaaaacttcacccccaaaaatttgtgctcgccgcaaacgatgttcagttactaaccgactttcgcgcaatatccacacgtcacggctacggccacaaatcatccggttctttactccgattcccaaagcggcgcgtatacatacacaaacaaacaaagcaacaaaccgcggcgaattaccaggtgtgtggaaaatacagaaatacgaaaggctcaccagtttttaacggcgttttttttgttgggttcaatttgagacaaaattcaaaatcaataaagcaagacaaaccccccgccccgccgacgcgtgtgtgagtgagatacatagttacgaccgaatcgcaacgcgcagcatccgtaagcatccgaaaattgcagcggaaaagccggaatagtgcattcgccgtgccactggaaactggaacgcgaatccgtgagatatttcgatttccaagcccaatccccccgaggctgttgtgtttaaccgttccaagcgttgcggtaagtctacttcgtcaagctttctgtttacgtttatgccagtttttcatacccatttccattccgctgcccaccgctttcgtgccgctgccttgtggctcagtgggcacataaataaaacatctttacgtcatgcgacgcgctctgaagtcatgaccaatagacaaagacaccagcggccacgcagaaatagccaacaagc

SEQ ID NO: 7133 - DNA, 1586 bp, DROSOPHILA
gaatacggtcccaccttgagtaatatccgaattactaataacaaaggcttgcagcctacagctgcggaaaaaggaccagcaagaagccaaatcgctgccaagcgcccacagccaccgcacaaatgcctaagaatggcgatgccggcaaccggagcggttccgggacaaccagcgacggctgcatctatccggacgacgtcataatgggcgtgggtgttgcattcaacgtgcggtacacgggatgcgttgaggtcaagacctcaatgaaatccctggacttcgagacccgtacgcagttagcgcgagagtgcatcaatcgagtttgcgaggcggccggtttaaagtctgctggcaagcggagattaaccaacttcatatcggatcgacccagcatgcagcacgccggcaccaacatcatcattaatgtatcgagccgtgctctgtcgctaagcaacgtggaaacgggcgaggttatagccaatcacaatatgccgcgcatatcgttcgcgtccggcggtgacaatgacaccctcgacttcctcgcctacatagccaagaatgaggatgaatggcgggcatgttatgtcctggaatgcgctggcggccaaagcgaggatctaatagtgaccattggcaaggcgtttgccttgcgcttcaacgctctcagtaggctcaatgatccctcggcggattgtaacatcaatcaaagctgcaaggagaatgtgaaggagtactacaacgatttgccaaacaagctgccaccagaagtgccggaaccacaacaacagcaggtgcagcaacctctccatccgcatgcgcctcgtgtggcacaactgaatctgaagaagcctcgcgatcgcctgagcagcaacctcatcgacctcaactccccgcctcccgatcagacgaccaataagttaggccactttgatcccctccaagcgaccacagctgccaattctgttttgccctctgttcgcgatgtgttcgacggaccgcaatgcccgctcacagcggaggtgtggttccatgcgggcatatccagaccaatatcggagcgtttgctgcagcaggacggcgactttctggtgcgcgagtcacagggaaagcggggccagtacgtactaaccggattagagggcaagacgcccaagcatctgcttctcatcgatcccgagggcgtggtccgaaccaaagatcgcatcttcgacagcattagccatctgatcaactaccactgggcacacgcgctgcccatcatttcggaggattccgagctggtcttgcgtaatccggtgcgaagaccccagcaggatcaggctgcgtcgcccattacatcagcatcttcctgaaccggagggaacaatcatacgtatagctaccacccatcatatacataacaaataattatatatactggcatcagcgtacacgattagatttaaatattgtgcactcgtagaatatcttttatatatcgtctgtgtaaaaacgaacccatatatttatggattgaatataaacatatttacaaatatgtgcatgtctacagtattttccattcgaatgcgaataaagatgataaa

SEQ ID NO: 7134 - protein, 409 aa, DROSOPHILA
MPKNGDAGNRSGSGTTSDGCIYPDDVIMGVGVAFNVRYTGCVEVKTSMKSLDFETRTQLARECINRVCEAAGLKSAGKRRLTNFISDRPSMQHAGTNIIINVSSRALSLSNVETGEVIANHNMPRISFASGGDNDTLDFLAYIAKNEDEWRACYVLECAGGQSEDLIVTIGKAFALRFNALSRLNDPSADCNINQSCKENVKEYYNDLPNKLPPEVPEPQQQQVQQPLHPHAPRVAQLNLKKPRDRLSSNLIDLNSPPPDQTTNKLGHFDPLQATTAANSVLPSVRDVFDGPQCPLTAEVWFHAGISRPISERLLQQDGDFLVRESQGKRGQYVLTGLEGKTPKHLLLIDPEGVVRTKDRIFDSISHLINYHWAHALPIISEDSELVLRNPVRRPQQDQAASPITSASS

SEQ ID NO: 7135 - DNA, 3089 bp, DROSOPHILA
gctgacttcgtagttcattttgttggcttgcatttaaagacgccatcgaacgtaggatatttaagcacaaacacaattattacgattttaaccaaccgcttaaccagaaaactgaactttttgtgacgctttgcagttggcgggcggcatgtctttggtatataatgtgtgtcaaatgaatttgcgtcaagttggcgtcggtgagttaggacggtatttatggtcggaaaatacgtggtcacactgtacatataaaaaacgacgagaagcgggtttgtctaaaataaattgttgaactaagttaaggtagaattaggacaatggccagcggatccaggacaaccattttgccccagtcgaaggaggcgcttctgaagtcctataatgcgcgcctcaaggacgacgttcgcagcatgctggagaattttgaaggtaagtgcggctcagttgctccgagcaatagattgtaataccgtgttctcctccagaaatactcaagctggcgcgccgtgagagccacagccagatttcgaagaccacgcagtgcgaacaggatgccctggaaatgcaggtccgcgcggccaacatgggtgagtaaatccactccctgggaaccagattcgagccatttccttcatgcattccgctttatagtccgtgccggcgagtctctgatgaagctggtggccgacctaaaacagtacctaatcctcaacgactttcactcggtcaacgaggccatcacaaacaattcgcagctgttcaggaacacacagagcgagtgcgacaagaagctgatgaaacttagggacgaaatggccatggacttgtacgacctggaggaggagtactacaccagcatttttaagtagcgctaggaggggaaggggttcaccttatttgtgatgaactggctttggccgaactgtagaatttaataagaaatcattaccacattcacttgtaaattttgtttagcaaacagctagtcgcgtcgcactcacaagacctgctcctgttccgcctccgaggacaaggagcgactgtccggagaggccgcgctcaggctgtcaactaggtcgcccgtgtaaaagagcaccgccttcgggacgatttgggtgcgtagcaggaagcccacttcgaaatcgttgccaaggatcagcttggtcttttcatccgcgagcgacaggtccaaggcctgcggcggagcaaagaagcgaaagaaggactcccgaggcatgaccttggtgactcggtgtgctctgttccttcgcctgctttccaccgtttggagagtgagattggagccatcgcgccagtggatgtggcagccttcgcaacgaactatttcgggcccttcgaacagaaagggatactccgggtccgccgagtgctgcagaaagtagcgcttcgtgagcagcagcgaggaatcgtgcaggaagctattgggccgaaactgaaagatgaccatgtagctgtcctggtcgtaagccaggcgcacatccattaggctctccagaagcggctcgtcgtgatcctggaccaactccgagagcaggggcacgttctggaaaactgtcagccaaaagcgtggaacacccagcgtagtcggcgaaaccggagccagtttttgcctcagctgtcgcagctcctcgttgttcccgaagtccaggtacagagcatcctgcgggtcctcgggccaggtcttctccgtttggatcggtggctccaccgaaccctccaaaatatcccgcctcgcatcgaagagcgcgcagctctggccgtagaaacgtcgctccagctcgtagacttcccggaagaactgctccgaaatgcgtacctgttgcagctgattgtgccgcagtgcccgtatgcggttctgcacgggctccgccagctggccgatcatgtgccgcagaaaggccttccggctgcgggcgggaaggtccgccggactcaaagccggctctgtggactcctgggtatatgtgcccagggagcgcaaggacccgctgatgccgtctgccctcgactccgtgtggctgtcttcctgggtaaccccctccgcgctgtcagccatcccaatcattgtgcaattcggtgcaataacttcgaaatttggcaacatatatgtatataaatctacaagtatattccagctctgcgactgggcacttggaaactactatgctagatcaaagctgttccttgatttccacagaaaccggcctactactgggaacgaaaattcggctgatgattccttggatttgcccagaagcaatcgcatttttgattacaataactgcgtaatctaacaaataatttcgcctacgaggaataccacttcagagttacgtgcataattaatgaaggcgaattccagaaacagtgcatgatttgccgaattccgggcaaatcggtggccaatatctgtcggcggttgcgttatcggagctacctgctcatgagcccagatatgggctgtggactggacactgaagggagggtcatgcccggcacttatcggcccaccataagctgacattgcggcaggtcggaaccggacggcagcataatgctccattcagatcccgagcatggtttattttgttggattgaagctatctgccccgccgctcgcctcttatctgcgacacctgggcacttgggcccagtcttggtgcctggtcttgggttttattggcccgacggagcgataagtggggcccgttgtcttttgggtgccataaaccgatggcccgaatcgccattatttattgggagaaaaaccgaagtagctgtccaatctaatccgttcgtctgtcgcatgctaatttatgggcgactaatcctcacggggggtccaattcctccaccagcgattcggtaatcttcctcatcgacccgagtccaccagattgcagctgcaccggatggcctccagtggatattgctgttggattgttggttaactgaattagtttggacttaccgatgacatcagcgcggccaatgacttcagaatctcgaatgtcattcaaacaaaatctctttattttgataggatgggtctcccccatactttt

SEQ ID NO: 7136 - DNA, 1089 bp, DROSOPHILA
atgattgggatggctgacagcgcggagggggttacccaggaagacagccacacggagtcgagggcagacggcatcagcgggtccttgcgctccctgggcacatatacccaggagtccacagagccggctttgagtccggcggaccttcccgcccgcagccggaaggcctttctgcggcacatgatcggccagctggcggagcccgtgcagaaccgcatacgggcactgcggcacaatcagctgcaacaggtacgcatttcggagcagttcttccgggaagtctacgagctggagcgacgtttctacggccagagctgcgcgctcttcgatgcgaggcgggatattttggagggttcggtggagccaccgatccaaacggagaagacctggcccgaggacccgcaggatgctctgtacctggacttcgggaacaacgaggagctgcgacagctgaggcaaaaactggctccggtttcgccgactacgctgggtgttccacgcttttggctgacagttttccagaacgtgcccctgctctcggagttggtccaggatcacgacgagccgcttctggagagcctaatggatgtgcgcctggcttacgaccaggacagctacatggtcatctttcagtttcggcccaatagcttcctgcacgattcctcgctgctgctcacgaagcgctactttctgcagcactcggcggacccggagtatccctttctgttcgaagggcccgaaatagttcgttgcgaaggctgccacatccactggcgcgatggctccaatctcactctccaaacggtggaaagcaggcgaaggaacagagcacaccgagtcaccaaggtcatgcctcgggagtccttctttcgcttctttgctccgccgcaggccttggacctgtcgctcgcggatgaaaagaccaagctgatccttggcaacgatttcgaagtgggcttcctgctacgcacccaaatcgtcccgaaggcggtgctcttttacacgggcgacctagttgacagcctgagcgcggcctctccggacagtcgctccttgtcctcggaggcggaacaggagcaggtcttgtga

SEQ ID NO: 7137 - protein, 362 aa, DROSOPHILA
MIGMADSAEGVTQEDSHTESRADGISGSLRSLGTYTQESTEPALSPADLPARSRKAFLRHMIGQLAEPVQNRIRALRHNQLQQVRISEQFFREVYELERRFYGQSCALFDARRDILEGSVEPPIQTEKTWPEDPQDALYLDFGNNEELRQLRQKLAPVSPTTLGVPRFWLTVFQNVPLLSELVQDHDEPLLESLMDVRLAYDQDSYMVIFQFRPNSFLHDSSLLLTKRYFLQHSADPEYPFLFEGPEIVRCEGCHIHWRDGSNLTLQTVESRRRNRAHRVTKVMPRESFFRFFAPPQALDLSLADEKTKLILGNDFEVGFLLRTQIVPKAVLFYTGDLVDSLSAASPDSRSLSSEAEQEQVL

SEQ ID NO: 7138 - DNA, 5350 bp, DROSOPHILA
tcatatatatatatatatatatatatatagttaaataccaattaaaacgagtagatttagatctatatcaactagtaagttgtacttgggtattagtataacatgaagggaagaccctcggacttcggagactataagcctatgacccttgcaaaataagttagtctgcattccaaatgttagtattatgaaatgtttagacattcggttttcgactacaaagcagttttacgcaagctagttttgcaagggtattcaaatttgtatatttccaacatatacaactttgtaaggacctagagtaggattcatcaggttaaagcaagggtgcgttcaatctgaaaaaatatataagtgaaggtttcggctttcaaagtgttcccacactcaccttcgtgatttaaggtccattcggtccttaaatctcttggagcaaagactgtgtacctccctgactgcaaagttcacttctagatgcttaagtgggaaaattggtatccaaatggtaaactgcaactataaggtttaaagatcaagtgttttaacaaaacctatagtttcgagacagagaagcccaatacgatcttatttgaaccgattggaggtgcattcttggttaatactgagtgcatatagagggtttatatatatgaggcagcatgcgcgatgcaaactctgcagtaattcactcaaagcgcgcctgctggtggcttgtccatcgctcgcctcatttaagaacaatagccataccgtaggttttctgcatgagtcgcgatcgcttcgtctctctctttctgatgcaatatctcaatggggtcggggtctgtcgagaatcgctgaccagatgcatgggtgcggcgatcgatgggagatgaatcgtttaatgataaataaattatgtgattcggcgctgccaaccgctactgccgcattacgtgctacgtccgatttgcaaccaggcgagcaacaactgcaatgccggctggagcagcaccagttttcagatatctgtattgatattgatccgcgtgagaaactcgccgtgcgaatcggccacagcgcgtatgatctccagcaacagttcgcgcgacaagccggctattttcggcagccttgcgaccttcgcaaagtccttgacgatcagcttgagagcgtactccttaatatcatagatctttgtgatgtctgaagcctccagcgtctgcagcacgttctcgaacgtaatgttgtgctcaagagagtatttgcagaatgcgtgaagccgattgttggcaaggccatagaagcacggcgcctggaagagataaagtgcatcctgcggcggcatcttcgtctcgccgtagtagatgtagcgcagcagggagtggaacgcctcaagcgagggagaaatctctccaatttggatctgggtgagagcggaattgaatgttactcaggatcaatactggcttcaacaatttaaatgtgtatactattatcacgggaactacttatcaatcagcgatttctacaaagttcaactcacattgactgtgttgtccggtggcataaaggatcggaacatgccctgaaagtaggtgcagcgcgatgacaacacagatttgtgggctggtatcacatgatcttctagcaccaggctaatgtcgcagaaatctttgccagtggactccaaaaaggcacacagatcgatctccaaagtggttcctaatcaaaaattataccttcagctaccaatttgtcaactatcgacgaaccgtacctatattgccttcatagctggtatctatcaccagcttgctgggatacaggcgcttgcggatgatctcgaccagcagaggcttgtccaaatcgctaaactcactggacatgaccacgtcagtgaagttctcctccttgatgatgaactgcatgcagtgatccttaatgatcttaatactgtgttggggagtgtttacataaattagtttcatttaaatacgatccaaaggctatatctgctctcacttgctcttatccgcattgtagagcgcctccagcacgttaagcttgttaatcttgtagtccaaatactggatacagccgtgggccagccgcggcatggtaaacaaaccggcaagttggtaaatatctgtgatcagaatgatgatgttcttgctgtaagtgtccttcaagtcaattcgatcggtgtaaatgtaattcaatatgatttcaaaggcctcgggggaggcgttggccagtcgcacctccaacatgggtccgcggtccccgcccgcgcccgcattcagagccagtgcatctacctggcccaccccgtagaccttctccatctgctgctggcgtgcctcccgggctgccaaaatcttgttcctcagatacttcgagcgcgccgccacaaaggcgatgtgtgctagtatgcgaatctcctccgctccgacaataaactgaatgtcgcagaactgtttgtcctggaagaattttccgaagtcatcgcgcagcgtgcacttcgggtacgacgagaactggaagcgataggtgtcgccccttctcacactattgtccacggttccgccaaatatgtacatggcatcgcagatgactgccgaggcatggaacactctacccgaaggcacatccgaattctgttcaggctggatgacggaccagacctgcgagtctagatcgtagcagtgtaaatcgttgggcagcgttgagtccgccgatcccccgaagacatacaggaaccgatcgtgatgcaccatcgtgtggccatatcgtcgcgagggcggagctgaggtagcgcctcgcaagacgggctcattggaaatgcgtcgccaagttcgcgtcttgaagtggaactcaaagagcgagttcgttatctgcaagccactctgccccgaaaagacgtacatggcgtccctggccactgccacggggaaattgcagcacgtgggcggacgatcgcccagctgatccacctcctcccactgattttcaccggtgaggtttagcgtccacatgtcgttcagccgagcattgccatcgtagcccgcatagatccacattttgttgtcatacacggctgctccgtgagcggatcgaggaaccggctggcgtccggagaacttccattccacccacatggcgctctggaacttgtattcgaacagatcgttcttgttggtcaagtttgagttggagtgaatgtcgccggtgtaacccccaaagatgaacatagagctgccggccaccaccgccgagtggtggtatcgcggagcaggcggagttcctgttgcacatgcgcggccccatgacttgtccttaacgccgaagcgaatcaggtcgtttagcatgttcttgccgttgtcacctccgaatacaaacatcgcatccttgtaggccaccactgtgtgcttgcttcgcctgattgggaagaaagggatagggaatatagatattttcatctatatggcttcacaactcacttggcgcccacgaactcggcgcattcgagcatcctggtccactgatgcgtggccgtgtaggaggtgaagtccacgttcagggcattgcagctgtagctacccggggaagtggcctttccgcttccactgccacttccactgctggcattgcttgccgcgtcatatgccatactacatcccgatcctcctggtccgctgctgcagctgctgcccggaggatgcgaggaggaggccgctccaccaccgccattccctctagagcttctcattgaactggacatggacattcggagattcgcccgtatgtgctgggcgtctaagcagccggcggtggaggcgcttttcctggccttgttccgtttgctcgacttgaaggagctgcgcaagaagaaactctcgtggtgcggactcgaattctggctgggactctgctgattggcagctgccatacaagcggggcaataaaggatcccggcaggagtgctgccaccgctgatgttggctaatcctctgtccctgtcgcgatcccgctcaaatccacctccgccactagctccggtcacaaatccgcacaccgcactcaatccactggaaatcgaactggagcccagcccacagctagcgcgcccgcttccgctggtactcctgctcccagaggcgcttcctcctgctccacctcctccgcagcctcctccgccaccacctcgttccgtggatgccacgccaacgcctccgctgatcgactttagcattaattcatcacacgccggaaggatcctccgtcgtcctcgttgtgggtaatcgtgctccggttttcacaaattccagattttatatgcaattgtatacattcgcagcttaactcgtagctgttatcggctatcgataacgcaacagtatagccatggtatttggtatatttcacactgttcgctatagttcacacacatacactctcgcacggaagatttaactgaaccgaaccattataacggtagaaactgttaactttacttttccaataaagaacttggaatttaacttaaaactaaatgttccttagcattgccgcgtggcgcccacttgaaatgggttcaatgtggggcaggcgtgtctctttgcccattctttttaaatttttaaaattgtgtgcagactcaccacgttctggtggcattagcggccgacgagaatttcgtcgctgacttcgtagttcattttgttggcttgcatttaaagacgccatcgaacgtaggatatttaagcacaaacacaattattacgattttaaccaaccgcttaaccagaaaactgaactttttgtgacgctttgcagttggcgggcggcatgtctttggtatataatgtgtgtcaaatgaatttgcgtcaagttggcgtcggtgagttaggacggtatttatggtcggaaaatacgtggtcacactgtacatataaaaaacgacgagaagcgggtttgtctaaaataaattgttgaactaagttaaggtagaattaggacaatggccagcggatccaggacaaccattttgccccagtcgaaggaggcgcttctgaagtcctataatgcgcgcctcaaggacgacgttcgcagcatgctggagaattttgaaggtaagtgcggctcagttgctccgagcaatagattgtaataccgtgttctcctccagaaatactcaagctggcgcgccgtgagagccacagccagatttcgaagaccacgcagtgcgaacaggatgccctggaaatgcaggtccgcgcggccaacatgggtgagtaaatccactccctgggaaccagattcgagccatttccttcatgcattccgctttatagtccgtgccggcgag

SEQ ID NO: 7139 - DNA, 3044 bp, DROSOPHILA
tacgagttaagctgcgaatgtatacaattgcatataaaatctggaatttgtgaaaaccggagcacgattacccacaacgaggacgacggaggatccttccggcgtgtgatgaattaatgctaaagtcgatcagcggaggcgttggcgtggcatccacggaacgaggtggtggcggaggaggctgcggaggaggtggagcaggaggaagcgcctctgggagcaggagtaccagcggaagcgggcgcgctagctgtgggctgggctccagttcgatttccagtggattgagtgcggtgtgcggatttgtgaccggagctagtggcggaggtggatttgagcgggatcgcgacagggacagaggattagccaacatcagcggtggcagcactcctgccgggatcctttattgccccgcttgtatggcagctgccaatcagcagagtcccagccagaattcgagtccgcaccacgagagtttcttcttgcgcagctccttcaagtcgagcaaacggaacaaggccaggaaaagcgcctccaccgccggctgcttagacgcccagcacatacgggcgaatctccgaatgtccatgtccagttcaatgagaagctctagagggaatggcggtggtggagcggcctcctcctcgcatcctccgggcagcagctgcagcagcggaccaggaggatcgggatgtagtatggcatatgacgcggcaagcaatgccagcagtggaagtggcagtggaagcggaaaggccacttccccgggtagctacagctgcaatgccctgaacgtggacttcacctcctacacggccacgcatcagtggaccaggatgctcgaatgcgccgagttcgtgggcgccaagcgaagcaagcacacagtggtggcctacaaggatgcgatgtttgtattcggaggtgacaacggcaagaacatgctaaacgacctgattcgcttcggcgttaaggacaagtcatggggccgcgcatgtgcaacaggaactccgcctgctccgcgataccaccactcggcggtggtggccggcagctctatgttcatctttgggggttacaccggcgacattcactccaactcaaacttgaccaacaagaacgatctgttcgaatacaagttccagagcgccatgtgggtggaatggaagttctccggacgccagccggttcctcgatccgctcacggagcagccgtgtatgacaacaaaatgtggatctatgcgggctacgatggcaatgctcggctgaacgacatgtggacgctaaacctcaccggtgaaaatcagtgggaggaggtggatcagctgggcgatcgtccgcccacgtgctgcaatttccccgtggcagtggccagggacgccatgtacgtcttttcggggcagagtggcttgcagataacgaactcgctctttgagttccacttcaagacgcgaacttggcgacgcatttccaatgagcccgtcttgcgaggcgctacctcagctccgccctcgcgacgatatggccacacgatggtgcatcacgatcggttcctgtatgtcttcgggggatcggcggactcaacgctgcccaacgatttacactgctacgatctagactcgcaggtctggtccgtcatccagcctgaacagaattcggatgtgccttcgggtagagtgttccatgcctcggcagtcatctgcgatgccatgtacatatttggcggaaccgtggacaatagtgtgagaaggggcgacacctatcgcttccagttctcgtcgtacccgaagtgcacgctgcgcgatgacttcggaaaattcttccaggacaaacagttctgcgacattcagtttattgtcggagcggaggagattcgcatactagcacacatcgcctttgtggcggcgcgctcgaagtatctgaggaacaagattttggcagcccgggaggcacgccagcagcagatggagaaggtctacggggtgggccaggtagatgcactggctctgaatgcgggcgcgggcggggaccgcggacccatgttggaggtgcgactggccaacgcctcccccgaggcctttgaaatcatattgaattacatttacaccgatcgaattgacttgaaggacacttacagcaagaacatcatcattctgatcacagatatttaccaacttgccggtttgtttaccatgccgcggctggcccacggctgtatccagtatttggactacaagattaacaagcttaacgtgctggaggcgctctacaatgcggataagagcaatattaagatcattaaggatcactgcatgcagttcatcatcaaggaggagaacttcactgacgtggtcatgtccagtgagtttagcgatttggacaagcctctgctggtcgagatcatccgcaagcgcctgtatcccagcaagctggtgatagataccagctatgaaggcaatataggaaccactttggagatcgatctgtgtgcctttttggagtccactggcaaagatttctgcgacattagcctggtgctagaagatcatgtgataccagcccacaaatctgtgttgtcatcgcgctgcacctactttcagggcatgttccgatcctttatgccaccggacaacacagtcaatatccaaattggagagatttctccctcgcttgaggcgttccactccctgctgcgctacatctactacggcgagacgaagatgccgccgcaggatgcactttatctcttccaggcgccgtgcttctatggccttgccaacaatcggcttcacgcattctgcaaatactctcttgagcacaacattacgttcgagaacgtgctgcagacgctggaggcttcagacatcacaaagatctatgatattaaggagtacgctctcaagctgatcgtcaaggactttgcgaaggtcgcaaggctgccgaaaatagccggcttgtcgcgcgaactgttgctggagatcatacgcgctgtggccgattcgcacggcgagtttctcacgcggatcaatatcaatacagatatctga

SEQ ID NO: 7140 - protein, 975 aa, DROSOPHILA
MLKSISGGVGVASTERGGGGGGCGGGGAGGSASGSRSTSGSGRASCGLGSSSISSGLSAVCGFVTGASGGGGFERDRDRDRGLANISGGSTPAGILYCPACMAAANQQSPSQNSSPHHESFFLRSSFKSSKRNKARKSASTAGCLDAQHIRANLRMSMSSSMRSSRGNGGGGAASSSHPPGSSCSSGPGGSGCSMAYDAASNASSGSGSGSGKATSPGSYSCNALNVDFTSYTATHQWTRMLECAEFVGAKRSKHTVVAYKDAMFVFGGDNGKNMLNDLIRFGVKDKSWGRACATGTPPAPRYHHSAVVAGSSMFIFGGYTGDIHSNSNLTNKNDLFEYKFQSAMWVEWKFSGRQPVPRSAHGAAVYDNKMWIYAGYDGNARLNDMWTLNLTGENQWEEVDQLGDRPPTCCNFPVAVARDAMYVFSGQSGLQITNSLFEFHFKTRTWRRISNEPVLRGATSAPPSRRYGHTMVHHDRFLYVFGGSADSTLPNDLHCYDLDSQVWSVIQPEQNSDVPSGRVFHASAVICDAMYIFGGTVDNSVRRGDTYRFQFSSYPKCTLRDDFGKFFQDKQFCDIQFIVGAEEIRILAHIAFVAARSKYLRNKILAAREARQQQMEKVYGVGQVDALALNAGAGGDRGPMLEVRLANASPEAFEIILNYIYTDRIDLKDTYSKNIIILITDIYQLAGLFTMPRLAHGCIQYLDYKINKLNVLEALYNADKSNIKIIKDHCMQFIIKEENFTDVVMSSEFSDLDKPLLVEIIRKRLYPSKLVIDTSYEGNIGTTLEIDLCAFLESTGKDFCDISLVLEDHVIPAHKSVLSSRCTYFQGMFRSFMPPDNTVNIQIGEISPSLEAFHSLLRYIYYGETKMPPQDALYLFQAPCFYGLANNRLHAFCKYSLEHNITFENVLQTLEASDITKIYDIKEYALKLIVKDFAKVARLPKIAGLSRELLLEIIRAVADSHGEFLTRININTDI

SEQ ID NO: 7141 - DNA, 2437 bp, DROSOPHILA
atcaacaaaaaacaaaaaaacgtatttttcgcaatctgcctcctaccttagattctccgcagctcctctccacctccttttcacgctcttgtctctcttttgaagcttccttcgcgttcgcgtttgtttgactttgattccgtttggttggtttgtttgttgttgccactctttggctgtttctgtttttatgttgttatctctttcttgtcagcttctctgcactttcaaaaaacaaacactgtaaaaaaaaaatgagtcttgtttaccacgcgcgagtatgggaaattctcgggaaaccaactcgtaaaaaaaatatttaaaagggaaaacaagagcagggcaaggcgaaaaggagttacagaaagcgcgtgtggctgtgatttattttattatacggtttcgcccacaaaggacttcactgagcttttagtgcgtctatgtttttcgttctatttttccaaggcttcagtttttttacacggaattttgaccgttttgtttttcgtttgtttttatttgttgtctgttgttgttggtttccgcagcacaaatgaaaattcgcgtccgtttcgcacgagtgttagtgatgtaaaaaagcatcgaatgcattgaccaccgatgtttctcgacgatacatttcagtgcttgcgcttggtatcgattggcttctgttaacctcagtggcacagcttgcagtctctagcacggactcaaacctgtatgttaactttttaatatttaattggcagggacttcaaccaaagatacatatgtgaatgacttctactaaccacattgcatctgagagctttttagcaatttcgaaaggaaggctttaaaacagagagacataaatgcatcaaatataaatatagtaatattaaatatatactcatcatacgtggacaccgattgtttttcaaaatatccgggtgaaaagcttgagccctcgggtggtaatcgataggcgcagtcagctgttcttcgttcctatcgtcttgcttgcacaataatttcagcggcatatttccataattcactgcattttccccatttaccgaatcaaaatgcgtctaactaacgttttgttcaaaaaggtgaagagcaagtgagtaatttggacatccaatttgttctttttgttaaaaccaaccgtttttacaggcgcatcatggtcgtactggaaagtgtggtcagtggacatcagtttaatgcttttcgcgatcgcttggccgacaaattggagataatacgcttcgatccgtacagtgagtgccggccatcactgactttatgcatatgcactgatgttgcccatgtttctttttcagttcaacaggaaagcctttatcgtgaacgcaagaaaatccgcagcgcctaagataaccattttttgttagtgaaaaaaataaaatttacaactattggaaacaccaaaaaacaaccgagatatatgtgcgaatgtgggtgctttattttcggcagaataggagcattataaatctggttacatatttatacaaaaatattaatttacgctcgttttagatacacattcgcatcgatacttaattctaattatcaacagcaactcgctttcgattgccgtctacttaaacggcttctcggtcataagaagaccatgctcccacagggcggtggcgacctctatcttgcgagctgaagactccaatggcaactgatcaatggtgaggtaaaatggataggccgatatgaggagctcaacggctttagcttcctctggcagaatctccatgaaatagggctcgtacttgcagtaatccaggccattgtccacatggtggtagatacgcacgctgccatcggactcggtcaccagacgcagaatgttggcacgcagcaggcgcacggatgtctttttattgaatttgtaatcgcagacgcagttgccctgctcatcggcatcactgcgtgccccatgaacagtgcgcacctcctccgagggcaatacgatcggcggaagtgcctcgtgctggaacttcttggccatctggtcgacggcctcatcaatatcatcttcggagggcatcaagtaattggtcaccagcttctgcacattctccaccagctgtttgcgcgacccgcagtcatttcccttgtaggcattgcccaaaacttgaaaagtgtgcagcggcaagccgcgacgcaaggccacactccgatcgacggccttcttaagaaccatgggcattagtgtctctagaagattggcatatgcctgctgttggtaaacactcaaggtaatgtgcagcgagtgctgttgctcttcggtgatggcctggtgaacagcgcctctcgggaaatatagtacatcgccggcgcttagtacctcatcaattatgggcttacccagctgctcttgatcatagttgcccgacgagatcctggccag

SEQ ID NO: 7142 - DNA, 318 bp, DROSOPHILA
cttgcttgcacaataatttcagcggcatatttccataattcactgcattttccccatttaccgaatcaaaatgcgtctaactaacgttttgttcaaaaaggtgaagagcaagcgcatcatggtcgtactggaaagtgtggtcagtggacatcagtttaatgcttttcgcgatcgcttggccgacaaattggagataatacgcttcgatccgtacattcaacaggaaagcctttatcgtgaacgcaagaaaatccgcagcgcctaagataaccattttttgttagtgaaaaaaataaaatttacaactattggaaacac

SEQ ID NO: 7143 - protein, 48 aa, DROSOPHILA
MVVLESVVSGHQFNAFRDRLADKLEIIRFDPYIQQESLYRERKKIRSA

SEQ ID NO: 7144 - DNA, 3014 bp, DROSOPHILA
ctccaaatcaaaactgaaagggaatatatgaaattagagatgaatacaatctcaaacattttccccattattttaaattacgaattcgtactttcagcaatactttctagaatttttattattaaatgccaaagaaagaaaatattctttctgtgtacgggagtaattgaatttgttaagatttctcttacccgtagttcgcgcacagggcgccgcctccgaaagagactttcgagacttgcaggccggtctttccgagattgcgatattccatccgacgcaccttcgcctcatcgtggaatcccttcacataggtagccggtaatgtttgagacatttttaataatccgaatatattgcgcggtctgttgaaattcgatcggcagtcagagaactactgcctgctcaatataatgggtatagtttatattctgaacatcacacattgcctcttatcaaaaagagaaatgttctgtattggagcggttttaaagtatttgaacaaatctcttattttctcttctcgaattaaaattaagagagggattggatattttctttaagggaaagtagtctttaagaaagagattcttcagaagaattctgttttgcaataaaccaagtgcaaagcctttaaagccctctcgacgtcccataaaatatacattttcaataattcaaatggttaaaaatgttcccttaataactttttatttaagtgaattgtataatctaaagtttattttaaatccgttctttctgcatttccattgatttattggtttctcactttaacaacttagccgtggataaagtggatccccaactgtaggacttggtaaagacgctgaaataaagacagaaaaggaaaccaatgtacggtgtcgattaaatagagattcaccattaaccagtctggctaggttgaggcctagttcgtgaccgtgatgcaattgcaggattggtaacaccaaatccgactaaccagttgttggccaacttacttttcgcgcaaatactgcagcacttcctgttcgtgggaagtgagaccgtcgaagatcgcgtccaggttaatccgcagcagctttcggttggggatgccgatgaggaaggtggccgccccatccagttgcatcgtatagtacatggccagctttcccagctccacgttcctctgctggcagatttcggccccccgtttggccacggccaggatttcctgactaccgggatgcgatgcatgtggtccagcgtttctcaagagtcccaatgagtgagcggccgcacagacaacgcccactcccattttctggaagtccttcatgtagcgcagcaaggtgttgtctaaaagggtgtaacgagcatagttgagcaccacctgaatgcgacccttgccccgctcggcacactccttcagcacgtccacatcgtaggcggtgactccgatgaatcgagcctttcccgcctggacgtactcctcgaggacgggtatggtctcattcagcactatgtctagattgggtgccgcgtccacgtcatgaacctgtcataagggccatattagttcaccagcttatagacgaatctaccaaacccacctgtagtatgtccaccctgtccaactggagccgctccagactccgcttcacactctcccgagctttgtcagccgaatagtcaaacatattcttcggatccagcccgtagcgcgccactttagtggcaatataataggcctcccggggtacatcctttagggcctggccaagcagcacctccgatagaatggagctgtgtctatatagttaatgccagatctaatggcctcctgcaccataaggatgccctcctcgcgatcatagtcatcaaagaagagattgcaaaggggggagccacctatagctaatttagacacgtgcagacccgtggatccgagttggcggtactccatacgacgcaccttctcctcatcgtggaaacccttgacgaaagtagctggcagtgatcccgacatccttttctgttcaactaacaagtttgaatgaaaggaacaactaaaaaaatcgggcttttatatgatttggggaccaggttttcagataagaactgtgggggtaaataagtaatttttcactttgtttgagtgagttccgtaatataattgccccgattagcaagattttcttattgataaggtgtggaagagaattccggctctttgttcgcattatcaacttagctctcaaacagtacgattctgaaaatcatattattgtatatcagccacattttttaagagaaaagcgagccatagttgcaacaactagttgtagcgatacaatgggatttttgcggctttttttcagtgcctgtctaaggagctcttcagagttagtgccagatttttgtttcgaaatcaaagctaaaaaagaaaatatattaacttctaaattgcacaacatttttataatattttataaatataagtcaaggcagctcacataaattggccttgccctatattattgaatacataatcgcaacttcatccaaaatttctagaactttctgtttttttgttttcattcgaatatattgcgcggtctgttgaaattcgatcggcagtcagagaagtactgcctgcttaatattataaatataacttatattctgaacaacacagattgcctcttatcaaagagagaatagttctgtatcggagcggttttaacgtgtttgaacaaatcttttattatctcttctcgaattaaaattaagagagggagtggatttttttaagggaaagtagtcttaaatgaaaagcctcttcagaagtattctgttttgcaataaacggtagtcgcttttgagaggctttcttctcttgcctttctcattggatcttttgaggcaaagaaaacaaatattaatcagctgaatcaaagctgtgtttgattattatctgtaatcttaaatgacctgaactgttggcccaactgaacttgatcttatct

SEQ ID NO: 7145 - DNA, 885 bp, DROSOPHILA
atgtcgggatcactgccagctactttcgtcaagggtttccacgatgaggagaaggtgcgtcgtatggagtaccgccaactcggatccacgggtctgcacgtgtctaaattagctataggtggctcccccctttgcaatctcttctttgatgactatgatcgcgaggagggcatccttatggccctaaaggatgtaccccgggaggcctattatattgccactaaagtggcgcgctacgggctggatccgaagaatatgtttgactattcggctgacaaagctcgggagagtgtgaagcggagtctggagcggctccagttggacagggtggacatactacaggttcatgacgtggacgcggcacccaatctagacatagtgctgaatgagaccatacccgtcctcgaggagtacgtccaggcgggaaaggctcgattcatcggagtcaccgcctacgatgtggacgtgctgaaggagtgtgccgagcggggcaagggtcgcattcaggtggtgctcaactatgctcgttacacccttttagacaacaccttgctgcgctacatgaaggacttccagaaaatgggagtgggcgttgtctgtgcggccgctcactcattgggactcttgagaaacgctggaccacatgcatcgcatcccggtagtcaggaaatcctggccgtggccaaacggggggccgaaatctgccagcagaggaacgtggagctgggaaagctggccatgtactatacgatgcaactggatggggcggccaccttcctcatcggcatccccaaccgaaagctgctgcggattaacctggacgcgatcttcgacggtctcacttcccacgaacaggaagtgctgcagtatttgcgcgaaaagtaa

SEQ ID NO: 7146 - protein, 294 aa, DROSOPHILA
MSGSLPATFVKGFHDEEKVRRMEYRQLGSTGLHVSKLAIGGSPLCNLFFDDYDREEGILMALKDVPREAYYIATKVARYGLDPKNMFDYSADKARESVKRSLERLQLDRVDILQVHDVDAAPNLDIVLNETIPVLEEYVQAGKARFIGVTAYDVDVLKECAERGKGRIQVVLNYARYTLLDNTLLRYMKDFQKMGVGVVCAAAHSLGLLRNAGPHASHPGSQEILAVAKRGAEICQQRNVELGKLAMYYTMQLDGAATFLIGIPNRKLLRINLDAIFDGLTSHEQEVLQYLREK

SEQ ID NO: 7147 - DNA, 5514 bp, DROSOPHILA
aaaagtagtatatatgatgcatagtcctctgtttaattattaaatttaaatgtttaatcatagaatttgcatccaagaaacacagttacaaaggttttaacacttactattctttcggttttgggtttctttcacgatccactgatttttatatttctcccttttgtttttctttattttaaataaacgttaacatagtaaaaataataaagcgtacatttcgctacgaaaagttgattcgtaattgaacaaaaaaatttatgagtaatgaaaatgcttttactgttctctcgatgaaaacaaactattgtaatagtgtatttttcttctttacaaagaagaatttatcaggccgtgatgttgaatattatatattttatctttagtttattttattcgccttgatcactggttagcgactgtaatttgtttttataaggtaggatgattttttgattaggtgagtggtaataacataaaaataaacaacttcacatcaggttttggttgatgcaataaaacaatttccatgaccgcccctgccgttttagaaaaaatctcgaaacaaatctcgtattgtgaacagctactagatataaagtccataatgaggataacttagcctgacactgactagtttacacgaggtcacttgcttgatcgcgattttatcgtgtaaaatctgatttagttggccacgtataaactaaaattgcttttcgtgtgttctcttttcatatatctttaaacatatgtataatttattatccgtttttttttacttagcttgttggttggtatttttgttgcttttggcttataatggcggctacaattgttttcgtaatttccccatttttcttttagtttttaaaaagtttgttgtctgtgatatacgtaatttataagttttcattttggtaacttgctgctttcattcaccatcgtcagtaaccaaaactgcaatttgaggaacctactcctgcccaaaacgatcgatttaagccagagtgggaaactgacgctcatcgttgaccttgggagcggtgttctgttgtcgctcaaaacgcttattcggccctggaccgctgttctgattgttgttctggttgtttcccggaccgcgacgatcgatgggtggcctttgattttgagcggatgaaccgccgccctcgttattatgctgctggccatcccgtgggccacggtttccaccctcacgattatctcggccgccctcacgattgccgccatcgcggttgccaccctcgctgcgtggtccgcctccaaatccaccgggtctggggcctccacggccaccgcgtccaccgaaaccgccaggtccgccacgacgaccatcgttgaaattgaactgaatgtccaggacgcgctgttgcctgcccacacgctgtggataaagggcagggtcgtactcgagctcctcttcgctgtcgttctccttcttcttgttgctagttaggacgaccattttcttccattgtgtggtgtcctcacctgcgggaaatattgattgtagattaatttctagatgataggccatcatttagagttaagctaagatcggtttgattttcaattttatacttcttttatacggattttagctcaatatgatttgtaactttggttgttggcttggcgaaaaggtttcttagaataacggaagttaaactatcattccgtggtatcgaattcaaattattaaccataaaaaaattatgcattgttcacgcaccttctccagccttgcggatattaaaggttggcttgatgcgctgtccttgctgtgccttccactcgtccaaggtcagctctttggcttcctcctcggcggtagcctgctcgttttgtggttcagtgccagattcatcggccttggcgccgccctcggcattggtcacattggtttcgctttcgttcttgttcacatcatcaatagcctccttgaccgatccccagttgtgggagccagctccatcgcgtttgtcaattgacttcacacctgtgcataaagaaagtatcaaatattaataatgatttatgtctgcttaaattcagaaacgtcaagaagcggaaaatctgagcttctatatttgcaaattttagccacagctatagtgcaacttgcctgcaagccctaaagtaagtttttctgcttaatttattaactgaatactttaattattagccaaataatggtctattttatcaataccccactaattaggtcaattgagaagtaaccacgatagggggactatattcactgccctcgctcgcatagtcacagataagccgacagtagcagccccagttcactgtaatcagattcagtgggggaactattccaacccctgtttccccccaatgattatgcctgcaaaggcctcctacaagcacttgcgttagacgggaatgccgccaagaagatgggcgaactatttttaacacattttctctttcgatttgtgccgcagtgcttcttgtttctgttgctgccggccgctgtgatattataattttggatattccaaaaacgaagcggtcggtctaagcaggcagtggaaaacgggggaaaacgcggcgaaatagatttcattcaatggaaagaagtgtgatgtagcttgttgaatgttctgtccgaccattagtattgatttgactcacttatcccccacgtgagtgggagatttgcctgtgttgtttgaccattgcccataagttcatcgggattttgtgtgccacaaattggtttacaccgttctcccgcacttttcgtgaaattgcttggcataaacaatatatatttaaactgatttataatgcaactgtttaaatattactatccattaaataagattggcaatctgctcggagcaggctaataaatattttatactttgaaatacattaaattcatgatttagattagctatagaaatcttaaatcaattgatggaaatttcacatagtttattaaaaggaatcgcatttcaaacaccgaacgaattccagtttcttttaaatatttgttgtgtacacagaagattggaatcatgttgcttgaaggcgactaataatttctcatgactataaacatggtaattggttacgcgtaaactgtggatggaatttgtttttcctgcgttgcctgctgagttttattttctggttgtcatggagtgtggcttttggtttatttgttaattttttcgtatgggcgcgctcgttttatggttatgtctaccccttggtggttcaactttagtttcgatcttatcaacagaaacattaactattcatatgcgaaaaaatggtcattaatctaaacgatttactccctaaatatcccatcttctctatcctttttactaagtatacttctctgtaaagactttaatgtgatctacactgtatctacttgacttgacccctaacccatttggtaccttaatgccttaatgaaatgaccacacactcaccagttctatcggaacccgactggcggtcgaactcgcgcttcctgttctggccatcgtagttgcggttctgacgctggggacgatctccgccagcacctgggcctccacctggtccgcggtaaggtcgcgactgctggccatcgggtgctccgacgttttcgcggacattgcggcgattgttgcgctgctcacgagtctcggcattgccattctgttgacggaagtttacgctgcgctgctgctggccaccttgtccttgaccctgtccttgaccgctaccaaattcacgtgttcggttggcgccacctccttgccgtggagcaccctgttgtttgtaattgctgctggcgttattattgaactgctgctgtttgttgtcggccgatggagtgaacttcttgccatcggttttgtttaacgcattattgggcttgttctccttttcggcctgatttggtttcttggcattgggtccaccaatattggatcctgcgttcgccttgttattgctgttggccaccttgttggcggtcgttttggtggccgctgcagcagcagctgacggttgcttcttcttgccagctgctgctgcggcagcagcggccgtcggcgccacaagattatctaatggatcgctgacatcgtcgtccatgaacaaaagttcataacgatttttaccggcgctgtccatgattttgtgggtgggtgtgtttttcgttgctagctggctgccgctttaattgcctttttgctctgtaaaaagaaataaatacacacagttttagtgggaattgattgattttcctttttcgcccgccgcctctcacaccctgtgagattcgataggatttctttttcgtgtcacaaactatggtctaatatggcatatattcgctggatttatggtttacgacattaacacgtggactaacgtgaatttactcaatttatttaggccctttgggtggatttttcttacttttctgctggctgtttggtggctgctgctctctaaccttaattttcagtgtttcttcttcgcctcgctgctagtattacctacacacactgcctcacgcgattccacacgcacatgggccaaatcacgcacaccacagtcagcacgaacagagcgcccacatgtgttcttggtatacatagaaaaacagaaactcacgtttttcaacgcgtttcgcggcgaatgtcgcaaatcgattcgaatggcagctgtgtttagcgggctctcgatttggcgggcactttttagtttgaagtgcaagccaatttcattagttggagaatatgtgaaaaattgagcaaattatataaattggtacaaaatgttggagcatatattataagaattcataattcaatactttagaaatgaacgtattaagttattgcttttatacttatatagaattaatttttttttctttcagccaaattaaaaaaaaaatatcaatatgtctgacgactgggatgatgaggttcgtattgcttcgtacaaagaatatatgcttactaagcctatctattttagcccattgttgatactcgcggcgcccgcggtggagattggagcgatgatgaggacacggccaagagcttcagcggcgaagctgaaggcgatggtgttggagggagcggtggtgaaggcggcggctaccaaggaggaaatcgagatgtgttcggaaggatcggcggaggcagaggaggaggagctggaggttatcgaggaggaaatcgagatggagggggcttccacggtggacgtcgcgagggagaaagggacttccgcggtggagaaggcggcttccgcggtggacaaggcggctcccgcggtggacaaggcggctcccgcgggggacaaggcggcttccgtggtggagaaggcggcttccgcggtcggctgtacgaaaacgaggatggtgagtaaaccttttggacgacatgttaaattttgggttatggtcatttgagtcattcctgctgaattccatgtggt

SEQ ID NO: 7148 - DNA, 1567 bp, DROSOPHILA
agagcagcagccaccaaacagccagcagaaaaagcaaaaaggcaattaaagcggcagccagctagcaacgaaaaacacacccacccacaaaatcatggacagcgccggtaaaaatcgttatgaacttttgttcatggacgacgatgtcagcgatccattagataatcttgtggcgccgacggccgctgctgccgcagcagcagctggcaagaagaagcaaccgtcagctgctgctgcagcggccaccaaaacgaccgccaacaaggtggccaacagcaataacaaggcgaacgcaggatccaatattggtggacccaatgccaagaaaccaaatcaggccgaaaaggagaacaagcccaataatgcgttaaacaaaaccgatggcaagaagttcactccatcggccgacaacaaacagcagcagttcaataataacgccagcagcaattacaaacaacagggtgctccacggcaaggaggtggcgccaaccgaacacgtgaatttggtagcggtcaaggacagggtcaaggacaaggtggccagcagcagcgcagcgtaaacttccgtcaacagaatggcaatgccgagactcgtgagcagcgcaacaatcgccgcaatgtccgcgaaaacgtcggagcacccgatggccagcagtcgcgaccttaccgcggaccaggtggaggcccaggtgctggcggagatcgtccccagcgtcagaaccgcaactacgatggccagaacaggaagcgcgagttcgaccgccagtcgggttccgatagaactggtgtgaagtcaattgacaaacgcgatggagctggctcccacaactggggatcggtcaaggaggctattgatgatgtgaacaagaacgaaagcgaaaccaatgtgaccaatgccgagggcggcgccaaggccgatgaatctggcactgaaccacaaaacgagcaggctaccgccgaggaggaagccaaagagctgaccttggacgagtggaaggcacagcaaggacagcgcatcaagccaacctttaatatccgcaaggctggagaaggtgaggacaccacacaatggaagaaaatggtcgtcctaactagcaacaagaagaaggagaacgacagcgaagaggagctcgagtacgaccctgccctttatccacagcgtgtgggcaggcaacagcgcgtcctggacattcagttcaatttcaacgatggtcgtcgtggcggacctggcggtttcggtggacgcggtggccgtggaggccccagacccggtggatttggaggcggaccacgcagcgagggtggcaaccgcgatggcggcaatcgtgagggcggccgagataatcgtgagggtggaaaccgtggcccacgggatggccagcagcataataacgagggcggcggttcatccgctcaaaatcaaaggccacccatcgatcgtcgcggtccgggaaacaaccagaacaacaatcagaacagcggtccagggccgaataagcgttttgagcgacaacagaacaccgctcccaaggtcaacgatgagcgtcagtttcccactctggcttaa

SEQ ID NO: 7149 - protein, 490 aa, DROSOPHILA
MDSAGKNRYELLFMDDDVSDPLDNLVAPTAAAAAAAAGKKKQPSAAAAAATKTTANKVANSNNKANAGSNIGGPNAKKPNQAEKENKPNNALNKTDGKKFTPSADNKQQQFNNNASSNYKQQGAPRQGGGANRTREFGSGQGQGQGQGGQQQRSVNFRQQNGNAETREQRNNRRNVRENVGAPDGQQSRPYRGPGGGPGAGGDRPQRQNRNYDGQNRKREFDRQSGSDRTGVKSIDKRDGAGSHNWGSVKEAIDDVNKNESETNVTNAEGGAKADESGTEPQNEQATAEEEAKELTLDEWKAQQGQRIKPTFNIRKAGEGEDTTQWKKMVVLTSNKKKENDSEEELEYDPALYPQRVGRQQRVLDIQFNFNDGRRGGPGGFGGRGGRGGPRPGGFGGGPRSEGGNRDGGNREGGRDNREGGNRGPRDGQQHNNEGGGSSAQNQRPPIDRRGPGNNQNNNQNSGPGPNKRFERQQNTAPKVNDERQFPTLA

SEQ ID NO: 7150 - DNA, 2716 bp, DROSOPHILA
ctgtgacgctaattggcgaggcggtcttctcgcgatgcctgtctgccctgaaggacgagcgcgtccaggccagcagcgtgctgaagggaccctcgaccaaggcgcaagtggccaacctcaccaagttcctcgacgacatcaagcacgctctctactgcgccaagatcgtgtcctacgcccagggattcatgctcatgcgagaggcggccagggagaacaagtggagacttaattacggcggcattgcgctgatgtggcgcggcggctgcatcatccgcagcgtctttctgggcaacattaaggacgcgtatacgtcgcagccggagctgtctaatctgctgctggacgacttcttcaagaaggccatcgagcgcggccaggactcgtggcgcgaggtggtggccaatgccttccgctggggcattcccgtgccggccctgtctaccgccctaagcttctacgacggctaccgcacggccaagctgccagccaacttgctgcaggcccagagggattacttcggcgcccacacctatgagctgctgggccaggagggtcagttccaccacacgaactggacaggcaccggcggcaatgtgtccgccagcacctaccaggcgtaggttccacctgctccactttcccgttcacacattccatgtcattggcgccggtgtcttagatgtttcttttttttctggagtactttagtacttatttataccattaatatatatgtatgtatatagaatttcataattgttgttaaacataacattaaattggtgtttttttgctagcaaatgattttgattccttagtttcatgaatgcaagtgccatttaaaatcaacaatgcgtgtggtttggtgtgttgtgttgtgtgtgggtcgagtctttcgagttgtgtcttcatctggagacgcctcctgctccttctaccgctccttccctgctattgtactctcttcagctagcgcgtttttcgctccgtatttcccttagtcgtccgagggcttcagggtcttcttgttctctataaccagtttgtcagcggaatacaggtggccgatgattacctgtggacattcaaaggttaataaactcaaccggctgataagcgaaaaaggggcaaaatggttactttcgatttctaataggatggtaattgagttttccattccccatatttgcaaaatcagatatatatgataaaatctactttaaatatacattaatatttttaatctttaaattgattgtctttgataagggaagtagtagttgatagtagtatttttataccactaattatttgagttcctaacaacttggtaaataaacgacggctctttttggatgcgctgtgatctcgaagacggaatgccttacgttatctggatactttcaagcattgctgataagggagaggggtgaaatccgacgaaccactcacctggcgacgtatcagctccagattctgttggccctcggccatttggcgatcgatctccgcgaagtccctggtgctcctgttggcgcggaatgtgtcgcgtatttttcgggcagcgtacattctgaaatccggaatagattgctcatcactcgcggcggcctttcaatttcacaacacctacctgaagttgtacgagggcagcttctccgattcgcgcaggagattcctgtataacgtgatcgcctggcgacgggtcgacatcctggtcttgatcctggccgaatggaactgaatggcgggcgggctggtggattaaagtgctgtttaattgatgagtgctttgttttgaccctggtttcttgtttcggtgcggcaactgccaattgaccgcctgatgacataaaaattacatgcggaaagccggaaaatactgacttttccgctgcaaaataccagaaacagctgactgcattcactgtggtgtcacgtgcgtgagtcttagagatgacactgcgtcgtgcggaaatcatcgcaactgaataaaaaaactatttttgtgatactaaatattattgcaaaaagtaagaaataaattgagttcatagtgcagaaaaataatttattaagaatccgaaatatttagaggtaaatattaaaataaaaaccaaattaacctgctcccattatacaaaataagacaactgccgcattttttcaattttagttttaattctgtttgttttttccgcaagaacaatatattatgtactcgttgaaaacacaaaataaatatatatattttgttcccgaaattgtttctttcttgcacgcgcgcttgctttttaaatctgacttttgtagcctaaaaatgacatttttagtggttgtaaacgtacacatatatccatatacatatatatatttatttatcagtgttagttttataagtagagtttctttagcttacgtttaggcaataaaataactttatttcccacatctaatctagaattttcctctctaactctctctttacacatgtctatcgctctcgctctttctgctgcagcgtttttgctaagagcgcttgttttacaatcaataaaaaaaaggtttaatatataaagtatgaataggtaaaaaaaaaacacattcgaaataaacctaagacgcgtccgataaaatcgctgattaaagaatatttacatgggtgtgtgctttcgagggtaagccgacatttagctgctaatattgcttatga

SEQ ID NO: 7151 - DNA, 279 bp, DROSOPHILA
atgtcgacccgtcgccaggcgatcacgttatacaggaatctcctgcgcgaatcggagaagctgccctcgtacaacttcagaatgtacgctgcccgaaaaatacgcgacacattccgcgccaacaggagcaccagggacttcgcggagatcgatcgccaaatggccgagggccaacagaatctggagctgatacgtcgccaggtaatcatcggccacctgtattccgctgacaaactggttatagagaacaagaagaccctgaagccctcggacgactaa

SEQ ID NO: 7152 - protein, 92 aa, DROSOPHILA
MSTRRQAITLYRNLLRESEKLPSYNFRMYAARKIRDTFRANRSTRDFAEIDRQMAEGQQNLELIRRQVIIGHLYSADKLVIENKKTLKPSDD

SEQ ID NO: 7153 - DNA, 2524 bp, DROSOPHILA
tacaaatgtggcacgcagtcgcaacaagaacggaaacggaaaatgttatttcgcagccacgaatgcaattccagcaaacaaatggctcacaatgggtgaagtaaacccccgaagccactactgccaaaggaggtgactttgcccattagtcggtttaggtgtcgtttgccgctctgctgaaagtttccagcgaatgtcgcactaaaagttgtctttctcgcgattgcgatacagatgtgaatatataggaggtcttaaagggtgggtggacaatgctgcaaggagcatggaagcagatcttgatgggctgcagtagctgtgtcttatccgactcggaattgctttggaagaaacgagttcacactgactgtatgctacgaccggaagaagagcccaattgataggtcaacaatgaaacagtgcaactgcaaacttgctttagaaacgtattactctgtggtctgcgcgtcgtatacgtaatgcgacctaccgccccacaaaacgaaataaaacattttaacagtttacaaacaatattttcatatttatactcatttccatcagtactcgtagagtaaataagtcaataacaaactttaatacagactataaggtatccgatagttggcacacgactacgagtagtttctattgtttggaaaactgtgcctggttctttggtgctcccaatcgaatccaaacatttaccatatgtgcgtgcatatacatttttaaacttttgcacacataacatgatacactcaagtaatcctatcccatttgaagctaacgtacacagcctttgtcagattcgtttaaccctctcctgtccatcgatgacctgtagattggttaggttattacgcccatttttattggctttcaattcggatgccagttgtctcctcatttggtttgtgttttgattgcaaaaagttaattaaaattttgttgtaattgaattttattgcattgtttgtttgcattttgttttgttcagtttttttttttttgctttgtgcggagctttgtttgagtttgtcgagtttttctattttttgccgtctgttttgttgtctggccattatgccatttgttgtcatttggtttttgcctttggtcttaattggattatggcaaaaagagttttaattaaaccaaatgaagcggagtgcggaatgccagtgagtggcaagctttttttgaatcagatgatggtttccggcagcctgggatcatcataaccatcgacgaagccttcgaagctatcatcgcactcctggtcggcagccaatggattgcggatgagttcaaaggtcagtggcggcagcggcggcagttcgacctttaccactttcggcgctgcttcttcattcgcggaagtcgatgggaattccatcatacagtcgtccccgcagcgtcggcagtacagcagatccaccaagaagcccagaaacatccccacctctgattatgcggtgctcgcccgacagctgatttcgcagcactgacgatatcggaggcccacctactactatactaccctactacttctacagccccaggcatccacgcgttcacaaatccgcgctccaagccccacgccccacaatccacagcacagctgcgtccacagcagaattcgaaaatggatggattacagactcgctcgttttccggtaaatccatcgtcatcggtgtaaaaagcaaatgacaaaattaattaaaattaaaattaaatgtcgcttgtttggcgttgattaaggagtgcgatcatgcattatgcatagcacattatatcgtattcactgcatcggcattacgtaatccactgtccacacacacacgcgcgcgcatttatgcacttatgcatttatgtttgttgctgtatagaatgcacattataattacatttatgcgcggccatcaaattcaatgggactaaagcatttgcatagcgtctgcacgccctgtttactcattaaagtcgaattgcgaggtggcttccgttccacaaaaacaaaaaaaaaaaacacttttgagccctctgcagggaatactactatttaataccaagcattatttagaccaacataattggggatttaacgtgaataaagtttcgattctacatggtgctgttactaccctgatcagttcaatgcatttctgctctgtcctactcactcactcgctgtctgctgcaacgaaaaattcaatttggccagaaagaagagcttaaaaaaaatgaataagagtgagaaatttgcaatcttttaatcacacttactcactagctctgtccctctcctccctggctctctgcgcctctctccatcccgctctgtgattttaattatgcttaacaagctgagaaagaagcagcagctgcggctgaggaaaataaatgaaggccattgcttgccatccgcaggtcctttgaggactcccgctccacatttcacactttatggtccccatttgttaatattaagttggttgctttattaaaggtattatgatg

SEQ ID NO: 7154 - DNA, 524 bp, DROSOPHILA
gcctccgatatcgtcagtgctgcgaaatcagctgtcgggcgagcaccgcataatcagaggtggggatgtttctgggcttcttggtggatctgctgtactgccgacgctgcggggacgactgtatgatggaattcccatcgacttccgcgaatgaagaagcagcgccgaaagtggtaaaggtcgaactgccgccgctgccgccactgacctttgaactcatccgcaatccattggctgccgaccaggagtgcgatgatagcttcgaaggcttcgtcgatggttatgatgatcccaggctgccggaaaccatcatctgattcaaaaaaagcttgccactcactggcattccgcactccgcttcatttggtttaattaaaactctttttgccataatccaattaagaccaaaggcaaaaaccaaatgacaacaaatggcataatggccagacaacaaaacagacggcaaaaaatagaaaaactcgacaaactcaaacaaagctccgcacaaagcaaaaaaaaaaaaa

SEQ ID NO: 7155 - protein, 83 aa, DROSOPHILA
MFLGFLVDLLYCRRCGDDCMMEFPSTSANEEAAPKVVKVELPPLPPLTFELIRNPLAADQECDDSFEGFVDGYDDPRLPETII

SEQ ID NO: 7156 - DNA, 3385 bp, DROSOPHILA
tccggggtgatgccgctgcagccgaccggccaccacaccatggagtttttcgaaatgtgcgccgccctgatcattcaactggctcgctaaggatgaggtgaccgccatcggccgcagcggaccggatgggatcttctcggctggcgatccgcactcggacagtcctgaggattgaccattacccggaagacacagtcccacaaaggaaagctggggggagtttcgggctccgcggatcccggagtctggccttaaccacatgactaagttcttgcattcgtcccaaacccttttgattttaatcggaaacccaatgtgcaattatcggtagcaggatttgggaatagattttaaaaatggcctgctactagacgacgaacaagagcttgggactccgactccagcttttctttgtgcggctgtgtaatccacataaaatgttattgaactcggacaccgccaaccgccgttgccgctacgctaccgttacccgctttgccgtatcgatttccgcttccggttagtctaagtctgtaggttccgcccggtcggcgggcttcgatccgtttctgttctgttctgtttctatttcgatttatgtttataagcaagttgagttattatccaaaccgcatgtgcacgtggatgtatttgtattatgcctaacgaattgtaattggaacctcgtctggggaagctgtcagataacaaccagatgtggaccaagttttatgtatctgtatctgaaccaaccaaacaataaagcgatccattaatattctaaatcgattgtggacgaagtgtgaattaagagtagccataattaaagttagttttattgcatattaaggtatgttgtgcacattctttcagcatcgatgattgcaaattctgcctcggcattgggcttcatatcgcagttccagtctcccgtttcgtgtgtaaaatcatagcatccctgatctaatccacctgtgcatcgcatcgccgctccagctcactactgcttctgctgttgcttccgcttcagtttgtcgattagggtctcgatgctgttggcgtcgaccagaccaatgaacttgtccactacgacgccgttcctgaaggccagaacagcgggcacggccttcacctcgaaggtctcgacgagatccaggttcgtctccacatcgatgaccgccaggtcgatctcgttcgagttctcaagcagctcgagcatcttgggcgtgagtatcttacaggggtcgcaccactcggcgtggaagttcacgatcaccgggttgtcgctgttgatcacctgcggaacaaggcataatacataggtggtggttgaacagactttaaaattggagtgctttgctcggaactaacaaaacacctcattgtcatccccataacgtcaccacaacgtcgagtatgccagattatgccacttataggcataacgtcatagctaaaaaggggagatggacctgcggctgccggggtgactatcgagattgatttgcggcagaatactgcagttttcatatagtgagtgattcatacaattgtagccagtgtctgctatattagtagttttaaattccgtctactctgagattgcggggtggtcacttgggaggctacaaaatgtgtgtgtgtgtgtgactcacgtttctcttatctcgcctaatccaactgcaattgataactcggccatggagcgatatgctgaagggtcttctgcagctggctcccgtttcttcgcggacgcagcggctggctgaaaggggtttaaaccggtatccaatgttttggggctcatttgcatacacgagcacaggccgaaaacaaaattgaaaacagaactgaggcgagtgtgcgcacacatatgtttgtatctatggacgggtccacggccaagtacgtcatggggtggattcgtccccttcccctgcctgcaccccttgctcctcccaagtatcccaaacccaagcacgtaggccagcgcacaaggtcatcgttgcctgctgccgttcctggccatcgcaacccgtttcgttgcataatcctgactcaccttctgatcgaactcgtagtggtctttgatgaccagcattttgtggaggtgctgcgactgcgacaggtacttctgggtgcccctggccgcctggggcgccattctttggcctctgctcttcgctccaatggagcaacaggccgccgccagacgtggcgcgattccctcggcggcgatcttcagcattgcggattgcggaaattcagtacgggggcggatgggtatgcggattcggatgcgtaacacaggcactctcgcagcgattagatatctggcagggtctcggatgtccaactggttgttccgtacgtgatgtgtatgcgtttaatgtttgtttataaactctgggccagcgctgcacaacactgccactggctcggcgttgccacctcgcgggcactgaaaccacttggaaatcaacttttcttgtatgacagttcgaagactcgaattgtgttaaaatattgcgctaataagaggattatttgcgcgccagggatccagtgtaagcgtatcttatcttattcttcaactttgtatgtgagtatgtcatgtggtgagctttgcgtctattccaattccttgccttaaataatgtttatttttatccctgtgcctgaacgttatccctgtcttctgcagcgaagaacgtttccagcaacggcactccgtactcgaagcagatgagcccaaccgtttgaatttggcgccctgctctcccctctcttttcacgctctctggcacgggaatttcgctgctcgcaacaacaaaatctgacatttgacgtcgcgcgttcgcttcgcccgtttcagcagcgttgccgccgaaagcagagtgttgttgttgccgttgccgttgcgtcgtgttgcgttgcgttgttgtttgccgtgccgattttattgttatttgaaatcggtcgcggagcgtgcggtgcggagcagtgctcctttttttttctactttttgtttagttccgggtcagggggcggtaagtcgagaaacggccacgagtgtcctgccactgccagtgtaactattactattaatgttggtgcgacccactcgaaaacaagcgcacaggttgaaagtcaatctcagagcatatgcgcggaaaagtgatgttggaaaaacactgtggaggtgccgaggttgttgcgtttcatgcggtcaggatgcgacgggagtaaattcgcagtccaagattccaattgaagttttaagctctgttccttttctctcctctttaggtgtgtgtgtttgtgtgtttgtgcttgtgaccgtcgcgtgtgagagtgcgcgttttccaccccaggagcgcgcgc

SEQ ID NO: 7157 - DNA, 620 bp, DROSOPHILA
cgcatacacatcacgtacggaacaaccagttggacatccgagaccctgccagatatctaatcgctgcgagagtgcctgtgttacgcatccgaatccgcatacccatccgcccccgtactgaatttccgcaatccgcaatgctgaagatcgccgccgagggaatcgcgccacgtctggcggcggcctgttgctccattggagcgaagagcagaggccaaagaatggcgccccaggcggccaggggcacccagaagtacctgtcgcagtcgcagcacctccacaaaatgctggtcatcaaagaccactacgagttcgatcagaaggtgatcaacagcgacaacccggtgatcgtgaacttccacgccgagtggtgcgacccctgtaagatactcacgcccaagatgctcgagctgcttgagaactcgaacgagatcgacctggcggtcatcgatgtggagacgaacctggatctcgtcgagaccttcgaggtgaaggccgtgcccgctgttctggccttcaggaacggcgtcgtagtggacaagttcattggtctggtcgacgccaacagcatcgagaccctaatcgacaaactgaagcggaagcaacagcagaagcagtag

SEQ ID NO: 7158 - protein, 160 aa, DROSOPHILA
MLKIAAEGIAPRLAAACCSIGAKSRGQRMAPQAARGTQKYLSQSQHLHKMLVIKDHYEFDQKVINSDNPVIVNFHAEWCDPCKILTPKMLELLENSNEIDLAVIDVETNLDLVETFEVKAVPAVLAFRNGVVVDKFIGLVDANSIETLIDKLKRKQQQKQ

SEQ ID NO: 7159 - DNA, 5044 bp, DROSOPHILA
gaccacgacgaggagaagatcaaccagttcattggggacggtatggagcgtggcgagatccaggatggcaccgtaaccggtgatcccggcaaggtgcaggagatctggaagatccgcgaaatggtgccgctgggtctgatcgagaagagcttctgcttcaagtacgacatctcgctgcctctgcgggacttctacaacattgtggacgtgatgcgagagaggtgcggtcccctggccacagttgtctgcggatacggccatctgggggactctaatctgcacctgaacgtctcctgcgaggagtttaacggcgagatctacaagcgggtcgaacccttcgtctacgagtacacctccaagctgaagggcagcattagtgcggagcacggcattggcttcctgaagaaggactacctgcactactccaaggacccggtggccattggctacatgcgcgagatgaagaagctgctggaccccaacagcatcctcaatccctataaggtgcttaactgaaggcttctacctaatagattctattttttttgtttgtgtgtaattttcataaccttataatacagaaatggcattagaagtgaattttgttaacttgtgaagttaaaaaggaccatcatatttggcacgaaaccaatgggcaaaacttacttataaaatagtccgaaaaaatagtatataccagtttttacagtaccacattataggtactcggaggtaataatagaaaaaacactatctttgcatttactgttacactacgaagcactatatttagtagcagtactcattagagtccactcacaaaattagcaccaaccggcagtaattggtcaaggatcggcgatagcttcaaactccgaagttcaaagtcaaactgccgccctgcgaaagcttcgcgagtggagcttttctgcacttatcgatagctaacattgtggcgcgactatcgatcgacgagctgccgcttaacagtgccatatatagattgtaacattagaagctcaaatcattgttggagcacaaaccacaaagaacacacgaaacatgagcgggtgagtagagggaaattctcttttccccggagttttccgcgatcctaacgtcgcccatttccggatttcttccagacaagcggatattgccctcatcggcctggccgtcatgggccaaaacctgatactcaacatggacgagaagggattcgtggtgtgcgcctacaaccgcacggtggccaaggtcaaggagttcctcgccaatgaggctaaggacaccaaagtgattggagccgactcgctcgaggacatggtctccaagctgaagagcccccggaaggtcatgctgctggtcaagggtgagttgcatatccaaattcagcggctgggtagcgcagagcatcgaaaacccattgaaacctgctgcaagcgatcgctgtgttggtgactcaacttacatgtgtgcgcgcgtgcttgtgaattggtgaaaaagtcgaagcaaagtaatcatgatgacgatttttgcggctcatattccaatgtgcaaaggggaacgagataggataagcaggtggaagtaggaagaggagggagcgcgagaaaacggtgaaggggtggagtaaacacaaaaaacaactgtttagagatcattgagctgcggccttaaccactaagtctgggttaggagttctttttgtacaaatgatagggatggcatttcgtaggttttgtatgcgatagttttgacttgaaaactagacagaattcaaagctctttataggattcgaaacttaagcattgtagctcttttaaaaccggacttctgataaaaggtttataaatggatcagtcccatttcgaaaaccgtaaccacaagtgtggcgtgagttttgtctaatcacatagttgtggtaagctgcctccacttacctaaaccatcgagcgaacccatcaggtgatttccaggtcactcacgcgttcgtctaccactctcgcgtgtccgaaactctgctcacctctagatcggcgtgcccggcttatctgttcgtgcgaaagcaacaacaacgcggcgcagagagaaatctttgacattcataataggtcacacaaaatgggcgattttcaggtggatttactcggatttgaccagccgaaaaacctacatattcctcttctgcgagttgccaggccagtgagtcatttcgtctggagactgctccttagaagaatacagtgcgggtcaataacatatgtacatagctctggaggtttttgtgctgaacatatgtagatttgaaagttgcgtgacaggttgtgcgaatcccacattcacagggtgggtgggagtaaggacaaaggttattgattatcagtgtagttaagttatcaaggatgacgacacaaaaagctagttggtcattgaacagagcgagtccaacaatcttgaccgctagtgtgccccacaaaccaccaccaacgaccgctagatagatagatcaatggtagtatcgccacgactcgttggccttatctgggtccactgcgctggagaactgctcacccggcgctagggacgcctcgccaccagggtgacctccaaaacagtgactttccaaaagcaaccaaccgaccttgtccaatcgcacgctctactttctggctaaatcgaagatttctttacgttaaaagaactggcgctagctaagaacgctttggaaaatgagtctacgatagttgagcttttgagaaccccgatgaggaattcgatctgctttaatcgactttacgctaatcagatgtaatctcgatacaatttcagctggaagtgcagtcgacgacttcatccagcagctggtgccgctgctttccgccggcgatgtgatcatcgatggtggcaactcggagtatcaggacacatctcgccgctgcgacgagttagccaaacttggcctgctcttcgtcggatccggcgtgagcggtggcgaggagggcgcccgccacggaccctcgctgatgcccggcggacacgaggccgcgtggccccttatccaacccatcttccaggcgatctgcgccaaggccgacggtgaaccctgctgcgagtgggtgggcgatggaggcgccggtcacttcgtcaagatggtgcacaacggcatcgaatacggtgacatgcagctgatctgcgaggcgtaccacatcatgcagagcctgggactgtcggctgaccagatggcagacgagttcggcaagtggaactcggccgaactggactccttcctcattgaaatcacgcgtgatattcttaagtacaaggacggcaaaggttatctgctggagcggattcgcgataccgccggccagaagggcacgggcaagtggacggcaatcgctgctctgcagtatggagtgcctgtgacgctaattggcgaggcggtcttctcgcgatgcctgtctgccctgaaggacgagcgcgtccaggccagcagcgtgctgaagggaccctcgaccaaggcgcaagtggccaacctcaccaagttcctcgacgacatcaagcacgctctctactgcgccaagatcgtgtcctacgcccagggattcatgctcatgcgagaggcggccagggagaacaagtggagacttaattacggcggcattgcgctgatgtggcgcggcggctgcatcatccgcagcgtctttctgggcaacattaaggacgcgtatacgtcgcagccggagctgtctaatctgctgctggacgacttcttcaagaaggccatcgagcgcggccaggactcgtggcgcgaggtggtggccaatgccttccgctggggcattcccgtgccggccctgtctaccgccctaagcttctacgacggctaccgcacggccaagctgccagccaacttgctgcaggcccagagggattacttcggcgcccacacctatgagctgctgggccaggagggtcagttccaccacacgaactggacaggcaccggcggcaatgtgtccgccagcacctaccaggcgtaggttccacctgctccactttcccgttcacacattccatgtcattggcgccggtgtcttagatgtttcttttttttctggagtactttagtacttatttataccattaatatatatgtatgtatatagaatttcataattgttgttaaacataacattaaattggtgtttttttgctagcaaatgattttgattccttagtttcatgaatgcaagtgccatttaaaatcaacaatgcgtgtggtttggtgtgttgtgttgtgtgtgggtcgagtctttcgagttgtgtcttcatctggagacgcctcctgctccttctaccgctccttccctgctattgtactctcttcagctagcgcgtttttcgctccgtatttcccttagtcgtccgagggcttcagggtcttcttgttctctataaccagtttgtcagcggaatacaggtggccgatgattacctgtggacattcaaaggttaataaactcaaccggctgataagcgaaaaaggggcaaaatggttactttcgatttctaataggatggtaattgagttttccattccccatatttgcaaaatcagatatatatgataaaatctactttaaatatacattaatatttttaatctttaaattgattgtctttgataagggaagtagtagttgatagtagtatttttataccactaattatttgagttcctaacaacttggtaaataaacgacggctctttttggatgcgctgtgatctcgaagacggaatgccttacgttatctggatactttcaagcattgctgataagggagaggggtgaaatccgacgaaccactcacctggcgacgtatcagctccagattctgttggccctcggccatttggcgatcgatctccgcgaagtccctggtgctcctgttggcgcggaatgtgtcgcgtatttttcgggcagcgtacattctgaaatccggaatagattgctcatcactcgcggcggcctttcaatt

SEQ ID NO: 7160 - DNA, 1508 bp, DROSOPHILA
agattgtaacattagaagctcaaatcattgttggagcacaaaccacaaagaacacacgaaacatgagcggacaagcggatattgccctcatcggcctggccgtcatgggccaaaacctgatactcaacatggacgagaagggattcgtggtgtgcgcctacaaccgcacggtggccaaggtcaaggagttcctcgccaatgaggctaaggacaccaaagtgattggagccgactcgctcgaggacatggtctccaagctgaagagcccccggaaggtcatgctgctggtcaaggctggaagtgcagtcgacgacttcatccagcagctggtgccgctgctttccgccggcgatgtgatcatcgatggtggcaactcggagtatcaggacacatctcgccgctgcgacgagttagccaaacttggcctgctcttcgtcggatccggcgtgagcggtggcgaggagggcgcccgccacggaccctcgctgatgcccggcggacacgaggccgcgtggccccttatccaacccatcttccaggcgatctgcgccaaggccgacggtgaaccctgctgcgagtgggtgggcgatggaggcgccggtcacttcgtcaagatggtgcacaacggcatcgaatacggtgacatgcagctgatctgcgaggcgtaccacatcatgcagagcctgggactgtcggctgaccagatggcagacgagttcggcaagtggaactcggccgaactggactccttcctcattgaaatcacgcgtgatattcttaagtacaaggacggcaaaggttatctgctggagcggattcgcgataccgccggccagaagggcacgggcaagtggacggcaatcgctgctctgcagtatggagtgcctgtgacgctaattggcgaggcggtcttctcgcgatgcctgtctgccctgaaggacgagcgcgtccaggccagcagcgtgctgaagggaccctcgaccaaggcgcaagtggccaacctcaccaagttcctcgacgacatcaagcacgctctctactgcgccaagatcgtgtcctacgcccagggattcatgctcatgcgagaggcggccagggagaacaagtggagacttaattacggcggcattgcgctgatgtggcgcggcggctgcatcatccgcagcgtctttctgggcaacattaaggacgcgtatacgtcgcagccggagctgtctaatctgctgctggacgacttcttcaagaaggccatcgagcgcggccaggactcgtggcgcgaggtggtggccaatgccttccgctggggcattcccgtgccggccctgtctaccgccctaagcttctacgacggctaccgcacggccaagctgccagccaacttgctgcaggcccagagggattacttcggcgcccacacctatgagctgctgggccaggagggtcagttccaccacacgaactggacaggcaccggcggcaatgtgtccgccagcacctaccaggcgtag

SEQ ID NO: 7161 - protein, 481 aa, DROSOPHILA
MSGQADIALIGLAVMGQNLILNMDEKGFVVCAYNRTVAKVKEFLANEAKDTKVIGADSLEDMVSKLKSPRKVMLLVKAGSAVDDFIQQLVPLLSAGDVIIDGGNSEYQDTSRRCDELAKLGLLFVGSGVSGGEEGARHGPSLMPGGHEAAWPLIQPIFQAICAKADGEPCCEWVGDGGAGHFVKMVHNGIEYGDMQLICEAYHIMQSLGLSADQMADEFGKWNSAELDSFLIEITRDILKYKDGKGYLLERIRDTAGQKGTGKWTAIAALQYGVPVTLIGEAVFSRCLSALKDERVQASSVLKGPSTKAQVANLTKFLDDIKHALYCAKIVSYAQGFMLMREAARENKWRLNYGGIALMWRGGCIIRSVFLGNIKDAYTSQPELSNLLLDDFFKKAIERGQDSWREVVANAFRWGIPVPALSTALSFYDGYRTAKLPANLLQAQRDYFGAHTYELLGQEGQFHHTNWTGTGGNVSASTYQA

SEQ ID NO: 7162 - DNA, 9571 bp, DROSOPHILA
tcttcattaaatgggggtcaataaaagcacattctgtatagaagttagcatcgagtaatctgcgtttgtcgtcgttttctacacgccagtccacattccggagcaaaagcagcaggagcagcaagcagcgtccacaggagcaacaagcagcatcaggacaacaggagcgcaacagcggcaaaatagcaatattggagcaataagaatcgttacaacaagtttagttttatgttttattcgactttatacaaatgatttaacttgggtatataagaaaacagtagaaaatatgtttctgttcatatttggcatgatataaagcgtcataaactccatacaaaaaaacataatatagtataatagtattctattatttttgattaatacagtttaacaaatgaaagtcccccacatataaatatattattacgtccctaaggcatggatcgcttttgatctggggtggtaataaattacatttgttagttgtagataaactcaaagatattcaacgtgttaaatattaaaaatgattcaaaaaacaagtaagagctttagattaaagggaacagacggtcatttatcaactgtccagttgtgcatgtgtatcaattgggcgtatacttcgtagtctgacatgttttattttccgataaggcgacacatatcctcacaaactttatttatggcaatgtttgatttatctctctgtctgctccactagaagctactttgggattctagataatgttgggtttacaatgattatagtaggttttgggatagcgcggccagcctccgctgggatcacatatgattgaatcgtttcacttaaatgcactttgatattttttgtaaaaattttttttggtttcttaatgggaaaaatactttttacaggcccaataccagtttcaaatttctgatgatcggattctctgggctcgtggatttggtttgggtcatcgggattagtgtacatacataggtagttcttagtttagttctgctgtggacaaagcattagatttagattccggcgcgtcagaactttgcgtagagcttgcagcgttttaatgcagatcactacgcagcagccgttggccacgccctcagccggactcttgcatgtgcaggcgttgcccttgacggcggcagcgggagctgaagaagcgctgctaatgaccggcggctcctggacttcgcccttgccagagcagcaacacgagggtgacgaggcagcggtagctgttggagctggcttttggttgcctgaacagcaaccaccagttggttttggagtagaagcaactccactgccgcaacaaccaccagaggacggagcacttgggcgggcacaaccacaaccggcattcacgggcttcggagctttgggttctccacagcagccaccacctgagggtgctggcttgacggcaccaccgccgcagcaaccgccgccaccgccggaggagccaccgctactcatggaagcaaggttttgcagcagcaaagcaacatcctcgatgttctggttcatttccgtctcgcgtttactcacttttttggtgggcaccacgctgccgcaaattcgtttgccaccgctggaattcatcgttgttgtcgttgttgttgttgtgggtgcgccagtcctggtggtctgttgagcagctgcagcaccacagtcacccccatgacagctctttgtctgatcgcacttgcagttggtgcaattgcagatgcccgcatccgctgtgatctgcttcagagtcggcttgttgtcccgtatgtccagttccaccaagccggaggcatcgcttggcacctgtgaggcctgctggagtgtggcctgcagcagcgcactgttgttgtcgatggtcatgaggatgtcatttagaagcgactccgtttccatgtcctcctcgttctcgaaactgtcctgcttgagcagctcttcgatatttggctgattcaactccaaggtgggcgtgggcagtgaggtttccactgtgggatccacatccatggtctccggctgcggatcccccatattgccgcttactgcattgccgaatgtgggcttcaggttaacgaaactgggcatctcggtgggcaaggccacgcaggcatccgtcagcggagccatgggaatgatgggcttagagacaaggacgccggcgtcaatccacggactgggtatttcctcctcggcggcgtaggagagctggtaagcctgtgatgtttctggaaggatcagaggctcgttgccctgtaggataaacacattggacaagtgatcctgcggcgtgagagtttgcagcaccactccgctgtccgtgctggtggtttcggagcagtgactgcctggatttaacaacgtcatttcgggttgatcctctttaatgaactcctcttcctcttgctcctcctgctgtggatccttctgctcctgatcgctgcacttggtctgctgcgtctttagtggccttttcttgcgacccttgttttgcaattgtcgctggtgagtctttttgtgggatttcaaactatgcgatgtgctaaacgacttttggcagctgtcctcctggcagggatacggcttttcgcctgtatgtgtccttcggtgggtcttcaggtgatgcgaggcggtgaaggctttgccgcagtcatcttccggacatttgtagggccgctcctgggtgtgcgtgcgcatatgcttcttcaggtcgctcagcgtggtgaagcacttctggcacagctcacagttgaacgtctcgccattgtgcagacgaaggtgggcgtgcaatctgtttgtgaatcgggcgacgttgattacagattaatagggccgggcccgcagccattggtttattccggtggctatcagtcctccgaagtggaagatgattactcacctgtagcgcgtgttgaatgccttatcgcagccggacacctcacattcgtatggcttcaccttcgtgtggacgcggacgtggatcttcaggctgtaggaagtgaggaatgccttgtggcatccatcttccgggcatttaaagctgtagtcgcctggaaagcagaaaaaacgttgttgttatccgtggctgttactcgtttgaatattttaatatttcgctttaataaagcatttttgtattttataatcaagaggacaaaattagttttgaaaaagataagatcgcgcgataaccagactatcgagtaggtgtcgattaaagaaccagaaacaaattgttctgagattcaatacaaaatcgaaagttaataatattcgcaatttaattattttttatttactgcgtaaggtgaaaacattatttatttacggcatgtgtgtattttcattcacttatcaaattgctaggctaggcgccactgactcgccagtgttgcaaaacacctaacgcttatcagctgtttgcctgcgataactttttcacgcgacgcaaaagcgcataagtttacctcagaatattttgatagattttcaaaaaatcacatcactatggatggttttgacgctctactaattgcaagtgtcaagcgcaacgtttcaatattcgagaaataccacactagatacgacagaaagcaggcgtggattgcagtggcccaagcatgccagaaatcaggttatatggtttcctttatatggaatacatgtgtttgtaagtttgatattgcagttgagtactgtcaaattagatggaagagcctacgagatcgctatgtgagggaaacgcaaaagcccgctgccacaaggagcaatattcggaagtttaaagagctcgatttcctcagggagcacatacgaatcagaaggtaatacatttattccatttatgcatttttgaaatggctgtaatgggtttcttttatgctaggaagccgaatgaattgtgcaatacattaaacacaaataaaacgcttgtgccgggtgtaaccgtagacagccagtcggcagatgaactagcccttgaacgaaacggcatcactgaatttcaaccggatgagtttataattgagtataagggcgaggaggaatacctcagcgagacggataactcaagcgcggagtttatctcagaggattcagcgtgtaatataggcagcgagctgccatacgtaacgaagcccagtttcaatggcgaaggacagagtcaaactcaagccaagttcatgagcgtaatgaatctcatcgagagtgcgttgaaggataagccggcggagccccaagatccattctacaaatatctagagagcattttgactggcgtggacgatagtactcgaatagatatacaactaaaagtgctcaactttgtcagtgacgaaatcaagcgaagtagacaaacttagtttacgaaaatgataccaaagtaattgtaatatatatggatactcacccgtgtgggtttttaaatgcgttcgcagatttccaattgtgctgtagctgcgataacagttctcataattgcatctatagcgactgagagcctcatccgaactctaaattgcgagtataacaatgctattaggtcagattcattgcactagctatatggttaatatagtatacatgtgcatgttctttagaatgagacaattatgatgaaatggattcatgctgaacattgggtccgagtgatatgttaggggacagcctttcgaaataagcagatactacgcaccgctaaagatggttaacaaaacttggctacacacgcctacagcggaatcacaggaatcggattctccgctaacactaggattaggatggcgagtagctacaaaaagcgttaggcaacgtaaggcacgttagacattgaactagcggttggtgattgggtgtgtgtacctcgtaggccaacgccattagctgatcgttctcgtcctgcctctccacctcctcctcatcgacatcttggtgcagcacgcccggttggatgcagtgggccagctgctcgtcctcgtccggctcatttggatcgtactcatccacatagctggaagattcggccgagcggggtaaagagaccaacatgggggaaatttatcgaatttgcagttggaaacaaacagaaaatcgcatcgggcggggcatatgtatattccatccgatttgtgtgtcagtgggccgttaagatctttgtatataattataaacgcaacaagtatatgtacatacatatatacaaatatatatatatatatgaatgaaaattgcacagattgcgattagtgggtttagagcgtcagcaaacaaagtcgtaaaggcgatcgaataaacagccgtttcctggagggctcttctgtccttattaatcagattaattaatatttaatgttgtcatggtcaaaacacaacaaatggcaaaataaaatagcagacggcaacagaaactataaagaaaagccgagggaagcagaacaacaagtgcgtgggcgctgagacggctggcatgctgactgacgggcagcgtgcgtcccccacggacccttcctcatcccttttgccaccggctcacccatcgagatgcccctccccccgccccctctaatcatgggagtactgaaaaatgagaaatatgattgagggaacactactcatggcggtaaaaatagcaagagggcgtcgtcgccgaacggggagcacggcaggaaggaaggaacacaacaagcaaggcacggatgaaaaattgaaaaattattgtaccgcagaataatgagctagcgaagagcaacaacaatgtagaacgtagcgaactaagcccatcacaacagatcatttggacttagtcgcgggaaaatttagtttatgaccgattccgcatatcttttgaagggtttcaatcaatcgggtactttacgtatcagctggtctaagtctatctattaccctgtacattttatcagtcgatttcctgtatcatccatatctattgaaatgtgagtaaacattgtgtaaacccttcagcattcgtgacttatcacaaagttgttaactaagtttcgggagaactgatttgctttgtatttatattaaaagccctatcagctgtacatgttatttagcctatttctagagaataaagacctttgagacatttacgatttttaccctttgggaaaaatagaatatatagagaaaactttttatagtgccaaatcgcactttgttgggggagaatttcacaatagaagccactacaatttggattcttttgaaaaccggcttctttacatcaagtgttaatgagtttcggggaaattttcggtcgtcttcgcctaacacattgtagaaatatacatctatgtatgcatatgtatatccatctatacattctgcttggcatttggggtgggggtagaaatctaaatgcgttcatcgccgcaactatttttggcccaaacaaatgattttcgatacaatcatcagccgaagtggaggcccaaaggcatgcagccattatgatgcccattggcacatagtctcggtaatattggatgtttgcgacgagggtatgcgctggtcgagtcgattgaagcgcgcagaaatgcaacaggctgagaacacaaatcaggcaattagcaagcaacttgcaagcgattcggacaccgcgttgtaataagtggacattggaacgcttgaaatttgccaacacaaattctcgacaaggaagaaaatatgaaaattcgattttgcctcttttttttcgtgggcagccaaacaaaaagtgaaataaaatttaaaaaaaaaatcggacacgtcacgacagacgctaggcaaatgttttccttttttccgcgctctctctctctctctctcgagaatctttttgtgtgtgggcagtggaaaattagcagcgaagaggggcggtggtgtccctggcgggggtcagaatgcggagggcaaggcacacctgacggcccactataattggccaaaaaacgacaaaagcaccaagcacaaatccactcatacatgacactaaaaatatgcaattattattcccgttctggcttttgcaccaaatcgaaattaagtgatttttttcgtaaggcaatcgaacgatttcaaggactggcataaaattaaatattaaataatatcggcaaaaaagtgtatatatttttaatatttcataattctgtgctctaatcataacataaatttaatgaattaattatgtgctcaaagcttgaaccaaattcaatatctcaaataaaatgctttgccaagacttatgatttattttgattttttgaattcaataattttccttgaattttgtttaaaatatatggcaaaattcttgcttcgatatatatacaatatgcatacacacatatgtacgaagtttcgagaaccgattttttaaggcaatatatagttctgaatctatataaaattatagttacatttttctacacgaataatattgcaattccagaacgggttgttgttatcatatctataaaacaccacgcctaagcaaaaaaacattccaaatacaagcaaatcataaaatacacatgcagcggtgggtgtacgtgcaagtggggaatacctcgtctcaattgtgaaataagctggagaattggatgtggagtccctagagatgctgtttccagttccctggtcgttatcacagttgattggaggatttgcagcctcgttggggctggacaccatgctgagcgagaccacagtgggcggctggacttggacgagcctctggttctcgaactggtattccagcgtgaagcagatgtcatccagattgaacacctgggcggtgatatcgctcagactggctatcagcggaacttcagagtggctggagctgagattctcggtggtatggtgatatgtgatgggtatgaccgtgatgggcaatggtgttagttgatccgcaagcgaaaaagcgttgtccgctgccgcagatacaacaacttgtgaatggccatgagtttgagatgcagtgagttgatcctgggcaccgaataggtcgccatatgtcgcctgggcgtcccccgtatcaagggtgaggcccagattaagcacctgttgctcgccacttgtggattccgccgtctggctgccgtagatgctgtagttgtccccatggatgatgcccagcccgtcggcctccaatttcggttcgagcaactgagctagtggcctgtcgaagtccagggaaccagaggaggagcaattggatgtgacgggcggggagccggaaagcgaattgcgcgacgagttggtatcataatcccggctgtctgataacgaatttccatgactattagcggtagtcttccactcgctgtggaagtagtgttgttgttgttgctggtgttgtttctcttggtcgttcatgtcgtattatttgttatttgcacacccacgcacactaagacaaacgcttgctatatcgcatatgatatgcagttgttattctctttctctgctgccaccgtgcaatatgtacatatatatagattgctaaagaaattagagatcgcgagatcgaaaagcacacatccgcgatcgaaaagcacaagcaacaacgataagaaccagtgtgaccatgggcggaacgacaaaatataacgcggttctggctgaaatataccataaactgggatataccgaaaatagtggaacgcaaaaggggacaccgcttagtggggactcaaaccgcgtgtagagttttaggcggagtctccaagcgtggtgtgaaattgaaactaaggtgttctaatttaaagaatgaataaatttgcgaaaccaatatactgccgaatagacttatttttaaagattttatatattttcttataaaaaagagtttgtttcataacaagtattctagcccatatttaggtaccattgcactgtacaatagtctcatttaaaatgtttagtacaataatgcggtttttgttaaataatgtgttctaaggttcaagtcctctcttatttctatttaattcatctaccttcgagatttgcataattatggtatatttgcggtatattttagtatgtttttcacacaaccaccctggtcacacggcatccttctttttctttcgtttccggcgaggtatgtgcacaaattttgtttctccacgtttttcttaaaaataattgcttatttctcattttagcggtgattaaaatatccatcgagcaacataatggtacgtaccaacgaaaaactggctgaactcgaatcaaaaagcggtcaaacaagcataaaacggcaacgacagccgcttatcccacgtgcatagtgccaattttgttaccccaaaagcaattatttgtatccggcgtcttgaaaccgtccttaatatcaataccaaatagcaattcaaacggaaactttaaaagaaacctaaactaaaaccgagtgaaggcctcttacattaaaagtccccgaaaaatgccgcaactatctcagaaaatcagctgcaaataactatttagttgtgacagaaaactatcgcaaagatacaacaaaatggattgaactatcgtgat

SEQ ID NO: 7163 - DNA, 2429 bp, DROSOPHILA
cgcggatgtgtgcttttcgatctcgcgatctctaatttctttagcaatctatatatatgtacatattgcacggtggcagcagagaaagagaataacaactgcatatcatatgcgatatagcaagcgtttgtcttagtgtgcgtgggtgtgcaaataacaaataatacgacatgaacgaccaagagaaacaacaccagcaacaacaacaacactacttccacagcgagtggaagactaccgctaatagtcatggaaattcgttatcagacagccgggattatgataccaactcgtcgcgcaattcgctttccggctccccgcccgtcacatccaattgctcctcctctggttccctggacttcgacaggccactagctcagttgctcgaaccgaaattggaggccgacgggctgggcatcatccatggggacaactacagcatctacggcagccagacggcggaatccacaagcgactacagctttaaatgcccggaagatggatgccacaaggcattcctcacttcctacagcctgaagatccacgtccgcgtccacacgaaggtgaagccatacgaatgtgaggtgtccggctgcgataaggcattcaacacgcgctacagattgcacgcccaccttcgtctgcacaatggcgagacgttcaactgtgagctgtgccagaagtgcttcaccacgctgagcgacctgaagaagcatatgcgcacgcacacccaggagcggccctacaaatgtccggaagatgactgcggcaaagccttcaccgcctcgcatcacctgaagacccaccgaaggacacatacaggcgaaaagccgtatccctgccaggaggacagctgccaaaagtcgtttagcacatcgcatagtttgaaatcccacaaaaagactcaccagcgacaattgcaaaacaagggtcgcaagaaaaggccactaaagacgcagcagaccaagtgcagcgatcaggagcagaaggatccacagcaggaggagcaagaggaagaggagttcattaaagaggatcaacccgaaatgacgttgttaaatccaggcagtcactgctccgaaaccaccagcacggacagcggagtggtgctgcaaactctcacgccgcaggatcacttgtccaatgtgtttatcctacagggcaacgagcctctgatccttccagaaacatcacaggcttaccagctctcctacgccgccgaggaggaaatacccagtccgtggattgacgccggcgtccttgtctctaagcccatcattcccatggctccgctgacggatgcctgcgtggccttgcccaccgagatgcccagtttcgttaacctgaagcccacattcggcaatgcagtaagcggcaatatgggggatccgcagccggagaccatggatgtggatcccacagtggaaacctcactgcccacgcccaccttggagttgaatcagccaaatatcgaagagctgctcaagcaggacagtttcgagaacgaggaggacatggaaacggagtcgcttctaaatgacatcctcatgaccatcgacaacaacagtgcgctgctgcaggccacactccagcaggcctcacaggtgccaagcgatgcctccggcttggtggaactggacatacgggacaacaagccgactctgaagcagatcacagcggatgcgggcatctgcaattgcaccaactgcaagtgcgatcagacaaagagctgtcatgggggtgactgtggtgctgcagctgctcaacagaccaccaggactggcgcacccacaacaacaacaacgacaacaacgatgaattccagcggtggcaaacgaatttgcggcagcgtggtgcccaccaaaaaagtgagtaaacgcgagacggaaatgaaccagaacatcgaggatgttgctttgctgctgcaaaaccttgcttccatgagtagcggtggctcctccggcggtggcggcggttgctgcggcggtggtgccgtcaagccagcaccctcaggtggtggctgctgtggagaacccaaagctccgaagcccgtgaatgccggttgtggttgtgcccgcccaagtgctccgtcctctggtggttgttgcggcagtggagttgcttctactccaaaaccaactggtggttgctgttcaggcaaccaaaagccagctccaacagctaccgctgcctcgtcaccctcgtgttgctgctctggcaagggcgaagtccaggagccgccggtcattagcagcgcttcttcagctcccgctgccgccgtcaagggcaacgcctgcacatgcaagagtccggctgagggcgtggccaacggctgctgcgtagtgatctgcattaaaacgctgcaagctctacgcaaagttctgacgcgccggaatctaaatctaatgctttgtccacagcagaactaa

SEQ ID NO: 7164 - protein, 752 aa, DROSOPHILA
MNDQEKQHQQQQQHYFHSEWKTTANSHGNSLSDSRDYDTNSSRNSLSGSPPVTSNCSSSGSLDFDRPLAQLLEPKLEADGLGIIHGDNYSIYGSQTAESTSDYSFKCPEDGCHKAFLTSYSLKIHVRVHTKVKPYECEVSGCDKAFNTRYRLHAHLRLHNGETFNCELCQKCFTTLSDLKKHMRTHTQERPYKCPEDDCGKAFTASHHLKTHRRTHTGEKPYPCQEDSCQKSFSTSHSLKSHKKTHQRQLQNKGRKKRPLKTQQTKCSDQEQKDPQQEEQEEEEFIKEDQPEMTLLNPGSHCSETTSTDSGVVLQTLTPQDHLSNVFILQGNEPLILPETSQAYQLSYAAEEEIPSPWIDAGVLVSKPIIPMAPLTDACVALPTEMPSFVNLKPTFGNAVSGNMGDPQPETMDVDPTVETSLPTPTLELNQPNIEELLKQDSFENEEDMETESLLNDILMTIDNNSALLQATLQQASQVPSDASGLVELDIRDNKPTLKQITADAGICNCTNCKCDQTKSCHGGDCGAAAAQQTTRTGAPTTTTTTTTMNSSGGKRICGSVVPTKKVSKRETEMNQNIEDVALLLQNLASMSSGGSSGGGGGCCGGGAVKPAPSGGGCCGEPKAPKPVNAGCGCARPSAPSSGGCCGSGVASTPKPTGGCCSGNQKPAPTATAASSPSCCCSGKGEVQEPPVISSASSAPAAAVKGNACTCKSPAEGVANGCCVVICIKTLQALRKVLTRRNLNLMLCPQQN

SEQ ID NO: 7165 - DNA, 10726 bp, DROSOPHILA
cgcttcaacaacgacaccaaccagctggtgggacacgagatggagctgaacatgcacgacggcacggtgcgggacatgtgcttcctggacgactcgtccaccaagtcccggctgctggcgagcggcggcgccggggactgcaagatctacatcacagactgcggaaccggcactcccttccaggcctacagtggtcatactggccacatcctgtccctctacagctggaacaacgcgatgttcgtgtcgggatcgcaggtgagtcgggggaagatccttcccagcctgtcccagctataaccatatgcgatgatctctttcaggatcaaacgatacgtttctgggatctgcgagtgaatgtctctgtgaatacgctggataacgatcgaaaggatggtggtctggagagctccgctgtaaccgcggtctgtgtagatcccaccggcaggctgctagtctctgggcacgctgacagctcctgtactctgtacgacatccgtggcaaccggcccattcagcgcttctatccgcacaccgctgaaataaggtagtagagctatcctctcccgcttggcatttggtaaaattggctttcacttccccaaaggtgcgtccgattctccccatccgcctactacatgctgacgtgcagctacgacaactcgatccggctgacggacctgcaaggcgacctggcccacgagctgtcctccgtggtggtggcggagcacaaggacaaggccatcaccatccgatggcatccgaccgagttctccttcatctccacgtcggcggacaagacggccaccctctgggcgctgccgccctcgtagctccgtggtccaatgttccggtccagtggcggctttaaattcgttgtcgatattgtacttccgcagaatagttcagactgatctaatttattgaataaacccattccaacagataaaggaaaatgaaacagggccgttctaatttatatatttggtatatatttatttaaatccgttcttactaacccacagttccattaatattttactttctaaggcaaataaattgatttatgttggatttaatgttgcagttgcaagtaacagggctggcttagcgattaatacacgaatgataaaggcaggaaaactcgtcctccttcacattcactttcacattcgtatcggctttggtggtccaaacctctacatcctgtcgacgacgacatcaggaactacaatttcggggcgaatacggattattacgtggcgattctcgatcggagggagggattaaccaacgcaagagcaaaccaaaactcgtgggggaaatggcgatggagtggcactgggtaccagttaagcggcatcttccgaaattctggaatttggcagcatcggtgggggatcgtacttacagcctagtggtttggagtttcttgggggagatgtttgagtgtgcttgattctctacttggattggaggcggggcgggagaaattgaattgagtagagtagagtacacaggccgggttcggatttcttgttttattgtttcgtttacgtttagatatcttacatgctgaatttcaaatctgtgttttctcggttatgccggcgagtgcgatggcaatgtactagaccataatgtacagcaattgttcttttctacattcacatcgacatgtcgcacccggacataatataataactgcacgtacttttctaaagcagggatggattcaatttgtgttatggtaactaatcggggtccagttaatgaaatctggggttgactgtataaaataaaacaatagttcattgagagatggtaggtaggttgctttgtaggtgggcagttgggtacgaataggtcgtcggccaaggaggattcaggtgtaccaacgggtcacgtgcatcgtgcaagcaaacgtaacttagaaataggaatagaaacggggagcagcgaacataagcgttggcaacttgggcctcgtggatcccagtcgtccggtttcgtagagccagcacgttttagttctgcataatttatttctttaatgttaggtgtaggtaattttttgtttaatcaattcacagcgtctctaattgtataacagagtaaattatgtataatgttaatttaagtaggtattctatagaatgatagaaggattacttaactccttacaactgagacttgagactgacataagataagttacacatgttctttcatcaaaaggtccccaatattttctattttctatacggctaggctaggctaggctattcggctgcatgccttatccattatgtacgatcgccatttatgtacccgatcctaatcatttgctcatacatgtacatacaatacaatacgaatggagacggaaatggacaccgagacgctgttgcggcgccacgcccagatctggggagtcattatctacttaatatcttgtgctcaataaaattcttacagtaatggaatgaacgaaccaatatttgcattcggtaaatactcgtgggggattcaatggattcaattacgttaaacaagcccagggataggacgatactcttgaaacattaggacgctcgcttggtggaatcgtttaaacatcaacgcacagattcgacttggaaaggttatgggtattgtgggttctacttaatgggattaaacaaaaattttgttcttctgcatagttaagcctacactttagtattccagttactaaacacagaaacgaaatggttaagttacaaaagtttggttcaatacaaacagacatctcatttccagagacttggatttccctacacggttcttttggcaacccggtgaaattaaatgacgaaaactaactaatgcattcgaatgtgccggtgtggaactttcttatgtatatagagcattgtatgtacaaaaagcaatcctgctaaatttaatatagtaatatacaaacacagatatctatagggtagggtatacgcgtgttagataaatcgttagctcatagaaaatattgatcatttaacgctgtttgttcaaagccaaaagccaggagcgagtcagtcggcccatcttttggtgccaccagtcaattctgtgacaccgggtggaaatcagtagttgcagttgggaacaaacttcatggggttaaagtcgttacgttagatgtatataattgtgggttcttgtttctgtttatatttagtaacattttatactagaaattagaataatgaagttgggcttatggattataattatattcttaaagcatcatagcgtacagcaggccaaagaagacagcccacattaacacaatcccatgcatcttatatataggactctcaccatctgcgatttttctagcaacaaacttcaatgtctcatctaataaaactacaggaattgagaatttcatcacagttatccattcttctgcagacaacggtgtcacttggaagacggtctgtgggtaaaacgatactggcattagtttccgcggcgcagaagggcttatcattgccaaatacttacggagaggacatcgacgtaaagaataacaaagtgaagagtgaaggagagtgccattgatccaatcagccacaggttgcaccatgggggcatggtaatcagcgactggttctcggacaagctgtttaaacaaaggcgatcggttcgtatctatcgtgccgtccatcattcgttatctcactcacctgttcattgcgttcaacatttcgattgtcaccagcacggacagagccatggtcatcgcatgggggtcgctgaagatcttgcagtcaacgcccttgaactcgtcgccaccgcccaagcaggacagatggtgggtcagctgccagtaggacagtttgggtccctcatcagagaacacgaaccaccaggcggcggcaccgacggtggcagcgccgacatagaatccaatagccatgtaactaaaagttcgattgaggccaagttaataccgattaaaggatgtgtgctttttgagtaacccaccggaagaacaaccatccggaaatgagaccctcatcggccttcctggggggcttctccatgatatccagatcaggggggttgaagcccagagcggtggctgggagaccatcagtaacctgtgaccaagtacctattactaaccattttaagtagtaaataccccatcaagacgtaccaagttaacccagagcagctggacgggaatcagagcctcgggcaggccaagggcagcagtaaggaagatggagacgacctcaccaatgttcgaagagatgaggtagcggatgaactgtttcatgttgttgtagatagcgcgaccttcttcaacggcagacacgatggaggagaagttgtcgtcagccagcaccatttcggcggcagacttggcgacggcggtaccagagcccatggcaataccgatctcagccttcttcagggcgggggcgtcgttcacaccatcaccagtcatagcggagatttcgttcatgctctgcaggaactcaacaatcttggacttgtgctggggctccacgcgggagaagaggcgggagcgggcgacggcagccttttgttcggtgggggaaaggtcgtcgaattcacgacccgagtaggacttgccagtggtgtcctcatcctcggcgaatacaccgattctgcggcagatagcctcggcagtggccttgttgtcgccggtgatcacaataacacgaataccggcggcacggcagcggacaatggaatcgaaaacttccttacgggggggatccaacatgcccacaacaccgacgaaggtcaggttaacctcatactggtagaacttggtggagtcgcccagatccatctcgtcgggcttcatggggctatcggcaacggccagagccaggcagcgaagggtgtcgcgtccagtaccgtactggccggtcagggcgaggatcttggccttcagggccgaggtcagaggaaccttggtggtgccaacgcgggcgtgtgtgcaacgctctagaacaccctcgggggcgcccttcacgaacaacttggggccagtgcccaggcgggaagccttcaggggggtgcagtacgaggacatggatttacgatcgcgagagaactccagggtgaattccttcttccacttggtttcgatctcaccgcggcaggcgatggcagccgagcggcggtccaggccagacttgttcacgctgaagctgttcagtttctcagccagcacaatcagggcggtctcagtggcttcgccgaccttctcgaaggcctgcttgaactcattgtaatcaatggcggagtcgttgcacatgatgcagatggtggacagttcctgcagggtatcgtagtcagcagccttgatgcgctgaccgttgaggaagacctcgccgatgggctcgtaggtggagccggtcatctcgaattcgaggaagctgctgtcgttgccttcaaccttgtcgaagatgaacatgcgggaaacggacatttggttggtggtgagtgtgccggtcttatcagagcagatgacagatgtgcagcccagggtctccacggagggcagggagcggacgatggcattcttcttggccatgcggcgggtgcccagagccagacaggtggtgatgacggcgggcagaccctcggggatggcagccacagccagagcgacggcgatcttgaagtagtagatggcacccttgatccaggagcctccgtgagcggggtcgttgaagtggccgatgttgatggcccacacggcaacgcaaatgacggaaatgaccttggacagctgctcaccgaactcgtccagtttctgctgcaggggggtcttgatctcctcggtctcggacatctcagtacggatcttgccgatggcggtgctcaggccagtgccgatgacgacgccacgggccttgccggctgcgacgttggtgccggagaacaggatgttcttcttgtcctggttgacggcgcggggatcggggatggcatcggtgtgcttgatgacggagaccgactcaccggtgaggatggactgatcgatcctaagggtggtcgagtagatgtgggtgatacggatatcggcagggatcttgtcaccgacagacacctcaaccaggtcaccgggcacgatctctttcgcgcgcaccttctggatgccggacttgtcctggcgcaccaccttgcccatctcaggctcgtactccttgagggcctcaatggccgactcggcgttacgctcctgccatactcccaccacggcgttggctatcaggataagtaaaataactaggggctctacaaatgcagtgaacgtttcctcgtgttcctcaaacagggcgagaacctggggattgcagaggggaagagtgtggtcgtaactaagtttttgagggtgggtttctttgtgctgctgcacttacaaatgagatgatggctgccaacagcagaatcttcaccagcagatcgtcgaactgctccaagaccagctgccagatgctctttcctgtggaatacaatcgttattataatgtatgcatacagtgaagtgggggtggggggcaggggatctgctcgggttgtgttcgcaccttcctcagtcggcaactctgtaacgataagaaaacaaacacgtcagtcgattcggtctcggaatgtggaggggaattacgcgcgactctcaccattgggtccgtatttcttctggttagccttgatctggtcgagggttaagccgcgctcggggtccgttccgaagaagttgagggactgttcgacggttttcgagtgaccgtcttccatcttgattcgttatcctcttcgttcagtggcctgtgtccagattccggggcgattcaggtggggatttgaaagtagacacaaggcaaggggctcattttaattctctggcagggctatttagctattttgccgttttctgggctctattcaacgactgactggaatagcaagtgtgtatgcacgtatgtatgcacatacatctgtactggcatgtacgtttgcagttaaaactacctcattaggttctgaataagtggtcgtacatgtgcatgtgcacggcactcggctcacgggtactttccaacatacgcacatacacaggtgctacatgctaattccccgatttcaggcacttctgatcgggcccggactggccactaaagtcgcgcagttatcgcgccaacttaggatcggattgtgcggatcgggtcggagaatatgctggaatattgcattactatgatgggctgttaccctggccaaatcgctccgcttatgagattcacacacgtgtcacttcgcacaacagacgcagttttcgtttttctattctcagtttctgcgggggattgggggatctggtccgtaatacgggtgctctgctcctacgttaacctcgctaaacgacgcactgcgtgtgttaagtacttttttccactgactctctatataatataacccatggcgcttttttctgaatatgtgtgctgataactattgcactaagtaccaagccgcgatttactgcctatcgccgttctgcctcactatgacacgacattattcgcacaagacagggctgactgaaaacgtatatcgtccgagttacgttatttgtgcagagctgcctctttctccaacttttaagaattctcagtcctggcaattattagataattatcccaccttttagctcagcttctactgacgcgttcaatttgtgctactaaactgcgatagccggcgttatcgataactgagaatctcaactgcgatggctaactgttgagtttccgtgttcagtaataccgatagctgaggtgatataggaatttaaaactaatcaaagtttcgaaggaattcagctgtgctggaaagtttctttattggaaaatacctctaaccttataaatcaagttgttattgcgatcgaaaaccaaatgtttttactcccttctgtggtgtaaatcgaactgaaatccttatcacgaatgcttaaacttatttatacattgtcatattttcacttggcaagcgacagagacatccgcactattttggccacacaacaagcaacactattcttttcgcgcattttgtgctcaaattaatgagatcgagatcaagagcccgcaataaatagatctgggtgccaggtattcgccagcagcgacatttttaaattttaattttaatctttttcgcgaccagacactagaatcaggccatacggggaattttgaacggcagccaactcgcataatacttgaatattacgctggctacgtcacagaattacatacgtaacttctgataacgaggtttccaccagttgcccgcccacaaaaggcgttagttttcaaaaaactgtcaatcaatgcgctcgaatactacttatattttgagcacagagacgtgtgtttcgaaaacatcttcatgcatatagcctatatatacccctaaaatacacatgtgtgtgtgcattatggagcaaaaaatcgcctctgtccgagatgggctaaaaatagagtcctagcacccgaaaaatacagctcaattctgaacactcgtagatataaagatatgtactaggaccacataaataagtttgagtacatatacagagagacgatcgtagggagaaagattcctattctgcgcggttatatgtacgatttaacggcttatgatattgcgagcagagatatctccatgctaatggatgtcgacacttgtgcgatatgctgcttcccacgtccccgaatccgaatttctgattgacaagtccaccgatgggttgtataatagtgggtgggtgggttcaaaaataagtacaaatgattgggccatgatcctgggctgaatgtacttatagagctacacgtttctgtaaaactgtctgttggtttcagggatcttttgcaactgaaaggcagtcaaattcactaaccgatgtaaccaccattaagctatgaatgcgggtagttaaggagttcaagagatcgtgtgttctatgcttgttacaagggctacaggtacagtacaagacatggatctttcgaatttgggtacgaatatattcgccacggttgcggttgtggttgcataaccagattttcaatcacagatacatagatctcgggcacttggaaaactttacatctgtgtcggatcgaatctattcgtggagtgctctcgtattggtgacattcaaattttcgataccatccggaggtcgaggtcaccgccgaatcgtcgcccttacggatatttcatgtatgtagatagatcgaactacgagctctggacgagctccagggtggcaaagtaaactgggggcaaacactttgagtttgaagcacggttttcgagtgtaagaagcatgttcgtatgtagatatgtaggcatttcaataacttttggtttccaggttttcttttcttttgaaagcgcgcggacgaattttcgatagtttttaggggggtttatttgctttacccaatggttttggcagtttggagtaattcactggcgtattcgctttgcagttgttgcagaaaatcaacaaaacttacaattattattcctagcaaaaattccgttattatataataatttatttcagtcggaagaccaagacacaaagatcgcgctattataacgatcaacggcaactgaacgcaaggagaacgctgcgcgatgagagtgtctatttgaattacaaaattcatatattttggcaaaattcccaaaactacatacactctctattttggcccgggaaaatacttttagcacgcacaaacttttgagcacttaccacctatccaatccaatccaatgcgatccgaattcgaatggtggcggttcagatctgctcgtgcagctcgttcgtacctcgacgaggcagattcaccgtggtcccccagagattcgtatatgtggctaggtataggtgggaataccacaataccacgggcacacgagctccccatccacatacatacatacgtacatatggccgcccgatctcggatccgcgggagcgcacggccacgaaagtctagagcaatggcaatgtggcgatgcgagatcacttgtggacgtggatgtggttgtggatgtggatgtgcctgggagtgtgagtgcagacgtattccgagaaatgcacgtgtgtttgtctaatatttagaaagtggtatttttaaaccaatctggggaaattatgctgggttgtgtggaagggtttgtcactcaaaggtgtttctaccttcggtgtcagccacttcaagtgggtcaagacttgggtcctttggtggggggatggttgggaatgatggcactggcactgacgcattccactttcgccgagctagaatccatcatagttatccatagctgctgccctttgaatattttacttgtccttggcaaatacaacagatcccaaatcccagcccaaatactcatttcctcaatctagttgatctcgatccattaacagctgaaagagcatccaccagtcggcctgcgaacccctagttcttcgtttggcttttctgcctttttccccaatttcagcagagactggcagccgtcgactatttttatttataggcttgtaatgcccctacggactcggactctcagatattggcaagagcgctctccgcac

SEQ ID NO: 7166 - DNA, 3338 bp, DROSOPHILA
gttgccgttgatcgttataatagcgcgatctttgtgtcttggtcttccgactgaaataaattattatataataacggaatttttgctaggaataataattgccactgaacgaagaggataacgaatcaagatggaagacggtcactcgaaaaccgtcgaacagtccctcaacttcttcggaacggaccccgagcgcggcttaaccctcgaccagatcaaggctaaccagaagaaatacggacccaatgagttgccgactgaggaaggaaagagcatctggcagctggtcttggagcagttcgacgatctgctggtgaagattctgctgttggcagccatcatctcatttgttctcgccctgtttgaggaacacgaggaaacgttcactgcatttgtagagcccctagttattttacttatcctgatagccaacgccgtggtgggagtatggcaggagcgtaacgccgagtcggccattgaggccctcaaggagtacgagcctgagatgggcaaggtggtgcgccaggacaagtccggcatccagaaggtgcgcgcgaaagagatcgtgcccggtgacctggttgaggtgtctgtcggtgacaagatccctgccgatatccgtatcacccacatctactcgaccacccttaggatcgatcagtccatcctcaccggtgagtcggtctccgtcatcaagcacaccgatgccatccccgatccccgcgccgtcaaccaggacaagaagaacatcctgttctccggcaccaacgtcgcagccggcaaggcccgtggcgtcgtcatcggcactggcctgagcaccgccatcggcaagatccgtactgagatgtccgagaccgaggagatcaagacccccctgcagcagaaactggacgagttcggtgagcagctgtccaaggtcatttccgtcatttgcgttgccgtgtgggccatcaacatcggccacttcaacgaccccgctcacggaggctcctggatcaagggtgccatctactacttcaagatcgccgtcgctctggctgtggctgccatccccgagggtctgcccgccgtcatcaccacctgtctggctctgggcacccgccgcatggccaagaagaatgccatcgtccgctccctgccctccgtggagaccctgggctgcacatctgtcatctgctctgataagaccggcacactcaccaccaaccaaatgtccgtttcccgcatgttcatcttcgacaaggttgaaggcaacgacagcagcttcctcgaattcgagatgaccggctccacctacgagcccatcggcgaggtcttcctcaacggtcagcgcatcaaggctgctgactacgataccctgcaggaactgtccaccatctgcatcatgtgcaacgactccgccattgattacaatgagttcaagcaggccttcgagaaggtcggcgaagccactgagaccgccctgattgtgctggctgagaaactgaacagcttcagcgtgaacaagtctggcctggaccgccgctcggctgccatcgcctgccgcggtgagatcgaaaccaagtggaagaaggaattcaccctggagttctctcgcgatcgtaaatccatgtcctcgtactgcacccccctgaaggcttcccgcctgggcactggccccaagttgttcgtgaagggcgcccccgagggtgttctagagcgttgcacacacgcccgcgttggcaccaccaaggttcctctgacctcggccctgaaggccaagatcctcgccctgaccggccagtacggtactggacgcgacacccttcgctgcctggctctggccgttgccgatagccccatgaagcccgacgagatggatctgggcgactccaccaagttctaccagtatgaggttaacctgaccttcgtcggtgttgtgggcatgttggatcccccccgtaaggaagttttcgattccattgtccgctgccgtgccgccggtattcgtgttattgtgatcaccggcgacaacaaggccactgccgaggctatctgccgcagaatcggtgtattcgccgaggatgaggacaccactggcaagtcctactcgggtcgtgaattcgacgacctttcccccaccgaacaaaaggctgccgtcgcccgctcccgcctcttctcccgcgtggagccccagcacaagtccaagattgttgagttcctgcagagcatgaacgaaatctccgctatgactggtgatggtgtgaacgacgcccccgccctgaagaaggctgagatcggtattgccatgggctctggtaccgccgtcgccaagtctgccgccgaaatggtgctggctgacgacaacttctcctccatcgtgtctgccgttgaagaaggtcgcgctatctacaacaacatgaaacagttcatccgctacctcatctcttcgaacattggtgaggtcgtctccatcttccttactgctgcccttggcctgcccgaggctctgattcccgtccagctgctctgggttaacttggttactgatggtctcccagccaccgctctgggcttcaacccccctgatctggatatcatggagaagccccccaggaaggccgatgagggtctcatttccggatggttgttcttccgttacatggctattggattctatgtcggcgctgccaccgtcggtgccgccgcctggtggttcgtgttctctgatgagggacccaaactgtcctactggcagctgacccaccatctgtcctgcttgggcggtggcgacgagttcaagggcgttgactgcaagatcttcagcgacccccatgcgatgaccatggctctgtccgtgctggtgacaatcgaaatgttgaacgcaatgaacagcttgtccgagaaccagtcgctgattaccatgcccccatggtgcaacctgtggctgattggatcaatggcactctccttcactcttcactttgttattctttacgtcgatgtcctctccaccgtcttccaagtgacaccgttgtctgcagaagaatggataactgtgatgaaattctcaattcctgtagttttattagatgagacattgaagtttgttgctagaaaaatcgcagatgttcctgatgtcgtcgtcgacaggatgtagaggtttggaccaccaaagccgatacgaatgtgaaagtgaatgtgaaggaggacgagttttcctgcctttatcattcgtgtattaatcgctaagccagccctgttacttgcaactgcaacattaaatccaacataaatcaatttatttgccttagaaagtaaaatattaatggaactgtgggttagtaagaacggattta

SEQ ID NO: 7167 - protein, 1002 aa, DROSOPHILA
MEDGHSKTVEQSLNFFGTDPERGLTLDQIKANQKKYGPNELPTEEGKSIWQLVLEQFDDLLVKILLLAAIISFVLALFEEHEETFTAFVEPLVILLILIANAVVGVWQERNAESAIEALKEYEPEMGKVVRQDKSGIQKVRAKEIVPGDLVEVSVGDKIPADIRITHIYSTTLRIDQSILTGESVSVIKHTDAIPDPRAVNQDKKNILFSGTNVAAGKARGVVIGTGLSTAIGKIRTEMSETEEIKTPLQQKLDEFGEQLSKVISVICVAVWAINIGHFNDPAHGGSWIKGAIYYFKIAVALAVAAIPEGLPAVITTCLALGTRRMAKKNAIVRSLPSVETLGCTSVICSDKTGTLTTNQMSVSRMFIFDKVEGNDSSFLEFEMTGSTYEPIGEVFLNGQRIKAADYDTLQELSTICIMCNDSAIDYNEFKQAFEKVGEATETALIVLAEKLNSFSVNKSGLDRRSAAIACRGEIETKWKKEFTLEFSRDRKSMSSYCTPLKASRLGTGPKLFVKGAPEGVLERCTHARVGTTKVPLTSALKAKILALTGQYGTGRDTLRCLALAVADSPMKPDEMDLGDSTKFYQYEVNLTFVGVVGMLDPPRKEVFDSIVRCRAAGIRVIVITGDNKATAEAICRRIGVFAEDEDTTGKSYSGREFDDLSPTEQKAAVARSRLFSRVEPQHKSKIVEFLQSMNEISAMTGDGVNDAPALKKAEIGIAMGSGTAVAKSAAEMVLADDNFSSIVSAVEEGRAIYNNMKQFIRYLISSNIGEVVSIFLTAALGLPEALIPVQLLWVNLVTDGLPATALGFNPPDLDIMEKPPRKADEGLISGWLFFRYMAIGFYVGAATVGAAAWWFVFSDEGPKLSYWQLTHHLSCLGGGDEFKGVDCKIFSDPHAMTMALSVLVTIEMLNAMNSLSENQSLITMPPWCNLWLIGSMALSFTLHFVILYVDVLSTVFQVTPLSAEEWITVMKFSIPVVLLDETLKFVARKIADVPDVVVDRM

SEQ ID NO: 7168 - DNA, 8558 bp, DROSOPHILA
ttcctcaaacggttatctcgatcgttaaatgatcaacacagaaatgtattcgattttattatattttttattttaacacaattgttgtgtgtttgtgtggctctttcgtttgttgtaaattatacaattaattaatatgtactatatataaataaagtatctcaacttttctatgattggttcgccttggcatgtaaaaaatgtccccttacggcttaatcgagtcttagtgtctacgggaaaagacttacaaaaatacatatcgcattgatttattgaacattttcacttatacatatgtctctatatttatatttatatatattatataccctctaatataacatggatatagatgcacacgtgtttcgttcgcaattacgattcgataagtttaaattaggttaaactagtttatacatgtactagaagacaaccctaagaacttatacaaatattgatagggtttgaagctctatataaattaagatcgaagagttagattagaaatacggacttgtcttatcaaatgtagtgcccctttgattttgtgtttatttcttttgggtcggaagttttaacgaatgctaattgaagatctgtcttgttggggccctaatgcgatatgattcatcatattatgttatgtaatgcattttcaactaacatatgtaggttataaaataagctaataactagtgttggtattatgaagacttatgcaacgagaaatgcatactgatttcgggattcgcttctaggaatatttcgttttatggacattttaatttatatttcgattttatttctaccccatttgtgtttccctaaatgtgtggaatcgaagcattaacagttctgcacaaatttgtggtttgttcgcagttgcttggctacattagtgtttgctttagtttaaatagttcgtttacgtaagatcaagatcactttttgcatttacacaacaaacaacaaaaacgtcttcccccgcggcccttgcaatattcctccataaaaatatatatgtatatatataatatatagtttacccatatatatatgggtatatatctctgaatcgactttggacgccggctaggccggcgccttgtcccgacactatcaacatccgtacaactcttagtatataaaaagtcttttcaatttctacgtcatcataccgcggctggcgaagattcctagatgcgccagccctggtcatcgtccacgttggagtctgtgtctgagggctcctcgccgtacatgtcggccaatttgcggaagcgcggtccaaagttggacaggtagtcgaagttgagatcgccgtcgtcggtgcaggacgccagactggagaggctgccatcggagttgccgtcaccttcgtacgcgtaatgccgcacatcgtccacggttgtggcgcccacatcccggtcgcagttctccttcttgtcgcccaggaagtcggcgatgtcgggtatgtcgttggggtcgcgcatgttcccctgtaacgcatgaggatctttgtacagcttctcctcgtagaagggctgggtgcgcaggacattcagatcatagtccgtgtcccgctcgccgccaccctcgtcctcgtaattaatgatcgtctcgcgaatgtcgtcgatgtccttttcgtgccagccattcttctgctttttctgcaccaccactgccaacaggatgatcagcagtagcgcgaggcatacgatgatcgcaatgatgaagtttctatcaattccaaaactgaacgcaacggccaccgactgctggcaaccgctgtcgatgtttcggaacacagagggcattcccaagttgtaagtctgctcgttaattgtcaggttgcgaatgcaaccgaagaaacccttctggttgggaacgtgcgtccaattgagctgccgtcccagctgttccagatccactggagtgccgcccaactgcagcggtgcgtttacattgaggaactcattggggccaattggggcgcccagtgtctggcaggtggatagccggcaattgtccacagtcatctcaatgctggtacgctgcaggataatgtccagttggtaggtgcggtctgccaccatcttgatgtgctgatggcggatgcgaatggcacctgatccgtagtccacagtcagcaccggatagccattgtccaactccagagctaggaaatcagaaatggccagcagtggattgaagttaagtggtcccaagtacatgatcaggccctgatcgatctggggcgtgatctccaagctaatcttggtgttgttgcaggcggcaatgggctcgtagaaggcataccccgagccatagaatgccacggagacgagttcgcagtggggtccggtgaatccgtctatgcagtcgcacacgtcgttctccccgtaccgcggagatcctccgtttagacaacgcctcattaaaggagcctcgcatacgcattgcgcttgaacaaaggcattcacgcccacgaacgatgttgtattggagtagatcatgtatggcaccgagctcttgtgcagctcattggtgcacgattcctcgcacttgaacttctcaatcagacactcgtcgatgttcaccatcagcatttgcaggtctagttcgttttccaaacgctgctgattctgggccactattccatttaatttctccggagcatagtagggtgagccgtgggcagagaagcgtacatcgagcgtatgattctcgttttggagcacagtgaacacgtccacgttggataccgacgtattgaaaagcttggccagcgagagctgcaagcgatcctttagggatagcgcatccggtgactggaagtcgcgtggcacactgataaactcctccttggttacgttgatgaatcggatgctgccgctcttatccaccgcctcctcgggaagctcgcggaccaccacggtgacataagcatctacggagtgacggggcacgaacatggagtcctcggtgactacgaacgacaggtcgtactctccctcggcggtgtgaaccagcatggtgatcatacccgtgctgggattaagcctaaactgatcgtgcggaagatctttccattcaaagtacttgtcctccaagtcccagtcatcgagatcatctacgaacacgcgaccaatatcggtttcaggcgcttctcccttgtaattgtaaatgaagatgcgcgacgatccctcgctcatggcattgtcgttgacatcgccgatcaccaggtgcagaatgcttacggcactctgtcgcggaacgccagaatcactgatgcgaatggggataaagtactccttttgagcctcgcgatcaaactggacgttggcgtgcaaatagtctccatccatgctgaacttggtcttgatgtccggtgtggcttcgctgtcgatgccgaaggtgaagttacctgcccccggagtgtcgtcgtagtcgttggcctgcagttgcacaacatgtccgggattgcggttctcctgccagtagacaggcatttcgttgatcaggaacggagcattgtcgttgatgtccttcaacgtgacggtgacctctttcactgtgctgaccgtggttcctactccatcctcatcattagccttgatcaaaacctgccagttcttgtgaccattgggcggatcgcggtccagcgtcttgaccaaacgcaagcagccactgttgtcaatggtccatcggtttccatcgttctggtgaatcgaatagacgatatgctgatctgcgttgcgatccttgatatccggatcgtaggcttcgacagtgagtatgcagtcgtcatatgtggtctcctccagaatggtgacgctgtagtcctgcttaaacaccggcgggttgtcgttcacgtcttcaattttgataaccaccgttgtgtagtcgtcgtagattccatcgaacgcacgcaccttcagctcgtactccgtgatcgtttcgtagtccaacttctggttgaccgtgattttgccggtcttaagaccaatcttaaaggcatcacccacgttaccgctctcaatgctgtataggatctgggatgcgttatcctcgtcttcggcctttacctcaatgacctcggtattcgtattggcatcctcgagcagtctttctgccagatatttgtcctgctggaagtgcggcttgtggtcgttcttgtctccaatggagatgcggaacacttggtgaccacggttcggctcgccattatcaaagagactcgatggcgaattgtcgctggcaataacctttacgttatagaaatcgcgttcctcgcgatcgaatgtcgtcagggcggttatgttaccggtattggggtcgatggtgaagtactcccgattgtcggccagctcgaatgacacaatattattggctgaggtgccgtccatgtcgaaggcacgcacctgcataacaggcgtgccgggtggttcgttctccaggatagtgcccgatttgacctccgtgtagtaggggatgttatcgttgacatcctccacctgaatcttgatctgatgctctgtgcccagctcgtgtgtattccgcacaatcatggtgagggtgtagtctgtgatggcctcgtagtccagagtcttgcccaggctaatggtcacctcgttgccgatctgattgaacacgaatgtgttcttgctgtttgtctgctccgtgcggccggtgttcagttcgaagattacctccggcttgtccggcatattggaaacggctcgtaacgtggcgatcggatgtgtaaagttcttgagattctccttcaggtaaatgggcgtatcgatcggattcacaaatgatggcggcttaattgaggactccaccacccggatgcgcacttcgatttgtgcatcctgtggcggatctggcactacgttatatgcccgcacgattatcgcatacgattggccgggtctcttgtcaatcggtcgtttcaggtagataatacccgactccttgtcaatcttgaagtactgaaagtcgcgctcccgcagaatctcgtattcgaccaaactgttgttgccatcgtcgaagtcactggcgctgatagtcatcaccaccgcgtcgggctgcaagtagaaggtaaagataaagccacagatatttgggtgtttctggtttccttccttccacacaactttcctgcaagtttgcccaaaccaggagcaagcacatgaccccgctctagtttcctgaatctccttttactcaatgctacctgggcgaaggcctaattagaactgaaaccttttcgcagaaaagcttctctgctaacaaagctttgctaaaaataacagcgtttgttgtgtcgaggaaaataacacatagaagttagataactatctgctgtactatcccttaactacaaagtaaaaagactttccgatattgattgcaaatcaaagatgctcctgaagatcctcagaatatcagatctaatctaagaaaccttaataaaattataatatatttctaactaatcgaagtaattaccgaaaagggctctctattgcggttttggtacaaaaactgcacgctattacaagtacttagctaaatttagttttctaccactgttttgtagttcgacaagtttttctggtcgcaaacatggaaatggcgtaaaagaaaaggcgttggaaagggtttcaaggttttctgtatcgaaccgggcgagcaatgaacccaaaacccgtctccaagtggtcgccctcctacgccaagcgaaaactagttccgcccaagaagatgtgcgcccatgaactggccaagtgtttaattaacaccgtaggacgtgcgacagtgggagcctcagtctattggaatgaccaggtgggcagagggcaaatcttatggtgccagtgatccataaatatcagtagtcaaaaacatgatagttttagtaacagcataaataagcaaaaatcagctaacaaatattttcttttaatttttaagcaagattttatcttaatatatttttggttaaaagacatttctactactacactccagtgaaaagagaaacttgaagcaacaattgagttaggtacatgacatcacaagagggggcaagacagaaagaatgacatcactctagtaccaattcaccagcttggccaacccgcagtaatccggggtccgcgagtttggcaagcggtggtggatagagtgggccaactcgaactcgactcagtgggccaggaaactcacctgggcattttccgacatggattcgtcgtagcgcgccttgttgaaggcgggtgcattgtcgttgatgtcctcgatggtaacgttgaaggtgcaaacgtcgtccagtgggggcagaccattatccgtggcctggacggtgacgaagacgaacttctcgtggatcggctcgtcacgatcgaatgtgtgggtggtgaagattacgcccgtgctgggattgataaagaacttgggtcgctcgaacggcgactggacgatgctgtatcgaatgacctggtcgggatcagggtcgacggcctctacggtgagaacgtaggtgttttcgggctgctcctctttgaccttaggagcgtatccggcgcagtttttgaaggcgggcttacgattgtcgccggaaaagtttttgtccggcggcgagtgaagtgcgagggcgggtgacagaaggctgatggccacgataacgcccaggaggagtctcgcggggattagtcgcctgccaaggtcgcggcattttcgcttgtgctgctggtgcgtctgttgctgggcgggatttaggtggccggcctgcggggtcgccgacatattgatgcagtggtagcttctggacattcgctggacactggtggacatactctctagcggcgatccgccatcgcagactctctttttttcaaccgcaacacttttgagcacttcttcgtgaatcacccagtattatttcactcacacaccttttacttttgtttgtgttgcccacttctacttccacttcttttttattctattctatttgcactcttcttcttgtttcgtttctctcagtgtaccgtttgtttggactgcattttcatggcaaccgctcaataattatcaatcgaatcgaactcgtacagtgcgcgccctgattgttaactgacttattccgatttcggtgcagctgctctggctgatattttcgttcacttttatctttcactcgtccgcttgggcactctctttctccgtttctgttgcctcctctctttcgcaccgcaaacaggtaagaccaggtaaaaaagtggttacacgcacaccgccaagcgcgcgcatttgtgtgcgtgtggttcggttcgctgcgttggtatgtgtgttaccaacgacttttggtaaaaaggcacttttcgatggtatttcgttgtgaacttgtactttctggcgaattattttaaataaaaagatcgcaaaacgtattttctttcacttcgatcgcttttattgtcgacttacaacgaagctgcggagccacaccgattttgaaactgcgatcgacgcgcgagacaaccgctcaattcaaaagcaaaaacacaatgcaacaaaaacaacgggcggcgttagagatgtgagacaccgtcgattcctcggtcatcgataattaacggttaataatctcgatgttttcgttttatcgatactatatactgtctacacttctcgataaatacgttgatgtgaatcaattacactggatttaatataacaaatatttctttaaaaatggaagctggaagataaaaatggcccagcttgggctttcaaatagaattattaacaactatttttcacaaacaaacaggttaattttaaacgagttgatcaatactttaatacttatataactgaaaaatatttaataaccaaaactagctaccatgtacaacaataacataatttgctttaaaaaagttctgattgagtttggttttgaacaggcaatgatatttattggtctcgaggaactatttctataatgtattacattctacatcgttaaaagtttttttattgcaattcaagtaacgcgccaagacttttgccattcacccgtcggattatggagcagtgtagactgcccgtaaaatacggtgaatcgcatccggtacaggtacacaaatatttcccatccctagcaaagagtggaaaaaaaagtgaatcgaatcgtcatcgtcttggcccattaattgcggagaaaaaagattgcagcgccgaaaaaacggtcaaggaagagttccagcgacaccgcaacttccaaccactccacaagaagatcccgtcgaaaggtagaaccctaggaaccggaggggaaaccagaccaaaccaaacaaccgcccagccccgatttcgtgaatcaccagtggaactatggagcagacaccgatcaccgatgcggagaaggtgcgcatcgtatcggacttcatcctacatgcgccgcccggcgagttcaacgaagtgttcaacgatgtgcgggagctcctcaagaatgacactctgctaaaggatggggc

SEQ ID NO: 7169 - DNA, 5414 bp, DROSOPHILA
gttgtctcgcgcgtcgatcgcagtttcaaaatcggtgtggctccgcagcttcgttgtaagtcgacaataaaagcgatcgaagtgaaagaaaatacgttttgcgatctttttatttaaaataattcgccagaaagtacaagttcacaacgaaataccatcgaaaagtgcctttttaccaaaagtcgttggtaacacacataccaacgcagcgaaccgaaccacacgcacacaaatgcgcgcgcttggcggtgtgcgtgtaaccacttttttacctggtcttacctgtttgcggtgcgaaagagaggaggcaacagaaacggagaaagagagtgcccaagcggacgagtgaaagataaaagtgaacgaaaatatcagccagagcagctgcaccgaaatcggaataagtcagttaacaatcagggcgcgcactgtacgagttcgattcgattgataattattgagcggttgccatgaaaatgcagtccaaacaaacggtacactgagagaaacgaaacaagaagaagagtgcaaatagaatagaataaaaaagaagtggaagtagaagtgggcaacacaaacaaaagtaaaaggtgtgtgagtgaaataatactgggtgattcacgaagaagtgctcaaaagtgttgcggttgaaaaaaagagagtctgcgatggcggatcgccgctagagagtatgtccaccagtgtccagcgaatgtccagaagctaccactgcatcaatatgtcggcgaccccgcaggccggccacctaaatcccgcccagcaacagacgcaccagcagcacaagcgaaaatgccgcgaccttggcaggcgactaatccccgcgagactcctcctgggcgttatcgtggccatcagccttctgtcacccgccctcgcacttcactcgccgccggacaaaaacttttccggcgacaatcgtaagcccgccttcaaaaactgcgccggatacgctcctaaggtcaaagaggagcagcccgaaaacacctacgttctcaccgtagaggccgtcgaccctgatcccgaccaggtcattcgatacagcatcgtccagtcgccgttcgagcgacccaagttctttatcaatcccagcacgggcgtaatcttcaccacccacacattcgatcgtgacgagccgatccacgagaagttcgtcttcgtcaccgtccaggccacggataatggtctgcccccactggacgacgtttgcaccttcaacgttaccatcgaggacatcaacgacaatgcacccgccttcaacaaggcgcgctacgacgaatccatgtcggaaaatgcccagcccgacgcggtggtgatgactatcagcgccagtgacttcgacgatggcaacaacagtttggtcgaatacgagattctgcgggagcgcgactttcagtacttcaagattgacaaggagtcgggtattatctacctgaaacgaccgattgacaagagacccggccaatcgtatgcgataatcgtgcgggcatataacgtagtgccagatccgccacaggatgcacaaatcgaagtgcgcatccgggtggtggagtcctcaattaagccgccatcatttgtgaatccgatcgatacgcccatttacctgaaggagaatctcaagaactttacacatccgatcgccacgttacgagccgtttccaatatgccggacaagccggaggtaatcttcgaactgaacaccggccgcacggagcagacaaacagcaagaacacattcgtgttcaatcagatcggcaacgaggtgaccattagcctgggcaagactctggactacgaggccatcacagactacaccctcaccatgattgtgcggaatacacacgagctgggcacagagcatcagatcaagattcaggtggaggatgtcaacgataacatcccctactacacggaggtcaaatcgggcactatcctggagaacgaaccacccggcacgcctgttatgcaggtgcgtgccttcgacatggacggcacctcagccaataatattgtgtcattcgagctggccgacaatcgggagtacttcaccatcgaccccaataccggtaacataaccgccctgacgacattcgatcgcgaggaacgcgatttctataacgtaaaggttattgccagcgacaattcgccatcgagtctctttgataatggcgagccgaaccgtggtcaccaagtgttccgcatctccattggagacaagaacgaccacaagccgcacttccagcaggacaaatatctggcagaaagactgctcgaggatgccaatacgaataccgaggtcattgaggtaaaggccgaagacgaggataacgcatcccagatcctatacagcattgagagcggtaacgtgggtgatgcctttaagattggtcttaagaccggcaaaatcacggtcaaccagaagttggactacgaaacgatcacggagtacgagctgaaggtgcgtgcgttcgatggaatctacgacgactacacaacggtggttatcaaaattgaagacgtgaacgacaacccgccggtgtttaagcaggactacagcgtcaccattctggaggagaccacatatgacgactgcatactcactgtcgaagcctacgatccggatatcaaggatcgcaacgcagatcagcatatcgtctattcgattcaccagaacgatggaaaccgatggaccattgacaacagtggctgcttgcgtttggtcaagacgctggaccgcgatccgcccaatggtcacaagaactggcaggttttgatcaaggctaatgatgaggatggagtaggaaccacggtcagcacagtgaaagaggtcaccgtcacgttgaaggacatcaacgacaatgctccgttcctgatcaacgaaatgcctgtctactggcaggagaaccgcaatcccggacatgttgtgcaactgcaggccaacgactacgacgacactccgggggcaggtaacttcaccttcggcatcgacagcgaagccacaccggacatcaagaccaagttcagcatggatggagactatttgcacgccaacgtccagtttgatcgcgaggctcaaaaggagtactttatccccattcgcatcagtgattctggcgttccgcgacagagtgccgtaagcattctgcacctggtgatcggcgatgtcaacgacaatgccatgagcgagggatcgtcgcgcatcttcatttacaattacaagggagaagcgcctgaaaccgatattggtcgcgtgttcgtagatgatctcgatgactgggacttggaggacaagtactttgaatggaaagatcttccgcacgatcagtttaggcttaatcccagcacgggtatgatcaccatgctggttcacaccgccgagggagagtacgacctgtcgttcgtagtcaccgaggactccatgttcgtgccccgtcactccgtagatgcttatgtcaccgtggtggtccgcgagcttcccgaggaggcggtggataagagcggcagcatccgattcatcaacgtaaccaaggaggagtttatcagtgtgccacgcgacttccagtcaccggatgcgctatccctaaaggatcgcttgcagctctcgctggccaagcttttcaatacgtcggtatccaacgtggacgtgttcactgtgctccaaaacgagaatcatacgctcgatgtacgcttctctgcccacggctcaccctactatgctccggagaaattaaatggaatagtggcccagaatcagcagcgtttggaaaacgaactagacctgcaaatgctgatggtgaacatcgacgagtgtctgattgagaagttcaagtgcgaggaatcgtgcaccaatgagctgcacaagagctcggtgccatacatgatctactccaatacaacatcgttcgtgggcgtgaatgcctttgttcaagcgcaatgcgtatgcgaggctcctttaatgaggcgttgtctaaacggaggatctccgcggtacggggagaacgacgtgtgcgactgcatagacggattcaccggaccccactgcgaactcgtctccgtggcattctatggctcggggtatgccttctacgagcccattgccgcctgcaacaacaccaagattagcttggagatcacgccccagatcgatcagggcctgatcatgtacttgggaccacttaacttcaatccactgctggccatttctgatttcctagctctggagttggacaatggctatccggtgctgactgtggactacggatcaggtgccattcgcatccgccatcagcacatcaagatggtggcagaccgcacctaccaactggacattatcctgcagcgtaccagcattgagatgactgtggacaattgccggctatccacctgccagacactgggcgccccaattggccccaatgagttcctcaatgtaaacgcaccgctgcagttgggcggcactccagtggatctggaacagctgggacggcagctcaattggacgcacgttcccaaccagaagggtttcttcggttgcattcgcaacctgacaattaacgagcagacttacaacttgggaatgccctctgtgttccgaaacatcgacagcggttgccagcagtcggtggccgttgcgttcagttttggaattgatagaaacttcatcattgcgatcatcgtatgcctcgcgctactgctgatcatcctgttggcagtggtggtgcagaaaaagcagaagaatggctggcacgaaaaggacatcgacgacattcgcgagacgatcattaattacgaggacgagggtggcggcgagcgggacacggactatgatctgaatgtcctgcgcacccagcccttctacgaggagaagctgtacaaagatcctcatgcgttacaggggaacatgcgcgaccccaacgacatacccgacatcgccgacttcctgggcgacaagaaggagaactgcgaccgggatgtgggcgccacaaccgtggacgatgtgcggcattacgcgtacgaaggtgacggcaactccgatggcagcctctccagtctggcgtcctgcaccgacgacggcgatctcaacttcgactacctgtccaactttggaccgcgcttccgcaaattggccgacatgtacggcgaggagccctcagacacagactccaacgtggacgatgaccagggctggcgcatctaggaatcttcgccagccgcggtatgatgacgtagaaattgaaaagactttttatatactaagagttgtacggatgttgatagtgtcgggacaaggcgccggcctagccggcgtccaaagtcgattcagagatatatacccatatatatatgggtaaactatatattatatatatacatatatatttttatggaggaatatt

SEQ ID NO: 7170 - protein, 1507 aa, DROSOPHILA [sequence omitted]

SEQ ID NO: 7171 - DNA, 6325 bp, DROSOPHILA
aaaatcacctgccaataactagcggaaaccaaatatttgaccctcagtgaattgtgaatcatcggtgacgcccaatcgaaatccaatcctaagcaattgaaacgagcacgagttccaatttaatagtatacaaggaaacacctgctttaaatactctacatagtacacgttataataacgatttatttgatatttctggatttttgtctgcatgtatttcatataatattgatttgatttttttaatgaattgaactaaaaaatcatattagaacattttttgcagtcgccgataaagatgaacactgttctcagaacacaactgtcatgtattaagctttcagattttcagaaatttggagagcaatgcattctatgcacgagcctcctggccttacaatttacttgtttgaaattagatcgtcaaataaagtccctaaaattaaataaatagtagtcacaactttaaaataggtcttaatcttttagggtaccgaaaggtatttcggcacaaatcagcgcagttttaaatgtcgatgaaggccaaaaatcataccaaacccagcgaaaggtgatgtctgactcattaaattgggggattcgagtgtatttattaaacatgcgtgaaaatcaatcatggaagacaaaacgcaaagttggccgatctatgggaacagcataagccacctgattacccgaacactgaaccacccgaatcactaaaaccaccgaagttggcgcgcgccttcgttttcattttcattggcctgtcttcgtcttcggagaaaaaaaacttcatataaaacgcggccgacatattatggccaccagtcgttaccgcgccacggtccacagaagaggattaaaaaaatatcacacagccgaaggctagagaagaaccccctatagctgaacatatataaacaaatatatttttttttattgccaacacactttggcttaagtgttaagagtgattgtcagcttagagctaagtgcactgttccaggacaaagggtggatccttgtgaccctgatcaccttggtgacgccgtcttgggctgcttacaaacttcaggagcgatatagttggagccagctggactttgctttcccgaatacccgactaaaggaccaagctctggctagtggagattatattccgcaaaatgctctacctgttggagtcgaacactttggcaatcggttattcgtcactgttccccgctggcgtgatggtaagtggaagttaaatatgaagcccttggggagatcgtaaatgggacattcttacttagggcatcagagatatctgattgagtggttgacagttttatatggcttgtttgacatgatgtaaaaacacaaaattcatttagtttaggtattcaaataagagcttgttatttattttagaatttggagaacatttttttgtctttctacccttcttagaaaataatattgttttgtacaatttaattttaaactagtacagacgaaaaatgtatttttttatttgtatgccttttcaccattttggcagaggaataaatatgacaatatattttgagagcaccctcatgtaaaggttttagcgtggcgacctctcataaatccggttggtacctgcgcgttattttaacattttaaacaattaaccgttgtaaaatcgaagccaatagcatggcattggctttatactgtattaaattgtattatattaccatccgaattgtaaagacttcttcagggccgccacatagaaatggaaatccaatcacaaacaataacttatggcattagctattaaccgacgattagctgtcagttcaacaaatgtaagagtggcgaaatgtttaaatgcgaaggcattgttctgtgactcacgttttattattaatcacacaaatgattttgcttcaaaattatttggcttacacaataatcaaaatttttatgaaatagttgaaacacaaaactaggaaattttaaaaagcaatgaaactaaaaaacccaattgctaagattatatgatgcgcatacaaatacttcagtacgtctaggaatgctttcgatgattgattagtttttatgcatggcttacaattggtatttacacagaaaaacacggcgatgttaataaattttgtacatatgttcttaagcagtccgaaacacccaaacttctgactaaacttaaaaaaacacgctcttcaaggatatcttaatgtcacttataatgtaatggtattgtattattaagtatatcaaaatattctggcccagccttgaggtctctttttaaaaagatatcgactgactacctccagtcaatgaaataatagcccagaaggccgaatcggcaaaaaataaaccccaagttacggcaaacaaaacatagtgaaagttgtggcaaagtggaacatttaaaggcatgcttcaatggccatcgaagcaaatcaattagtcaaagcaaatcggtagtggcaacaacaggctacagaatacctataagtgacagttatggggtatgattaattataaatattatcattgaccaccaatgctgggctcaattggaaaaactattctatgaagatttgagtaaataaattttgatttaaaaaagcccatggttatcgcgacaactagctacgggacaagattactgtttaaaatcaagtgtgaaatatcaaaatcaaaatcggattccgatcgggaagttgtatccgattctgaaactaaaacacagaattgccaacattttccgatatcgactcagctcacgtatttcatacagattcattaggccaccagccattgaataatataccccagtcaattgagctactcgatagttgatcaacttagcttttgtcaacgagtgaacgcataaactactacatcaacgatatttgcggcccattccaagctaaaagttcatcttaattacaaataagattagaaaaaatatctgaatgaaaaaaatgttgagacatatttctttggaaaaggagaacctcaagacagtcgaaaaaattgtttacaatgaaaatgttgaaaatcatgaagcagataaatctgtcagttgcgaggttttaggactgaaagagcacatgtcaaaatataaatttgttcaaatactttatatttgactgaattagattgttattttaaaagttatgaattaaataaagattgaaaggtgcattatgctcaaatgtatatttatcgcaacccccggttactttgtaaagcaaaaacgcctggtttgatttttaagaagatgggtcggtaaatcgataaaagctatattttctggtcgttgcagtctcactcgcctgctataaaaacattaaaagttcccagaaacaataaatgtctttaaattcaattaacgaagaaataaagaaggaaaagaactggagcggaaatcggtcgaaatactgccaatggccacatatacatttaacagcgatatatggtatacatattgataatgatgtcagacgcaattgcttcagacggctaatgacatcgcaaattgcacgcaacttgcaatagtgccaattatgactgaagtacatatagccggggatcttttaacataaacttccagtagatgtacaagcagaaaaaagagccattagcacggcagttaccattgcttatgattccttgtgtccaaaataatgacaaataggtatataaataattaaatgccaaacataagcgattctaatttacctttacatctgtatgcatttacatattatccagaaaacagacagcgataacttgcaacattgcttagtataataatccaaagaaggaatttaggcagaaattccagttaattaaatattcaaaacaaactttatttagtgcctcaataatagtttggccctgctaattctcctattttattttttagggattccggccactctgacctatataaacatggaccgcagtttgacgggttcaccggagctaattccgtatccagattggcgctcaaatacagctggagattgcgccaacagtattaccactgcctaccgcattaaagtggatgagtgtggtcggctgtgggttttggacactggaaccgtgggcatcggcaataccaccactaatccgtgcccctatgcggtaaatgtctttgacttgaccacggatacgcgaattcggagatacgagctacctggcgtggacacaaatccaaatactttcatagctaacattgccgtggatataggcaaaaattgcgatgatgcatatgcctattttgccgatgaattgggatacggcttgattgcttactcctgggaactgaacaagtcctggagattctcggcacattcgtattttttccccgatccattgaggggcgatttcaatgtcgctggtattaacttccaatggggcgaggagggtatatttggtatgtccctttcgcccattcgatcggatggttatcgtaccctgtactttagtccgttagcaagtcatcgacaatttgccgtatccacgaggattttgagggatgaaaccaggacggaagatagctatcatgactttgttgccttagatgaacggggtccaaactcccataccacttcacgtgtgatgagcgatgatggaattgagctgttcaatttaatagatcaaaatgcagtgggttgctggcactcatcaatgccgtactcaccgcaatttcatggcattgtggatcgcgatgacgttggcttagtttttccggccgatgtgaaaattgatgagaacaaaaacgtttgggttctatccgataggatgcccgttttcttgctgtctgacttggattattcagatactaatttccgaatttacacggctcccttggccactttaattgagaatactgtgtgtgatttgaggaataacgcctatgggccgccaaataccgtttcaataccaaaacaagccgttttgccaatgggtccaccgttatatacgaaacaatatcgtcctgtcttgccacagaaacctcagaccagctgggcttcctcgccgcctcctccaagtcgcacttatttgcccgccaattcaggcaatgtagtctccagtattagtgtctctacaaattctgtgggtcctgcaggagtggaggtgccaaaggcctatattttcaaccagcacaacggcataaattacgagacaagtggtccccatctatttcccacccatcaacccgcccaaccgggtggccaggatggtgggttaaaaacttatgtgaatgcccgccaatctgggtggtggcatcatcagcatcaaggttaacataatcctacacacggtacttgggtatattctcacacactcgattgatgtaaagaatatttaaagacaacaacatagggcaacagcggttaaaaaaaccacatgacgtatgagcaagtggcaaatcaatactttatctagttatgttaagcaaaaaataacaataaatcaacttttttttgaaggttaagagtttacgcaattttcttgagcggaaaaagcggaaaaaatgtaagtatgcataaattctaaatatatcaacaactgtacattttctggagtactactaccaggcaagaaagtaggttgataaagctatgcacaagatctgtcatatggatgggtttcgcatcttctggatcataggacttgagaacatacacaaacacaactaaaatcagaaaaggttgccagcaatcactttagttttctgcaagctagatccacctgctactatccctactttcttctgttggggttgtcagagctctacctacagttgattaaaccacacatcagtcatcgtgttttttttacaattttcctaatttccttacttgtattgcctacttttttgcgagggacttctattggccagtatatattatgtgttgcatactcttggtcacagcaaaaataaaacaaaaaatacgcatggtaaaagaatgcttccttttttacgcacaacggtagacgaagcatataatttttacatatcggaaatgttcttgaaacagagcttagtaaatttatacgcaatattagttagtgtattttaattttcgccttttagtttcaccttgttgtgtaatcagggaaagtgataatgtatttaataataattaatagttttaatgatacaaatctattgcgcagaaatccgatgggtattacaacattatgattccttctacattatagatacatgcaaattgtatatctcgactatagcgttctctcttgtttatgctacaaatgtaaatgtactaaagaaaatatt

SEQ ID NO: 7172 - DNA, 1626 bp, DROSOPHILA
ctgttccaggacaaagggtggatccttgtgaccctgatcaccttggtgacgccgtcttgggctgcttacaaacttcaggagcgatatagttggagccagctggactttgctttcccgaatacccgactaaaggaccaagctctggctagtggagattatattccgcaaaatgctctacctgttggagtcgaacactttggcaatcggttattcgtcactgttccccgctggcgtgatgggattccggccactctgacctatataaacatggaccgcagtttgacgggttcaccggagctaattccgtatccagattggcgctcaaatacagctggagattgcgccaacagtattaccactgcctaccgcattaaagtggatgagtgtggtcggctgtgggttttggacactggaaccgtgggcatcggcaataccaccactaatccgtgcccctatgcggtaaatgtctttgacttgaccacggatacgcgaattcggagatacgagctacctggcgtggacacaaatccaaatactttcatagctaacattgccgtggatataggcaaaaattgcgatgatgcatatgcctattttgccgatgaattgggatacggcttgattgcttactcctgggaactgaacaagtcctggagattctcggcacattcgtattttttccccgatccattgaggggcgatttcaatgtcgctggtattaacttccaatggggcgaggagggtatatttggtatgtccctttcgcccattcgatcggatggttatcgtaccctgtactttagtccgttagcaagtcatcgacaatttgccgtatccacgaggattttgagggatgaaaccaggacggaagatagctatcatgactttgttgccttagatgaacggggtccaaactcccataccacttcacgtgtgatgagcgatgatggaattgagctgttcaatttaatagatcaaaatgcagtgggttgctggcactcatcaatgccgtactcaccgcaatttcatggcattgtggatcgcgatgacgttggcttagtttttccggccgatgtgaaaattgatgagaacaaaaacgtttgggttctatccgataggatgcccgttttcttgctgtctgacttggattattcagatactaatttccgaatttacacggctcccttggccactttaattgagaatactgtgtgtgatttgaggaataacgcctatgggccgccaaataccgtttcaataccaaaacaagccgttttgccaatgggtccaccgttatatacgaaacaatatcgtcctgtcttgccacagaaacctcagaccagctgggcttcctcgccgcctcctccaagtcgcacttatttgcccgccaattcaggcaatgtagtctccagtattagtgtctctacaaattctgtgggtcctgcaggagtggaggtgccaaaggcctatattttcaaccagcacaacggcataaattacgagacaagtggtccccatctatttcccacccatcaacccgcccaaccgggtggccaggatggtgggttaaaaacttatgtgaatgcccgccaatctgggtggtggcatcatcagcatcaaggttaa

SEQ ID NO: 7173 - protein, 541 aa, DROSOPHILA
LFQDKGWILVTLITLVTPSWAAYKLQERYSWSQLDFAFPNTRLKDQALASGDYIPQNALPVGVEHFGNRLFVTVPRWRDGIPATLTYINMDRSLTGSPELIPYPDWRSNTAGDCANSITTAYRIKVDECGRLWVLDTGTVGIGNTTTNPCPYAVNVFDLTTDTRIRRYELPGVDTNPNTFIANIAVDIGKNCDDAYAYFADELGYGLIAYSWELNKSWRFSAHSYFFPDPLRGDFNVAGINFQWGEEGIFGMSLSPIRSDGYRTLYFSPLASHRQFAVSTRILRDETRTEDSYHDFVALDERGPNSHTTSRVMSDDGIELFNLIDQNAVGCWHSSMPYSPQFHGIVDRDDVGLVFPADVKIDENKNVWVLSDRMPVFLLSDLDYSDTNFRIYTAPLATLIENTVCDLRNNAYGPPNTVSIPKQAVLPMGPPLYTKQYRPVLPQKPQTSWASSPPPPSRTYLPANSGNVVSSISVSTNSVGPAGVEVPKAYIFNQHNGINYETSGPHLFPTHQPAQPGGQDGGLKTYVNARQSGWWHHQHQG

SEQ ID NO: 7174 - DNA, 4735 bp, DROSOPHILA
taataataataaaatgaaaacgaggacgacgaacatttttatggtgctgcagtcagtctgaaagaaaaaactaccgtcctttcgcccctcgtccgtccctccccctgaaaatttaaccaccccccccccacccaccgaagtcattggcgcttctttgttgccagggaaatggagctgggaaaaaaacatctcggtattcgatgactggcaggactctggtttcttttttactttattttttttttatgtatatatattttttatattttatttcatgttttcctttttaccgattcccgactttagctcacataaagcgggaatttcgattatttatttggctgaaaaaattgcgatgaatttaattcgaaaaatacgcttaaaaaaaaacgtggccagcaaaagaagtggcaaagacaataaaaaaaagcgcagcaaaccctttcattaaacggtaaacagtaaaaagctgcatgtaccacgattgacatttacacaccaccgacgcactgtgaaaaggattcgtagggataacaagttcatcggcggatatataatgctcctggcatgaaaaaaagcgataaacgcttcaatatctcatgttcagatgcgcggaaaaacacgttacgctgtataagaaaagtcaatttcggatttcgttttatttattacaaatattttatttgtaaataattcgtttaaatagtaatcatgggtgctttttgcgcaggcggatttattactaatgaagttggggggcaatgccattgcaattaattgcattttttcgaaatcgatgcgaattgtagcatacttctgggcaaatttataaggcttttgaaacatgctggttttcggaaaaactattcctaacgttggaatctttttatcttttccagactggcaactgtccaaggagtagcttgttggtggaattactagaaccggctgctccaccagagacaccaccatcaggggcagcagcaggcgcggcaccaccatgctgccgcagcagtactgcctaaggtggaagtaccaccatagcaatctgcagaccatgttctcccagctgctggatcgcggttgcttctgcgacgtgaccctggcctgcgagggtcagctcatccgcgcccatcgcgtcgtcctgtgcgcctgcagcaccttcttcgacgccgtgctctccaactacgccagtgaacgtgatccgatcatcatcatgaaggacgttacctttgcggaggtcaaatgcctcatcgagttcatgtacaagggcgagatcaacgtggagcatgtgagtgtgttgtttgtctaatggcataaactatctaaatataaactggaaaataccccttaactgactaacttgcagtccagccttccctcgctgctgaagaccgccgatgacctgaagatcaagggcctggccgaggtgacctggcgcgatgacgaagacggaccgccgccaccaatggccgccgccgagtttcactcaccgccgcgcagcttggcagagagttacgcccaggacctaatccttcagcatcagcaacagcaacagcagggcccagctgctccacccttgaatttgcacagctctgctgcgctcttggagagagatcgagaacgggaaagggaacgtgaccgggagcgtctctcgccggggatggagggtgtactgggtcgcatgcccgtgatgacgccgctgactggcgcatcgggttcggcaggagtgggttcggtatccggtggcacatcgctcgagggcgtcgctcccgtggagcactttctgggtcccaaacgcaagcgtggtcgtccgccgctagacgatgcctatgatgttttcaatgtgtatgtaaataaaaacagctaaatatgctatacacttttgaatatttttcaacgtgcaaaaaaaaaaaacaactttttaaatcgaaactctcttttctgccgcacagacgcaagctggcccagtatgccgccaatctggagcccgcccagcgtgcctacttggagacggcgcgtcactttacggaggagccgccactggccgcccatgccgcctcgatggcctccccacccgccgcctgcccgccgaaacagcgccagcgtctacgtcaccagcagcagcagcagcaacagctgctacagtcggagagcagtgaccaggagcagccggctgctggccaggattggtccaatttggagccaaatggcagtgccacgcccaaactgctcagcgatggcgatgctaacaagcaggaaacggagggcggtgatgaatcgctaccggcagtgctaaccaccgccagcagcagcggcaccaaaaagctggaaaagataggcgagcgtcgcgaacgccatggcaaattacgtcatgctcgtcgcctttatgagaagtctggagaggatgaggttgatccgcccaaggaggagcccgatgagctgccgcaaccggtggaagagatcgagaacgagcatctggtggcaaatagggcagagtcgccgcgtcctacggtcgtcataccagctagttttgcctgcaaatacgagggaggcgtgactgccgcaggcggtggctccggttctggaactggatccggatcgcttggatcctcctacttgatcaacgaacatggcatgctgatggcccacgaatttgcaccgaatgtggccagtgccgccgccaccgcagctgtggccgttgcagcagccgccgctgcagtggcaaatgcctcagccggaaacggaaacggtggtcaggatgtaagtggcagtggaaccggtgccgccgccgactatcccgacatcaagctggaggactacgatgccgccgaactgcgactgaccaacgaggagctgtcgcagtggcaggacgtcatcaagatggacgactacctggctaaggggcggcgtccacagttctgggaagagccattcaccaagcgcgtaaggcaaattttaagttttgtcagctataaatgtttaaaatattgaatagtaaatattataattcatattggccaggcagttgaaatactgaccaattaaaactagctaaaaagtatacacttcttctgttttcaagtttagtttttgttttcttttttgcttctgtcgttttttttttttaccttgttttaacgccaaactacgagttaagcaagcttctatgaaaagggcaaattaagctaattgcttaggtgtgacgtcgtcaaatacctaaaaaccttggcaatgtaatgataataataatggtcgagaaatcggaaatattaaaatatttttgttttggaatctttcaggtgttggacgccattaaaaacaaaagactcgagatgaagaaggccgccagaattctgggcgtctcctatggcactctgtatgggcgttaccgcgaggtctatggctgccttaagcatccttacaggtgcgttgaagtgcttccagttactgaatgtatgtagattttaaatcaccgtctttattacgatatagtggcaccgccttccggaactctggatccacctcgaccagtcagatgggagttcagcctcgcttcgacttgggattccgcaacgggggcgtccttccagctcagctgggtaagaaagatctacaaatgtgctgacaaataaccaacttactggggaattaagtccaaaccaatccctacttgcagagctgggcaagctgaagaaggatctgagcgagctatggacacgtccgcagatttgaggaccaaccaatgccacaaccataacgaaactgcagaaaagcctcaaacgtcgccacaggctgatctaggattacaacagaaggatgaaagacagctagacgaggctagttttggatcctgagtaatgctttcctgaatcctgaattcccacattaatgtgttgttcccatcggtgggtcacaactataactgatctacacatttaggatcttattattacataatatataatataatataaatacatgtctataaatacaaccacgtggattagttaattgaaatacgcacggacacgtgtggttttagtggtaaatacatttctcttggtagtgaaattcaacaccataaactatggaatctagttaatcgataaaataacacggaagtgaagtgaattttttgataagctaacgaaaaggaacacaaacaatatgtattacatacaaaaaatatatgtttaaaacaaataaagtaatatctattaaaatatgttcaaaacgatatcaagtacttcctttctacggctctttggattcaaattgtggcgccaatatagttggtcacctatacctatttacagtccgattgaagcccgataccgacgaactgctgcgagctagaggtgggatgttttcgatgggtttagagcaaaaattcgatactatcgtttttcctgaacggcattattaacaatttatatatttaatgctataactcaatatacaagatatcaaaattatttctttcatttccttctaacaagccacgaaaaatattaaaaatattaaaaaactaattaggggatcaagaataacaggaaaactaagagatattgaccaggaaatcacaaaaatattattctatccatgcatttccttgcaaaaaaagtatgtcagaattgatcgttttaaggaaagccctgcggttacctattatacgtccagcctacgctcagactctgttgatgtggcgtgaacacataaaggtttaggtact

SEQ ID NO: 7175 - DNA, 2049 bp, DROSOPHILA
atgctgccgcagcagtactgcctaaggtggaagtaccaccatagcaatctgcagaccatgttctcccagctgctggatcgcggttgcttctgcgacgtgaccctggcctgcgagggtcagctcatccgcgcccatcgcgtcgtcctgtgcgcctgcagcaccttcttcgacgccgtgctctccaactacgccagtgaacgtgatccgatcatcatcatgaaggacgttacctttgcggaggtcaaatgcctcatcgagttcatgtacaagggcgagatcaacgtggagcattccagccttccctcgctgctgaagaccgccgatgacctgaagatcaagggcctggccgaggtgacctggcgcgatgacgaagacggaccgccgccaccaatggccgccgccgagtttcactcaccgccgcgcagcttggcagagagttacgcccaggacctaatccttcagcatcagcaacagcaacagcagggcccagctgctccacccttgaatttgcacagctctgctgcgctcttggagagagatcgagaacgggaaagggaacgtgaccgggagcgtctctcgccggggatggagggtgtactgggtcgcatgcccgtgatgacgccgctgactggcgcatcgggttcggcaggagtgggttcggtatccggtggcacatcgctcgagggcgtcgctcccgtggagcactttctgggtcccaaacgcaagcgtggtcgtccgccgctagacgatgcctatgatgttttcaatgtacgcaagctggcccagtatgccgccaatctggagcccgcccagcgtgcctacttggagacggcgcgtcactttacggaggagccgccactggccgcccatgccgcctcgatggcctccccacccgccgcctgcccgccgaaacagcgccagcgtctacgtcaccagcagcagcagcagcaacagctgctacagtcggagagcagtgaccaggagcagccggctgctggccaggattggtccaatttggagccaaatggcagtgccacgcccaaactgctcagcgatggcgatgctaacaagcaggaaacggagggcggtgatgaatcgctaccggcagtgctaaccaccgccagcagcagcggcaccaaaaagctggaaaagataggcgagcgtcgcgaacgccatggcaaattacgtcatgctcgtcgcctttatgagaagtctggagaggatgaggttgatccgcccaaggaggagcccgatgagctgccgcaaccggtggaagagatcgagaacgagcatctggtggcaaatagggcagagtcgccgcgtcctacggtcgtcataccagctagttttgcctgcaaatacgagggaggcgtgactgccgcaggcggtggctccggttctggaactggatccggatcgcttggatcctcctacttgatcaacgaacatggcatgctgatggcccacgaatttgcaccgaatgtggccagtgccgccgccaccgcagctgtggccgttgcagcagccgccgctgcagtggcaaatgcctcagccggaaacggaaacggtggtcaggatgtaagtggcagtggaaccggtgccgccgccgactatcccgacatcaagctggaggactacgatgccgccgaactgcgactgaccaacgaggagctgtcgcagtggcaggacgtcatcaagatggacgactacctggctaaggggcggcgtccacagttctgggaagagccattcaccaagcgcgtgttggacgccattaaaaacaaaagactcgagatgaagaaggccgccagaattctgggcgtctcctatggcactctgtatgggcgttaccgcgaggtctatggctgccttaagcatccttacagtggcaccgccttccggaactctggatccacctcgaccagtcagatgggagttcagcctcgcttcgacttgggattccgcaacgggggcgtccttccagctcagctggagctgggcaagctgaagaaggatctgagcgagctatggacacgtccgcagatttga

SEQ ID NO: 7176 - protein, 682 aa, DROSOPHILA
MLPQQYCLRWKYHHSNLQTMFSQLLDRGCFCDVTLACEGQLIRAHRVVLCACSTFFDAVLSNYASERDPIIIMKDVTFAEVKCLIEFMYKGEINVEHSSLPSLLKTADDLKIKGLAEVTWRDDEDGPPPPMAAAEFHSPPRSLAESYAQDLILQHQQQQQQGPAAPPLNLHSSAALLERDRERERERDRERLSPGMEGVLGRMPVMTPLTGASGSAGVGSVSGGTSLEGVAPVEHFLGPKRKRGRPPLDDAYDVFNVRKLAQYAANLEPAQRAYLETARHFTEEPPLAAHAASMASPPAACPPKQRQRLRHQQQQQQQLLQSESSDQEQPAAGQDWSNLEPNGSATPKLLSDGDANKQETEGGDESLPAVLTTASSSGTKKLEKIGERRERHGKLRHARRLYEKSGEDEVDPPKEEPDELPQPVEEIENEHLVANRAESPRPTVVIPASFACKYEGGVTAAGGGSGSGTGSGSLGSSYLINEHGMLMAHEFAPNVASAAATAAVAVAAAAAAVANASAGNGNGGQDVSGSGTGAAADYPDIKLEDYDAAELRLTNEELSQWQDVIKMDDYLAKGRRPQFWEEPFTKRVLDAIKNKRLEMKKAARILGVSYGTLYGRYREVYGCLKHPYSGTAFRNSGSTSTSQMGVQPRFDLGFRNGGVLPAQLELGKLKKDLSELWTRPQI

SEQ ID NO: 7177 - DNA, 3199 bp, DROSOPHILA
ttttcgtggagagtctaatagggcattacttaaccagacgacaaattgtttttcactttgcaatatctactggtttttgtttataaaatagccttaaatcataattcaaataatttatttgaaatactaatagattccttacttccagtcacatcatggatctgctgtcccggctgatgcaggaggccatcaacgacttggccaagaactgggtctttattccgtcgcagtactacgaacgcaaccattaggtgttccctccgttaaataaatgcattctcctgcaattcgtatccgtggttttcctggtcgcgcgatgctttccacttcgttgtgggttgtccgcgccggaaatttatgtaagatttcgcacgagttgaaagccgacgccaaaaatgctgccgaatttatgtgtctgcatacggccttttagggcttttcacacagacagggggcgtggccgtttggggagtttaatagcaatggtcagacaactttacgcgagtatttataactcaacgcttgcttttagtttgtgcggaaagcttacaagtggtcaaatgttcgcccatttagtatcttaatattcgcatgtgtagccacaatcttttggattgcactgggcaatctgttgcaattaattactgtttaaatataaaaacgatattttttagcagtaaatattttattaaaactttagcattagcatccgatataatacaaaaataaaaaataaatatatatgcaaaaaaaatagcccttaaccttttttattaaaattacttttgttattgctatgaagttaacaatgagattattcgtacacatattagataacttcaaaatttgaacttcccgcgcttggcaatttttcgatttaacccaaacggtcactctccatcactatatagcgagtgcaccaacccgtactaagcgagagcactgaaattgtatttcctgtaaaaaatggtaattttcaattctattagtacggtcacacttatatctagcgcgtcacttgattttaaaaatttccaaaccaaacgtaaattccagcacaataatcaacctgaatagtgataaaaaccgagaaactcgtacctaaaaagcagttgcagtgtttgccaattgattcaacaccacggctaaagttgcgacatcgaatccgcaggagccgccttcgacggtccaaaaaagagacgccaaattccgcagcgcgcacttcgcctttccattgcatcgaaattcctggaatttccaggcgcagacacgatgagcaaggacatttactactccgacaagtactacgatgagcagttcgagtacaggtgagtgtcgcccttgtcgcccgcgaccatttggatgcagagaagcaactgtaaaatacccttatcccacagacatgtggttttgccaaaagagctggtaaaaatggtgcccaagactcatctgatgacggaggccgagtggcgatcaattggcgtacagcagtcgcgcggatggatccactacatgatccataagccggagccccacatcctcctgtttcggcgacccaaaacggattagataaccggcggtagcagcagcagtagcaacaacaactgcatcagatacacatacttcgaaaccacatagcctgtagcacatacctatatatccggcagctgctgccgatattctgtattggcggtggtggtggttgctgccaaacaaacaaccaactgttgcacaaacatcaacaacatcatcatcatcatcattatcataggtactcaggaatcccctagaaactacttattgtgctgtttgtgctttgtaatactctctttttaccatgtttgccccgcattattcccttttatatatatagcacctagagctaatgataagtttgccatttgtaatactctctttttaccatgtttgccccgcattatccccttttatatatgtagcacctagagctaatgatgtttgccattttcgtacaccttagtgccgtttccgaatcattcctcaagttcgcacgaattttatcatactttatgttgccatttcgaaacggaagcgaaaagaagaattttgctcacttcttttaagcttaaatgaaatctgatttgtgatcttgaaatttttaatcaataatacatatgtttacacataatataatgaacttaaaataaatatttttaatgtatggtgaggcttgaagcgttgattgcttgaagttttccctaatcgaattaatttgtatgtttctcttatcaagttttgggttacaaatggttatagagaaacacaagcgccagcatatatgtaattgtgagtgagaagtattcggattttatatttcgatcgtgagcttcgttttaaatcgtgtaagtaaacattatacgcaatcgcctaattattagaacaacgttttgtttactgtatcttcccagctatatagatggatataaatttttcaattcaatattggctagagcttgttctaacgcgaccgcttcttaggccccccaccaaaggctcatcctcattacgaggcattttctgaattaacttgggtccatcaacaccgaccagaatctaattattcagttatttatataccacaacatagcaacccgattggtgtgcaatttccaacctcaacaatcttcgctggtgtgtgacttgtgaaatttctagtgtcaaaaatgaagatcgacagttccggtccgaatgtgtgtactgcgcccatggcagcacctcacctctccacatgaaccagcgctgacccatccgaaggggcagatccagtgggctggggagtccaaatgcccggctgccacgtttagggactacggcaatcgctgtcaactgtggcccgccacttagcagcatcccatcctctggcctgctcttccgcagtttgaacataccacactcatttcccaccagcatggaactggaactggcccccaaggcaaatcgaattgaagcagatcaaaggcagctgcagctgtgatgatgctgctgctgatttttattgccactgatatttattgtggtacgaatatgaaaccggaaacgctcgactaacattctttgggtcagcctaggactcggttccacattcttgctggttcccttagattctggccattgtattcccggtgtactcaatcaggttcaagtagtacatggctatgcc

SEQ ID NO: 7178 - DNA, 1127 bp, DROSOPHILA
ttatatctagcgcgtcacttgattttaaaaatttccaaaccaaacgtaaattccagcacaataatcaacctgaatagtgataaaaaccgagaaactcgtacctaaaaagcagttgcagtgtttgccaattgattcaacaccacggctaaagttgcgacatcgaatccgcaggagccgccttcgacggtccaaaaaagagacgccaaattccgcagcgcgcacttcgcctttccattgcatcgaaattcctggaatttccaggcgcagacacgatgagcaaggacatttactactccgacaagtactacgatgagcagttcgagtacagacatgtggttttgccaaaagagctggtaaaaatggtgcccaagactcatctgatgacggaggccgagtggcgatcaattggcgtacagcagtcgcgcggatggatccactacatgatccataagccggagccccacatcctcctgtttcggcgacccaaaacggattagataaccggcggtagcagcagcagtagcaacaacaactgcatcagatacacatacttcgaaaccacatagcctgtagcacatacctatatatccggcagctgctgccgatattctgtattggcggtggtggtggttgctgccaaacaaacaaccaactgttgcacaaacatcaacaacatcatcatcatcatcattatcataggtactcaggaatcccctagaaactacttattgtgctgtttgtgctttgtaatactctctttttaccatgtttgccccgcattattcccttttatatatatagcacctagagctaatgataagtttgccatttgtaatactctctttttaccatgtttgccccgcattatccccttttatatatgtagcacctagagctaatgatgtttgccattttcgtacaccttagtgccgtttccgaatcattcctcaagttcgcacgaattttatcatactttatgttgccatttcgaaacggaagcgaaaagaagaattttgctcacttcttttaagcttaaatgaaatctgatttgtgatcttgaaatttttaatcaataatacatatgtttacacataatataatgaacttaaaataaatatttttaatgt

SEQ ID NO: 7179 - protein, 74 aa, DROSOPHILA
MSKDIYYSDKYYDEQFEYRHVVLPKELVKMVPKTHLMTEAEWRSIGVQQSRGWIHYMIHKPEPHILLFRRPKTD

SEQ ID NO: 7180 - DNA, 2845 bp, DROSOPHILA
atttggggtaatgcgtccaactacacactatcagcatttgattttattacgctcatttgtatgtgcgtagttggcagtgctaacctcgcctcctcaactcctcaccttccatgacccacgagggggagggagctgagtggctgggcggtcattgcgagcaacaggatggcgggtggctagtcttcaagtgctcctgctcaactttgacctcctgcggcagccaaggcaaggcgctggcgtcgccgttgcgtcgactgactttcaccggctgcgttctctatttttctccgaatcacgccaaagcccagactgaatgaagaaggaggatgctgcgagccagccattcggtttcagccgaaatcgccaacgtcttgggcagttagtaaccgttaagacgtcgtggctgcctagtcgcgagtccttcgtccttcgccttcgttcgttagtttagttggttttttatgttccgtgtcaagggaatccaccggctccgaaggccgccaggccgctaggtaaatggatcctcgagatcggggtacgcaaaaggatacttgccgctctctatctctcggcatcgctacccacaaccccccacccccctcaataaaaccattcagcatataccatgttccgagggcaagcgttgcatacttttttggggctagagcgagcgagatggggagcgacgcaaaggcccaagcgggacagagcaaaaagacaacgaattaaaatttaaaaaccggctctcctcacacacgcacagtcacgctcttcagctcgcacacacacacacgcaggccatccttttttattcgcttggttattttcgtgcgtcgctttcccctttcgaagtcggtgggcggtgggcgtagtagctcgtagttctccattatgaacgtgtgtgtgtgagtcctttttattttcgtgctttacaacttttagtattttttatttttcgcttttcgcctcgtcctgtttcgttggcgtttttttgcgcgcgctccgctctcgtgtcgtcgtgtaaacgcgttttttaaatttcccactgctgccggcatcgcacgggggttgtttgtgtgtgtgcggtgctttgctctgttgtgttcgtgtgcggggggtggcgggcggtaggcggtttgccgggttggcggggggtggacgcagcatgcagtggggttggttgcggatagattttttccaccgccgcacacacacacacacacacgctgactcttttttcctgccgctgctggttcttatcctcctcttcccgatttcctttttcgctgctgccgttttccacttcttttttctttttcttttttttttttttttttttgtttcagctgctctgctgcgctgccgctttggttttagcattttcgttcgtttttcgcatttttgttttgtttctgattttcctttttgcctggcgtcgctgccgctgccacagcctccgtcggcgtcgcagtcgcatccttttttttaacgccacacgcagaaaaaaagagcaaacttcgtcctgcttcgtgtgtgtgtgtgtctgtcgctgtgtgtgtgtatgtgcgtgtgtgtgagcgaatagttgttgttgtgtcggaagggggtgggcgggaagtcagcgaaatgagtaatgagtgtttagtacgttgtttggcgggtgatttttatggcagcgctgcggcagagcatctggatgagtggcgaggggggatgccagatggcggatggcggacaggggccaggggcaagtggccagtggaccgcgtccagtgcagcatccagttggcagtgcggagcgagcgagtgcaggcggcggatggtcagcgaaacgtagcacagcattcggcgctacctatttggtatccgtcatcagtaatcagtaatccgtaatccgttatccttgccctgccaatcgcttctgtgtgcgtgagtgcgtttgtgtgtgtgtcagcgcgcttgtaatgacttcaattgtgtgctaaactttctattccacggtcgcgcagctccagcagcatcagcttgggcaccaaaacaaagctccgtcggcgggcgtcgctgccttcgtattgcggcgacttcgggagtccttcggctggcttcggcggcgcttcggctgctccttgccaggtcctgccgctactggcgctgccggtcctgctgccgctctgccgcagccggcgtcgctgccagcggccctggccgttgcgattgcgacttggacttgaatcgagttgggttttaaaaataacgttagttgctgtttgttgctcgttacgtgcgcgtgttgcgacgcgaaccaaaacccaaatcagccaccagcggaaacggaaattgaaactgaaactgaaacccaactgacgtcccagctcagctcgactctaatcggatgccaagacacaaactcagcacagctcaaagataactgagtgcgtgtgtattgttctgtcgtgtagtttgtttttttttgcaagtgattgttaatgcggcaaggacagcatctcgggattttaggcatttccaccgtttccaccgcgccgattgttgattgttttctttttgtttggtgtaccgcagagatgacaagttgtgcaataaatcaaatctagaatctaatcgaggtgaaggccagtcaagaaaataggaacacccaaaaatcaagtgataaaccagtcgatccggggacgaatcaaaatactatcaaatgcaatctgaaccaaccgatagagtagcgagcaaccgcaacaaaaaccctgacaaactgtcccagtaaaagtgagagtgtgtggcgtgcggagttccaggatctcagccagagtcggatcacccaccggaatccaga

SEQ ID NO: 7181 - DNA, 556 bp, DROSOPHILA
atgctgtgctacgtttcgctgaccatccgccgcctgcactcgctcgctccgcactgccaactggatgctgcactggacgcggtccactggccacttgcccctggcccctgtccgccatccgccatctggcatcccccctcgccactcatccagatgctctgccgcagcgctgccataaaaatcacccgccaaacaaccgcagcagagcagctgaaacaaaaaaaaaaaaaaaaaaaagaaaaagaaaaaagaagtggaaaacggcagcagcgaaaaaggaaatcgggaagaggaggataagaaccagcagcggcaggaaaaaagagtcagcgtgtgtgtgtgtgtgtgtgcggcggtggaaaaaatctatccgcaaccaaccccactgcatgctgcgtccaccccccgccaacccggcaaaccgcctaccgcccgccaccccccgcacacgaacacaacagagcaaagcaccgcacacacacaaacaacccccgtgcgatgccggcagcagtgggaaatttaaaaaacgcgtttacacgacgacacgagagcggag

SEQ ID NO: 7182 - protein, 99 aa, DROSOPHILA
MLCYVSLTIRRLHSLAPHCQLDAALDAVHWPLAPGPCPPSAIWHPPSPLIQMLCRSAAIKITRQTTAAEQLKQKKKKKKEKEKRSGKRQQRKRKSGRGG

SEQ ID NO: 7183 - DNA, 2510 bp, DROSOPHILA
attcatttaatcgacattttacggccagtcgcaatttaaggtaatggtattgaagcacagccctgctccgcattggaagtcgtaacggacgccaccgacgcactggtagaacttattgcaatcgctttccaaaacaaagaaaccatcttgggcgcactcgttgccaccacttccaccaccgggagtgggagccggagtgggtgacgaagtgggagcagccgttggagcgggagtaacacttccttctcctccgccgccgccgcctccgccacttcctccactcacttccctgccaagagcacgattcatggtcttcagcagtggataggactcgccgcacagaccacggaaatcatccgtctcgatggaccacatcatggcaccacccagattgcgggactcgaccaactgcatcttcagctggatgctttcgggattgtcatagccgatccactgatcaccctggaaggcatatggagcaccgttctcctgatcgaacacggtttgccagttgttcaggcagatctcgtggtagcccaggaatccgttctcccgcgtgtagacgccagcagttccgggaccaatgcacgcagcaccgggccagttctgtgagctatcggacatctggtagctgtggccatagaagccaatgccaaggataagcttctcagcgggagcacctaggtaggcatgattcattagtttaataactagagttcgcggttggttaactcaccatgagaaagccaataatcaatagattcggcgacttcgggcagaggagcattgagacccagatagccatccagagccatgtggaagtcgtaggtcataacgttaatgaaagtcaagtgctgcgaaatggccggaatgtcgtatgagatgctggccgatttctcggacgcaccgacagcaatacccagctccaagccatactgatcgtagctgccgaggattaatacatgttattgagttgccaggaattagagaatccacctacgtctccttaatctcgcgcagcagagtaacaaagttctcgcgatccgcttcactgcctccgcgctgaccagggtactcccaatccaaatccaagccatcaaagctatactgctgaatgaaggccagggaagtggagacgaaggtggcacgcttggcaggatcggctgccatggccgagtatttggtggaaccttcattccaaccaccaaccaccgccaaaatcttgaggtttggattgcgctgcttcagagcaattgtctggctaataaagcctatgtggaaataccatttcattaacttttcctagttgcaaatagagaaagatatagcttacccagaccatcgtccatgtccagccaggtgtccagggacttgaactcgccggcatcgctgattccgaaaaaggtgtagctgatgtgggtgcacagggagggatcgatatcggagggtgtgaactttccatctccgggacgatagttggcccacgtgccccagtagcagttaagcagctctgcaggatgcgaaggatccaataagattccaattccccaagcaaattccatcaactactcactctcgctgctggccacttgtccaaggcaaaggcaaagagctgccaatgcccaaatcgatactaacttcatcctgcacttcgtaggttaatggtaacaatagctattcgtatcatgtttccgtgtttatataggccgctccccagcaaatttcttatcgccagaacatcgacagcgttgataaatcgccacttcactttggaaatcgctgaaatagaaaacaaaagtctaatatattgcattcggtgaggaaactgaaacgacaagtgacctatatctatactcgtacattatattaagcatataaatctcaatttattgcctcaattttaagtgcatcttgagatttgcagaacgccaagcgtatcgtataccacactcgaagaatcattttatcatcgtcctggaatgtgactcatactgttgctagctactcattcaggcaactcatgaagtgtaaattaaataaataaacttgtattcaatgaataacaaaagaagcatatttattcattcatgatttatactttttactagaaatgtagaactactgtcatcacatgaaaatataacgcacttttgtagatatgggtaattggatttaaatctgacatcaaaaattacaatacttgagaacttttacattattatgatgttaaataaaacatattgttgtaaagttatatatatatatatatataatcataactgaaatacatatactctacgactaaacagaaatttacacaagtaatcaattaatatattacttattctcattcaattgaaggattcaaaggattctggaacaggatactaaatccctataaaattattcttattatttgcttttctttcgaattcatttaaagtttgttacggatttgtttacaaccagtttaaaaggtttccatattgatagatctggttttcacttaa

SEQ ID NO: 7184 - DNA, 448 bp, DROSOPHILA
agctgcttaactgctactggggcacgtgggccaactatcgtcccggagatggaaagttcacaccctccgatatcgatccctccctgtgcacccacatcagctacacctttttcggaatcagcgatgccggcgagttcaagtccctggacacctggctggacatggacgatggtctgggctttattagccagacaattgctctgaagcagcgcaatccaaacctcaagattttggcggtggttggtggttggaatgaaggttccaccaaatactcggccatggcagccgatcctgccaagcgtgccaccttcgtctccacttccctggccttcattcagcagtatagctttgatggcttggatttggattgggagtaccctggtcagcgcggaggcagtgaagcggatcgcgagaactttgttactctgctgcgcgagattaaggagac

SEQ ID NO: 7185 - protein, 51 aa, DROSOPHILA
MESSHPPISIPPCAPTSATPFSESAMPASSSPWTPGWTWTMVWALLARQLL

SEQ ID NO: 7186 - DNA, 4265 bp, DROSOPHILA
tactcatttcctcaatctagttgatctcgatccattaacagctgaaagagcatccaccagtcggcctgcgaacccctagttcttcgtttggcttttctgcctttttccccaatttcagcagagactggcagccgtcgactatttttatttataggcttgtaatgcccctacggactcggactctcagatattggcaagagcgctctccgcacacgtttctgccgtatgatatccgccatcagccatccgccttgtgcagcagctattacgacttttcacagagacccccataaatatgcatttggctactattttacctctatatgtctaggccagaacttttataagctacctatgtgtatatttaaaaatgttgataaatgacaatgcagccaggaattttgatttattttgggactggcaaatctgggtttgatgcggttgtcaaccgctggatattgtctatttaggaactcggtatatggtaatggttccagattccagcaatctcaagcaatcaagcgaagtgatcatttaaaaacaaatacaaactgcaaaataatgttttttaacacttaattgccttataaatgataacttttattgcataatgctctggccaatcttcctttataaaaaagggatattaaagtaaaaacaggcaaaatatattgaattcaaatgcattttgaatcatttcatcaatcggcaaaacactacttatgctgcctcttattacacaaccatttgccaattattcattttttcataatttcaaattgcgtaataacaaagagaagacatcgccacccttaacatcagatcaatcacctagccagttcctcctaaaatctctacgtcacgaaagtatttaggtccaaaaatagagccacaactgaaagttatcacatacattactatttacttgcgttaacatttagtatattctaattgacaactaaatatgtacatatttcaaagtcagctctcgtgtaagcatttacgttttggtggagaaaaggtaggaatccttttgaccagaagtcaatttcgcagcattctcactgcccacaatgttactcaagcttagcagatcgtactttgtgtacaggatactgacggacatttcgtccccaaatccatcgcgcggattttgatttgtcttcagcatcagattgatgatctcggaatagaagtgcggaaagttgggcggctggtacatgatcaagttccggatgcccttaatccgcgtgcgccggaagaagtgcgctctttccgagtacaacagaacagatgccccgctgtggaagaatatatctctcgcccgggaaatcttttctttcttggtgtactcatttatctgcacaaaactgaccatttcggtcttgaaatggttgcgtatccgtacgtagtcaaagtagctgggcacgtatagcatacagtgcgagaaaccgggcttactgaattggggcataatattcttgacgaagtactggaaccgatcgtcgaaggtcgtctccacactggagcaattgattaggcggaaaacctgatgtattggagtcagaacgttccggatgtctccgtgctcgacgaggttcgagtctcgcacctttccctggtagttgttgcacttgctgttgaacactgcccggaactcgggcagctcgtgggacgagaagaacagggtttggcggtagaaacttgacgctccactcaggcaccacgttcgtaccctctggcaattcgtatcgggcagcttctgcggctgcaggtgcaggtggtccagggagtgcagcaggttctcccagttctgcgccaggaacaattcggcttggtcgattatcagcagttcaatggagttcaaaaagtcaaaatcgctctccttgtccgtaaccagcattctcagtcccaagggagacgcgatcaacatgtccgatgcgttcatatcggagaatagggacatggttttctttgtaaaacgaatacctagtttgaagttgtcatccgtgttgccactgaatgtttgctcataatccattggctttgggttggttttggggaagtaaatcgtattcccggagtaatctcccaggaagcgttcatagttcgcgatcgaggttttcctggcctgatctgtgaaggacatttaatggtaatacaggttctttgctatcaacgggtgacttaccatcttgactgccaaagagtagatctccgagtatatttacaatccttagagccgattccctgaagggcactacaaaaacgaccttcatccgcttaagcccttggtccctgaagctctctggtatagagatttcgttgggcgacattttttgtgacttggccaaagccgaaaccttttcgttgttgcgcaatatcagtgatctgactttcagcatgtggttcagggcgtgcaggcagtatacatagcgaatatcctcggcattgccatgagttcgatggggatagtatatatcttggtagttattggcgatgtagaagagctgggactgcagggcagtgagtggcagtttggcgtttgcacaaatggacgccttcacctccaacttttgcagatcttccgtgcttgcaatgtccttgggctcgctgcagtcgggctccttgaagtcctcagtcagtcgtggtatatcgaaccttacattccccagagcggaccagttcctcttgattgttttaacatcctttctcgcaatcaaatcgttgatattatccgtagatagctcaaaatcgaagcgtttcgaaaacgaattgtatatttccaagtcgacacctaactgctcggaacgcttttcctttttgggtttgatcttcctgggcacgggaataacgtgatcctcttccttctctgcttttgagcgtaggatgtcacctggaaacgatattcttagttagtcatgggcacatttttgtccattgcaagggctacttgtgggtatgttattaacaccagttatgagctttttatagaactcagtctcgtccacatcatcctggatctccggcaacagctccgccacgggctcatattcctgtttcggtgctgtgggcattcgttccctgcggtgggactcctccatttgcttgctcctctggatgaaactgtagttcttcgagaatctctcatttcgccgggcgggcgttggtttcttgtagggcttcgccctgttcttcgagtgtttttgtttcattttaaactgtttgttaccgagtatctttcgcacacacgtgtggatcaacaaacatctggattggtgaaggaatccgatacacagacatatcgatagctcctagagatggcgtgtggtgaatttaaagccggtaaagctaattcatttgaaatttataatctaagccatgtttttttaggaaatcacataaatttgctatgaaaccccagtaggtgaccaacgatgaattgatttctggcatataaatatcaaaaaattgtctaagatatgacttttgaagcggtcaaatatggtgattttccgatttgaagtactgggcgaactgaaatctcagtaggtgaccagcctagtccaagtaaaatcaatatcattgcactagaaaaatcatctaaaaaaaatgcatacttttaaaattatcgttagtttacgaaaattttcttccgacccaaaatgttcagcgctttctgtacaagaacgaaagtatgcacttatttattcgtccaattacaagtagatggttatttatatttaacaagctattcacctaagattagcttgaataccttatcatcacagttaaagattaatgttagggagctagtttaagtctgcttaattgtcaggaatccccctgatggccccttatatcgattcctaaacccaagttggggctgttcagtatttttccagagccgggcggtataaattgccgctccagtggcggtcttattgcattgaagttgggcaatgggaagtgatcgcacgttaaaaaagcaaaagatgtcggtattacaggaactcaagaaaatcaccacaattgtggctgacaccggcgactttgaaggtaagtacgcacgcaaggtatttttcttaacaagatgagtccgatttcaaagctagcgtaagtttgcctcaaaagtgggaatccagaaatgcaactaaagcgaaatgcgagtctgagctcgaacatccatacatatatagagcatacatagaatccgagtccaaagatacataggatacatggatttatccaaaagataaacatta

SEQ ID NO: 7187 - DNA, 2153 bp, DROSOPHILA
tgttgatccacacgtgtgtgcgaaagatactcggtaacaaacagtttaaaatgaaacaaaaacactcgaagaacagggcgaagccctacaagaaaccaacgcccgcccggcgaaatgagagattctcgaagaactacagtttcatccagaggagcaagcaaatggaggagtcccaccgcagggaacgaatgcccacagcaccgaaacaggaatatgagcccgtggcggagctgttgccggagatccaggatgatgtggacgagactgagttctataaaaagctcataactggtgttaataacatacccacaagtgacatcctacgctcaaaagcagagaaggaagaggatcacgttattcccgtgcccaggaagatcaaacccaaaaaggaaaagcgttccgagcagttaggtgtcgacttggaaatatacaattcgttttcgaaacgcttcgattttgagctatctacggataatatcaacgatttgattgcgagaaaggatgttaaaacaatcaagaggaactggtccgctctggggaatgtaaggttcgatataccacgactgactgaggacttcaaggagcccgactgcagcgagcccaaggacattgcaagcacggaagatctgcaaaagttggaggtgaaggcgtccatttgtgcaaacgccaaactgccactcactgccctgcagtcccagctcttctacatcgccaataactaccaagatatatactatccccatcgaactcatggcaatgccgaggatattcgctatgtatactgcctgcacgccctgaaccacatgctgaaagtcagatcactgatattgcgcaacaacgaaaaggtttcggctttggccaagtcacaaaaaatgtcgcccaacgaaatctctataccagagagcttcagggaccaagggcttaagcggatgaaggtcgtttttgtagtgcccttcagggaatcggctctaaggattgtaaatatactcggagatctactctttggcagtcaagatgatcaggccaggaaaacctcgatcgcgaactatgaacgcttcctgggagattactccgggaatacgatttacttccccaaaaccaacccaaagccaatggattatgagcaaacattcagtggcaacacggatgacaacttcaaactaggtattcgttttacaaagaaaaccatgtccctattctccgatatgaacgcatcggacatgttgatcgcgtctcccttgggactgagaatgctggttacggacaaggagagcgattttgactttttgaactccattgaactgctgataatcgaccaagccgaattgttcctggcgcagaactgggagaacctgctgcactccctggaccacctgcacctgcagccgcagaagctgcccgatacgaattgccagagggtacgaacgtggtgcctgagtggagcgtcaagtttctaccgccaaaccctgttcttctcgtcccacgagctgcccgagttccgggcagtgttcaacagcaagtgcaacaactaccagggaaaggtgcgagactcgaacctcgtcgagcacggagacatccggaacgttctgactccaatacatcaggttttccgcctaatcaattgctccagtgtggagacgaccttcgacgatcggttccagtacttcgtcaagaatattatgccccaattcagtaagcccggtttctcgcactgtatgctatacgtgcccagctactttgactacgtacggatacgcaaccatttcaagaccgaaatggtcagttttgtgcagataaatgagtacaccaagaaagaaaagatttcccgggcgagagatatattcttccacagcggggcatctgttctgttgtactcggaaagagcgcacttcttccggcgcacgcggattaagggcatccggaacttgatcatgtaccagccgcccaactttccgcacttctattccgagatcatcaatctgatgctgaagacaaatcaaaatccgcgcgatggatttggggacgaaatgtccgtcagtatcctgtacacaaagtacgatctgctaagcttgagtaacattgtgggcagtgagaatgctgcgaaattgacttctggtcaaaaggattcctaccttttctccaccaaaacgtaa

SEQ ID NO: 7188 - protein, 700 aa, DROSOPHILA
MKQKHSKNRAKPYKKPTPARRNERFSKNYSFIQRSKQMEESHRRERMPTAPKQEYEPVAELLPEIQDDVDETEFYKKLITGVNNIPTSDILRSKAEKEEDHVIPVPRKIKPKKEKRSEQLGVDLEIYNSFSKRFDFELSTDNINDLIARKDVKTIKRNWSALGNVRFDIPRLTEDFKEPDCSEPKDIASTEDLQKLEVKASICANAKLPLTALQSQLFYIANNYQDIYYPHRTHGNAEDIRYVYCLHALNHMLKVRSLILRNNEKVSALAKSQKMSPNEISIPESFRDQGLKRMKVVFVVPFRESALRIVNILGDLLFGSQDDQARKTSIANYERFLGDYSGNTIYFPKTNPKPMDYEQTFSGNTDDNFKLGIRFTKKTMSLFSDMNASDMLIASPLGLRMLVTDKESDFDFLNSIELLIIDQAELFLAQNWENLLHSLDHLHLQPQKLPDTNCQRVRTWCLSGASSFYRQTLFFSSHELPEFRAVFNSKCNNYQGKVRDSNLVEHGDIRNVLTPIHQVFRLINCSSVETTFDDRFQYFVKNIMPQFSKPGFSHCMLYVPSYFDYVRIRNHFKTEMVSFVQINEYTKKEKISRARDIFFHSGASVLLYSERAHFFRRTRIKGIRNLIMYQPPNFPHFYSEIINLMLKTNQNPRDGFGDEMSVSILYTKYDLLSLSNIVGSENAAKLTSGQKDSYLFSTKT

SEQ ID NO: 7189 - DNA, 2485 bp, DROSOPHILA
atggttaatcttcaaacttcaatcggcctgtgctcctacgactgtgtgttgtgtggcgttttgctttgctatgccggtgtatggtgtatgggttgcttctaagtgttatatgttgtgttgtggccaggtcctggcctctggatcccacatcctgatttttagattctagactttggattttggttcaggggcgggtggtgcggctggaccttaacacatagtccacatgtatggatgtagggatgctgggatttaatggctgtgtcgtggcatagtgctggggattatggtgctggtgtcttggagaacttattgttctccaacgccaaacgcctgcccatctcctgctcttgaactatgtatatgacctataacttcgttgaaacaacaacaaaaacacaacatgcaacaagtacatcaatgtaagcgaatacatacataaatacattcatctgggcatttttactctggtgcatggggtgtacggttgcccgttttttggttttttgctttatgttttttatatgggggtgcacaagttacttatacgtcttttgatttgtgtttcgattcgatactgtatgctttcgtttagttttgcttccgataatttgccctgcgttctcacagacaacacataaagtacatcggatgcggatgctggatttgtgcaaacacatatttgtgtacgacaattagatgatattaaatacaagtacgctgtgagttagtccgtgctcatcctaacaaacgaaaaggtgtttgccattcatattcaatcattactatcgtctcgtttcgttctcatttgtcaatgcctccaacgtttctatatcggaattggatttggatttggattcggaatcgtagtccccacatattatgggtatgggtgttgatgggcctcgactagtctggtccgcaatctcagatataaaaatctcaactgctccgattaaatgtcaattttagcttcgttccacgccaatttccagttgtgttaaagtatctcggtctcgtacagctgtttagtggtcgttgtggcggtctggtgttgggagttcaaattcaaattcaaattcgagttcgagttcgagttggagtgtgcagcagcagcgctcgcaccagccgcccctgcagctccagcaccaccaccaccgccgatcgcaccgctcgtagcatcactggccaccacgccgccattggtagccgcagcagcagccgccgctgccgccgcagctgcggctccactagtctcacaggctagactcaatgcggctatcttctgctggatgtttgtctcgctgcccagcttccggagtgtattgctgccacttgcgatgtcctgtgcagaggaggaggaagaggaggccacatccaccgaaggcagcttgctcatctgctgcaaccgctggtactgctcctgcagcatcttttgcttcttgagcagctcctggtggcgcatctcgagggccacctggcgctgcacatgatcgttgccggactcgttgccgctcgagttgtccccgcttgaggtgtcgccgctaacgacggacgtagtctcacccactattcccttgtttcctgtggcattgctattggcattggcattggcattggcgctggcatttgaattggaattgggaatcaaattgactgtggctgcggcagcctggtttggtggcacgttcgggctggttggactggccagtggactgcgtgagctggtgcgtggcggcggaggtggcgggatgcgcttgtggcccaccttggtgatcaattcagcgtttcgctcgggcacgggtggcttgctgctgctgccgccgttggccaggctggtcgaggacgaggtctcgctggcccgcgggccagtcggtggcggcccaggcagttcgccatccgactcactgggataggagtgcaggcgtcgcaggctgcccatgttggtgtgcaccatcagctgtgcctgcgactgcgactgctggtgggtgagcactcctcgctgggcttgagcttgggccgaaacagttcccgaggcgacagcgatgaccatgctgccggtggtcgcttgctgcacattgacgctcgcctccgtgtagagacgggcctgcgatatttgcgtggtgacggtgctttgtactgcggcctgggcgctttcgtcggatgccgagtcttcagggcgaatctgcggagggagacttggaccccatgagtttggctggggatgggggacgcgcttggtgagcacacttacctcgtatagttgctggtgctggtgctgctgctgttgttgctgctgctgttgctgctgctgctgctgttgttgggcgatgggcttggagaatgtcttgagctcatctagcagagcatcgagtgcgttttcgggtgcgagtcccccgctgagagcgaacgaccccatcctgggtgttgggattggctacaagaacacacaattaggcggtaaaacactggcactaatgagctc

SEQ ID NO: 7190 - DNA, 1350 bp, DROSOPHILA
atggggtcgttcgctctcagcgggggactcgcacccgaaaacgcactcgatgctctgctagatgagctcaagacattctccaagcccatcgcccaacaacagcagcagcagcagcaacagcagcagcaacaacagcagcagcaccagcaccagcaactatacgagattcgccctgaagactcggcatccgacgaaagcgcccaggccgcagtacaaagcaccgtcaccacgcaaatatcgcaggcccgtctctacacggaggcgagcgtcaatgtgcagcaagcgaccaccggcagcatggtcatcgctgtcgcctcgggaactgtttcggcccaagctcaagcccagcgaggagtgctcacccaccagcagtcgcagtcgcaggcacagctgatggtgcacaccaacatgggcagcctgcgacgcctgcactcctatcccagtgagtcggatggcgaactgcctgggccgccaccgactggcccgcgggccagcgagacctcgtcctcgaccagcctggccaacggcggcagcagcagcaagccacccgtgcccgagcgaaacgctgaattgatcaccaaggtgggccacaagcgcatcccgccacctccgccgccacgcaccagctcacgcagtccactggccagtccaaccagcccgaacgtgccaccaaaccaggctgccgcagccacagtcaatttgattcccaattccaattcaaatgccagcgccaatgccaatgccaatgccaatagcaatgccacaggaaacaagggaatagtgggtgagactacgtccgtcgttagcggcgacacctcaagcggggacaactcgagcggcaacgagtccggcaacgatcatgtgcagcgccaggtggccctcgagatgcgccaccaggagctgctcaagaagcaaaagatgctgcaggagcagtaccagcggttgcagcagatgagcaagctgccttcggtggatgtggcctcctcttcctcctcctctgcacaggacatcgcaagtggcagcaatacactccggaagctgggcagcgagacaaacatccagcagaagatagccgcattgagtctagcctgtgagactagtggagccgcagctgcggcggcagcggcggctgctgctgcggctaccaatggcggcgtggtggccagtgatgctacgagcggtgcgatcggcggtggtggtggtgctggagctgcaggggcggctggtgcgagcgctgctgctgcacactccaactcgaactcgaactcgaatttgaatttgaatttgaactcccaacaccagaccgccacaacgaccactaaacagctgtacgagaccgagatactttaa

SEQ ID NO: 7191 - protein, 449 aa, DROSOPHILA
MGSFALSGGLAPENALDALLDELKTFSKPIAQQQQQQQQQQQQQQQQHQHQQLYEIRPEDSASDESAQAAVQSTVTTQISQARLYTEASVNVQQATTGSMVIAVASGTVSAQAQAQRGVLTHQQSQSQAQLMVHTNMGSLRRLHSYPSESDGELPGPPPTGPRASETSSSTSLANGGSSSKPPVPERNAELITKVGHKRIPPPPPPRTSSRSPLASPTSPNVPPNQAAAATVNLIPNSNSNASANANANANSNATGNKGIVGETTSVVSGDTSSGDNSSGNESGNDHVQRQVALEMRHQELLKKQKMLQEQYQRLQQMSKLPSVDVASSSSSSAQDIASGSNTLRKLGSETNIQQKIAALSLACETSGAAAAAAAAAAAAATNGGVVASDATSGAIGGGGGAGAAGAAGASAAAAHSNSNSNSNLNLNLNSQHQTATTTTKQLYETEIL

SEQ ID NO: 7192 - DNA, 2737 bp, DROSOPHILA
ggccctcacgttcgacatgaagctggccaaggaaaccgcctccaggccgtcggacagcaagatccggcggaagctctggcttcgcataggtttgttgactcagagctctgccctcgtatcgttcatttatcggcccttgtctgcttgcagcttatcacgacataaagggaaccaacgacgtcaaaaaggcattgaatcttttgaaggagtgcgatctcttacgcatcgaggacctactgcccttctttgcagactttgaaaaaatcgacaacttcaaggaggcaatctgtgatgctctgagggtatgcgcaatccaaaataaatataggttattccattaccattcggttccattgctcggcaggattacaatcagcgcatccaggagctgcagcgtgaaatggccgagactacggagcaaaccgatcgcgtcaccgccgagttgcagcaattgcgccagcacagcctcaccgttgagtctcaggatacttgcgaaatttgcgagatgatgctgctggttaagccctttttcatcttcatctgcggccacaagttccacagcgattgcctggagaagcacgttgtgcccttgctcaccaaggagcaatgtcggcgcctcggcactctaaagcagcaactggaggcggaggtgcaaacgcaggcgcaaccgcagtcaggtgccctgagcaaacagcaggcgatggagctgcagcggaagagggcggcactgaaaaccgagatcgaggatattcttgctgcggattgcctattctgcgggctgctaatcagcaccatcgaccagccgttcgttgacgactgggagcaggtgaatgtcgagtgggagtagttcgctaccaccgtcgttcagacccaaatatttatgtacatataaagtatttattattataaataaacctacactgatcacaaaggtttcgactgagatagccgtccaaattctacagttacctggccatcgcccacttgcccgcagagcaggtcagtccacaatctgcatgcgcaactcgttggtcacgaatgacatgacagtgttaagcacagcctgctgaatggaggcgttctggacaatcagcggcagcagcatcaccacgtcggtgggatgtatgtcggccacggccatggttacgtgctgcaccagctgctctcgctgtgcgtccgtcaggtcgtttaggatgacttcgcccagcggacggaatgtgcctgttcgggaggagggaagtggaaatgtagtgagactgagtacgggagttctcctccgcttaccgcttgtcatcttgtaggcggcgattccgccggcggccccgccaaccgccagcccaacggggcccaggagcatgccacccgcaaaggagcaggcggcgcagattgccgctcccttgccggactgcttgacggcgacgcggacgttgcgctcgtccgctacgatggctatcgcctccatcaactcgcgcgtatctatgggcatatttaggctacgtggagttggcccgaatttcgcaacgctatgctagtatttcctgtttagactttgttccgtgcggcagtatgacgtttccgattacgccacccgttccgtttgtatcctgccttttagtgttggtcttgaattctccaacttgctactcgacaacataaacaatttcacggaatccgcttgaagggaactattaaaaagcttatatttgacttaaaaaacagcaacttgattaaacttgtgagcgccagattcagagatgcgcaaacggcggtcacaatcgacgtttatatcgatatatggccttaacccttatgtgttaacccattcctgttatgggtcatacattaaatttcttatattaatcctataggttattactgtcctgttgctaagttaaagatgaacaataaattaaatatatatgtgtttattatataaattgattcaacggattacgtttgccaactatcgaatcgcagtgcaaacgatgtcactgtatcgataagtcgattgcccgcggcgaacagagcatttaacatcagacttaacagcgagtgctctgctgcgctgcgcgcacttaacatttgcattttgttttgttcgtagtttatcaattcgagtcgagatacttttgtgtttcacctacgtatcacacccgaccgattcttcccatgcacggatctgtggcagatcacctggcggaccgaacgagcctgcagaaccgcccagaaagtagctcctctccgctgggactgggatgtgcgcaaagcatttaaattgtgaacacttccgtatgattgcgattcctcggatgtggatgaccgctccgttcccgcgccacctagtcgaggagtaaacctgccagggagcacctagtggaattcatttcggaggcgacatgctcgcgtacacccacgtaagtccaatgcgcatgcagctctgctagtgtatgggtgtacctgtagcaggaggggtaggggtatggacatgggcatgccgatactgatattgtgtttataatctcgaaagcactctaaattgctccgagggaggggtgctgctagtgaggttatactacccatggctctatattttataccacacccagttattatactcatacagcataggtatttctcatattgtagttgtgaaaagaagcgcatttgccttgaaatcagaggccatctttagttaatcctcgtatcctcacacgctatggaacatttaagccaaaaa

SEQ ID NO: 7193 - DNA, 674 bp, DROSOPHILA
acaagtttaatcaagttgctgttttttaagtcaaatataagctttttaatagttcccttcaagcggattccgtgaaattgtttatgttgtcgagtagcaagttggagaattcaagaccaacactaaaaggcaggatacaaacggaacgggtggcgtaatcggaaacgtcatactgccgcacggaacaaagtctaaacaggaaatactagcatagcgttgcgaaattcgggccaactccacgtagcctaaatatgcccatagatacgcgcgagttgatggaggcgatagccatcgtagcggacgagcgcaacgtccgcgtcgccgtcaagcagtccggcaagggagcggcaatctgcgccgcctgctcctttgcgggtggcatgctcctgggccccgttgggctggcggttggcggggccgccggcggaatcgccgcctacaagatgacaagcggcacattccgtccgctgggcgaagtcatcctaaacgacctgacggacgcacagcgagagcagctggtgcagcacgtaaccatggccgtggccgacatacatcccaccgacgtggtgatgctgctgccgctgattgtccagaacgcctccattcagcaggctgtgcttaacactgtcatgtcattcgtgaccaacgagttgcgcatgcagattgtggactga

SEQ ID NO: 7194 - protein, 140 aa, DROSOPHILA
MPIDTRELMEAIAIVADERNVRVAVKQSGKGAAICAACSFAGGMLLGPVGLAVGGAAGGIAAYKMTSGTFRPLGEVILNDLTDAQREQLVQHVTMAVADIHPTDVVMLLPLIVQNASIQQAVLNTVMSFVTNELRMQIVD

SEQ ID NO: 7195 - DNA, 2878 bp, DROSOPHILA
acggactcaccagtccgctcctccacatccgagaacttaggagcgttgcacatattgcaggtttggcgacgggcccagttcacattcgcgcatttgctgcactgccagtcctcggcgctgaacaagccccgcgacttgtcggccgccgccttgccgatctcggtgcccagctttttcttgcttgagctgctgctactgctgctgctcccgttgccgcgttcccgctcccggtctcgatccctgtcgcgctccggcttatcactgccatcgcggtcccggtcgcatttgttgcactgcaaacggcgggcgaagttcagatggcgacagctgcaaaatcgagggaagtgtgagactcgcaggacttctcacttggccgctatcactgcatctttacgggcactcactcgtaatctgggcaaatccaatcgccaggcgaagcgacgccgctgcttcccgcggcccctgatgccacgcctccatttgaactggacatgtctgtgccttggctgcgtcctctgccaaaggataatgctaacgggcgtccaagtgatcctccttaggcctcaggagcagcatttaacagattttttttaccaatattatattctgtatacggtacgaaataaagtggtcaaaacatcgataccgttatcgatagtctggcttccgatgcaacaatcgataggtcattcaaattgtatttggggtactccaaaacttattttggaatttaattgcaattcaattgaaaatatttgggtaggtaggatttccagctttcaacttatttgcgataaatcgcaggtttctaagctgtaaacattttccttgtaaaaataggccaccaaaggagtacaagagatcaacaaaagttattgacaacaatctgtgattatcgccactcttcaaatagttttgcatataaaattggtccagaaacacttcaattaaacaactattgcactcgcgcctttcccagacaatgaaccacaagaacttgtatacttttagagttttatttccttagtttacaaacaaaagccgctccaaaagtaaacactgattttgttttgtcggttgttgattggttggtaaagaagtttgactaacgcataaccagcagcttttgggaatagcaggcgatgcccgcagacgagctttcctccatcaggcttacttcttgccagtgccgatcttggccttggcagtaccgcgcaccttcttcatcctgttgcgacgctccttgcgctgcttgcgggtctgcttcttctgttcgaagaggccgtgacgggccaggcggtacttgggctcgaacttcttggcgaagtccagggtgtcgtagatgagggcaaagccggtggagcggccgccaccgaagttggtgcggaatccgaaggcgaagaccacatcgggggtgaccttgtacatggcggcgagcttctcgcggatctcggtcttgttcaccgacgacaatcctgggtggaggacatcgcagaccatctgtttcctggcgagcaggcggttggtcatgaacttgcgggtgcggatggtagcggttgtaccggacattttgacggagctgcaaaaggatggtagaggtttagcttgggcctttcattcaaacaaaatgctcgccagtccggattgtttttgtcgcttttgagcgacacaacataacctcactggcagtgggtgctccatgtctccacgtgtgacatgtttctgcgctcattcgccgtccacggacactgccctcaatcacggagctataagcattttggtggcggtctttgcctgcatttttaggcagttctgagagtaatttaccttttaaaacacttgaaaaggttttaaacacgtcgttttgcgaacgcgatttattagaaaggaagatggccgtttcagagatggaagaaatggcgatgattcgatactatcgatatttaaagactatcgatatttttcgtccaactgttgttgccagatcgtagtgtatatttgaataataaaaaatcttaagtaagttatgttaatctcaatacactaaattgtaaaatcacctattttaatatcgatcgagtatcaaaatacccaataagcattagtcaatagtctactcataaagctatgacaaatttacgtttattagttttttttcctttgagcgccaaattgagttacgattcgctattaacatgttttggtcaactttatttttctttgttcccaaatcaatataattataattataattaatataattattattttgtacgaaaaagaagccaacaaatcttgactttcttgaatggcagcaaccaactttctgatgattcagcttttctttcattcatgttcttgagaatgcattcttatttttcataaaaaactgctcagaatgcactttattcaaaactttaaacctaatttactttggtcgacttggagttgtttttcttattccaaatataaaagccgccaaaactcagggccaccagtaagcttacgactaaagtagctattccggcatagaacacgaagaggtcgaacaggtgcagctggcaggaggagatcccaatgcctcgggttctcaaagccgatcctcccttgtgccgggccacatagttcacccagaagagagcgctggccagagcgccaagaggacggtccctgaactccagagacacatcccggatggtcaactggaagtgtgactcgaggagtagcctgtccactgcccagtttagtgactcagttgtcacattgccctcctccagctgtaggccaactcctaatcgcacggctagctccatgttccgagcttcatgctggaataggggcaatcccagaatgggcacattccgcatgatgccctcct

SEQ ID NO: 7196 - DNA, 630 bp, DROSOPHILA
aatcgcgttcgcaaaacgacgtgtttaaaaccttttcaagtgttttaaaagctccgtcaaaatgtccggtacaaccgctaccatccgcacccgcaagttcatgaccaaccgcctgctcgccaggaaacagatggtctgcgatgtcctccacccaggattgtcgtcggtgaacaagaccgagatccgcgagaagctcgccgccatgtacaaggtcacccccgatgtggtcttcgccttcggattccgcaccaacttcggtggcggccgctccaccggctttgccctcatctacgacaccctggacttcgccaagaagttcgagcccaagtaccgcctggcccgtcacggcctcttcgaacagaagaagcagacccgcaagcagcgcaaggagcgtcgcaacaggatgaagaaggtgcgcggtactgccaaggccaagatcggcactggcaagaagtaagcctgatggaggaaagctcgtctgcgggcatcgcctgctattcccaaaagctgctggttatgcgttagtcaaacttctttaccaaccaatcaacaaccgacaaaacaaaatcagtgtttacttttggagcggcttttgtttgtaaactaaggaaataaaactctaaaagtata

SEQ ID NO: 7197 - protein, 131 aa, DROSOPHILA
MSGTTATIRTRKFMTNRLLARKQMVCDVLHPGLSSVNKTEIREKLAAMYKVTPDVVFAFGFRTNFGGGRSTGFALIYDTLDFAKKFEPKYRLARHGLFEQKKQTRKQRKERRNRMKKVRGTAKAKIGTGKK

SEQ ID NO: 7198 - DNA, 10318 bp, DROSOPHILA
ggctggggagtccaaatgcccggctgccacgtttagggactacggcaatcgctgtcaactgtggcccgccacttagcagcatcccatcctctggcctgctcttccgcagtttgaacataccacactcatttcccaccagcatggaactggaactggcccccaaggcaaatcgaattgaagcagatcaaaggcagctgcagctgtgatgatgctgctgctgatttttattgccactgatatttattgtggtacgaatatgaaaccggaaacgctcgactaacattctttgggtcagcctaggactcggttccacattcttgctggttcccttagattctggccattgtattcccggtgtactcaatcaggttcaagtagtacatggctatgcccattgttcccgttttttttttggggttgtttgtcacgatctttttgaaatgatgaggtgtaatcattgctggattgggtaatgcacaaacttgacccacttatagagccagcgagttatgacataataataaaccagatctaaaaagaatctcgctttctttcatctagagcagatgaagaccttgaagcgtccggaaaataccctgattgccattgcccacaatgcgaggatgatcagtgcagtgtccgcacaatgcagccactaatggaaaggaaataatcgaaagttgagccccagtaactggaactaccataatgagttcctttcattgcactcctcctagcccggcagagcgaaacaaggcgcgacaaattacgcggccaacgctgcgtatgcgttacgtgaaatgcgatgggccaaaggcagcgcagtcggcagaagcagcggcttttgatgaatgaaagtcaaccctcggcagcagcagcacacacacccgcaactcggatgccgacgtcgccgtcgctgccagcgtgcaatttgcgcggtagcttgctatatttcgaatttgatttcgatttagtttctagtactgttttacaaaccgacgagtcaggttctactgccgctgctagcagagccgaccagaccacatcgtcagaaatcggattcggaatcggtgtgtgggatcactgcctgatcagaagtcagttgccatttagccgcgtgctcgggaccacgcgctcctccgatcctcccccgtttcgattaggggtcgtgcctgaagggttcttgaatacgtcgggagttgttccccagcctgcggcacatgtgaataaatttgcttgtaagttctacggtgattgctggcagataatcaagctatcagataatcaaactatatccgatatttaaagaaatctgtaaacttgacataaaggaatcctgtgccttgaatattgtgaaatccttcaaataactcaagagaatttacgttagtgttttcaatatttatatttgcttccaagtgagtgtctcttgtgagaggaaacgctttttgttgccgggtaatgtgtatttagtcgctgttttgctaccctgtaataaattaaattataaaaaaaaaacatattttacattttgtttattcatgttatttatttttaatgaagccataaaatatttaattcaatagatacattagacaatttgagaaatcgtttggtagagcaacagctaaaatcttagtatcttagatgataacagtgtgaaaatcataaggaacatatcctaggatcagtaaattattgcttataggctttctgaactttcaagaggatgagacgcagtgtgcttcccatccagtatttatttacttgacatctaatcgatttactctttctgagagccaagggacaaacgtgaataatttccgatttctaaggctgataaggcgctgaacaacctcccgaataaccttggtagaaacgcccacccacttttgcataggcagagacgtgtcaaactgttaccacggtttttgtgcatatgtttcgctttggttttaattctttttatttttagcacacaaagtgcgatgcaccaaaataatctgctctctcgccataataatgagaaaatgaggaaaagacatggtattaagaaggtgtaattatattattatatgtaaaattttcgcgaatttttaaatcttccctcgcgcatttgccttaattttctcacctaaataaaaaaccgctcataaatcgggcgcgtggaaaaatattaaaaaaaaaaaccattaatatgctccaaaactccaatttacgattaatgattatctggaattttacccgcgtgcttttgcactttttattcttcattttgcggaaccatagtgatcttgataagctaaatctggatgaaagcgtctagctgctgttttgagatagtcagacattcagtctatagattatagcgacaagtgctgttggatgagttgagattatagcgtcatgcagtgtattaaacgtatgtaggtaaaaagcatttaatatatgttttcgattgtattcctaatcatataaaaccaactgaaggtagttttcaataaactgacatcgtgtgttcctgtattaaaaacagactttaaatatcaaaactttccgtcaatttactttaatttctagcatttattaagatatatataaatatatatatatatatatatatatatatatataaatttttagtggtcaaatttggtaattacacattttcatgaaacagtaaataaactcacagcgttgtctaacatatatatatccaataaacggtgataattgcttttatagcccaaacatactactgatttttagttgggctcagatcagctttaactggtttttcctcaggcaatttattagaaaatttcctcacatcaaagacaagtgggtgggtcaggcatctgcccctcataaaccccctttgtccgatcgaacccccgcgaaatgcaaattgatttgcattgacaatgaatttgctgcccctcgcacatgggctctgaattcagtttgcattgcattaattagcaaagtagtaaaagtacttctacatatgttatataagtcatagtctagcgcgttaattagtatgcatccctgggtatacatttgtgttcgtctatcaacaataataaacttgtacagcatttgtgatcatgtaaactgtctgccaatcatatatggcaaagaaatgattcccatgtatactataccaggcaaaatatttctgaaacagaaaacaaaataatttacttgagtctttatgaaaactagttcttgccaacgataatagataggtccaatcaactgaaactgggtgttttataatttcgccaatgaagacaagtttaagttcaccctcgatcacgcggcggtaaatgctaaattgggttttaaattcccattaattatgatgacttctgcatcgacggtccaacttccgtttagtgtgaaacccatcctctaatcaatgaacttgagtgatcaatgaaacttccgctgcaattgaaattcaatgcaactatcacaccattttaacaaattacacatatttacatagaacgcaatgtctgcctacgcctgtatgtagacagactcattcacggtcaagttcaaaatagaaaaaatatgaataaatagtgcatgcattaatgtatacaacaacaatttaatacaactgaaacgcggcttagtaaataaatttagttgggcacgagtgcaactgcccaagtgcattccactcaagtttcgctcaagtttcgctaaatttaattcttatctgtacagccaccttctccctcgaagtgcccaacttaaacgtttcgcaaattaaactattcagataaacacctcttgttctcgaatgcttcgacacagctcattgcacctactaaacacagttcaggccgccaaaaggtttccatatcagtgaaaagcctaccccactccgccacctatcccctgataccatccaacaaacgacctgggcacatgccaatcattcactcagaatcggtttcagtttctggactgttctgtagttacatcaattaggcgaaccacagataccgaacgccaacgaagccgagaacatcagacacataatggcattatcatcgcgtcggcctcccaaagggtgtggagcacccagacaattgtgatcagtgatctcaccggtggtgcggtccattcggctggtaccctgtactttttgacttcttgcaatccgtctgtttgcatttcttagttactctagtaacgcctacgcattgctgatttattttaaatggttctacacctttaaatctatcaatctacactttacacagtatttcattataaagtacaaatttattaaaatctttaaaaatctgctaatttatctattagcaaattttgcaagagcgagtgcacactagaaatatatttagctatttgtgtacattttcatgtcgtcagatgcgaaccgttgacttttattgcattagatgtaactaagagatctcagccacttgttagtcacctctccagtttaggattgctattccaaagtgttgactgtcatcttaatctctcgctgtctgcccgtcaattgctatacaattggctaggcaatttcgaatggccaagattttatgattaatcccaaattgctagtggcgtatcccaattgagaggatattgtgatggccatgatgcaaacggtgtcaatttggttcaatctttgaatcggactctatcggatctatctggatcgctgatcaccgtcgcctcgcttgttgcccttgcacccagttaaggcattaaatttgttttcattattcgatcgtttatgtaaatttattagtttgacacgtttcccagtcgcagtgcagcgattaattgagccgcattcttctgggaaactgtttgctgttttcgcacatttgcgcataattggcaagagtgtcaatgctaaatgagtgctaatattcagcgtaaacttctttgcattgtgttagtttcatttgttagaattaccagcatcaagctctcgcttccgccctttcctctcgaaaagcgttctgaaaaatattccgtaacaaatccaacccaacactgaacaacatccgtccggcttcgtgtcaaaagtaacacccctcggatactgtggaatggtggtcaggggtaaggggttaggggttagatgtgtgcataaatcacaaaagcccagctgcccgaattgactcgttttggggttgtaaatatctgctttgtgcgaaagctcagtcgtcgatcgctggtcgcccggtgaggaggaagcactactgtttaaccccttgaaaacatctggaactagttttacggtttcatcatatatagaaaacttgaaactggagctagattggtgtaactaagctactcttaagaaacaaatagattctattataacaataactatgaaaatactttattttttacaggacatccttttattttactttatattagagggaggagataggctgaggcgacgcattgactgccaatcgtgctttggagtacataaaaaggggtttccagcaggacccagggttgtccagaccctgaaccaatccatagatcttcaccatgacgcgacccaaacaggatggcggcaagttcaaggccttcatgcaggagaatgtccttaccatggccaccgttatcggtgtgtttgtgggtggactcatcggcttcatcatcaaaaatagcactggcgagtggtcgaagagagagatcatgtacatatccttccccggcgagattttcttgcggtgagtaaaaagaagtgggataaattcatcttagttgtatcagattactgaattggaatactataataaataacatatatttttagaatgcttaaatgtttgattgtgccgcttttggtctcatcaatcaccagtgccattggtggactcgacctgagcatgtccagcaagattgctaccaggtgagttgataagaaaaccatatgaagttagatagcccagataaaatggaacttaattcccaccagagccattacttactactttgtgaccaccatatcggccgtgattctgggaatatgtctggtgaccacactgcgtcccggccagggagccaagatcgtggagacccagacggagagcattgataaggcatcgaaggtgctcaccccagacacgcttatggatttggtgcggtatgttgggatctgccggtaactgaacccgccttctgactcattttatttatacccaatagaaacatgttcacggacaacatcattcagtcgaccatgttccaggtaagactctgttccaaggcgaatcgttcatacgcactgttgaacgctaaaagcaacggtagcaattattcaattctttgcggtttggcgagattttgattgaaacaaagcgcgacacataatcaaaactgacatgatagggataccacaatttcaattacaatccagcttcaagtagggggatttcacacaagtgcctagcggtgtgagtgagtgtcagtgcttaaatttcaattatcgcatgtgcgactgcgaatcgggagcgagcgagagggaagcggtcctatcaacacggtttaggaggccccagacgcaaattgaatcaaagtacttagctcggcctgcggcagatatgtggacattgtacctccataattatatgcatatgcgagtggatgttggtgtaggtaggcaaccgaatgaatattcatgcgcccaattagattattgttgactcaatgaaggaaaataacagaaaaaccacaatttcgcttattcagattctaccattttataaaacagataacgaaaaagtctgccaaatcgcaacggatgatgaatgatgggacgattatttctcgaactactgcttttgatatgattaaaatccatattattgtatatataatctatttacacctgctccattttagcaccgcactgagatctatgagaacactagcattagcccagcacgtaagttcttacattggcatcataaactcatcgtgaaacttattcctataatcccctacatagagcctatggaaaactgggagttcaagtcggctcagcgcgagggttctaatgtcctgggtcttgtgatgttcagtgttatcctaggtaccaccattggaagaatgcgggagaagggacaactgctgcaggatttcttcaccacactgagcgaggcaatgatgaccatcacctcatgggttatttggtaacgcgagatgtaattacatatcaccaagaattttaggaaacaattattgatttctttaggatttccccgctgggtgttgcctttctgatagccgccaagatcattgagatggaatcgatagcagcaacgattcagtcattaggatggtatttcataacggtcatgataggtctattccttcacggttttggtaagttatgaacaccgtatacaatgatttaaattaacaattgggttctattttaatttcaggtacgattgcggtgatcttcttcctgggcacccgacgtctcccgtaccgctatattgccaagcttagtcaggtcctggcaactgcatttggaacaggttccagctcggccaccatgccgctgaccatcaagtgtttggacaacatgggcatcgatccgcgggttactcgatttgtcattcctgttggtgccacaattaacatggacggaacggctctctatgaggctgtggctgctctgttcatcgcccaataccgtgagatgagctattccttcggcaccattgtggccgtcagcataacagccacggcggcatcgattggagctgctggaatcccgcaggctggacttgttaccatggtcatggtgctggacacagtgggcttggagccgaaggatgtgtccctcatcatagccgtcgattggctactgtaagtctatagccttcgaatcaaaggatgttataatagcatactgtaatttcagggatcgcttccgcaccaccattaatgtaatgtgcgatgctctaggcactattttggttaaccatctgtcgaagaatgatttggccagcgtggatagggtgagtttgaagcacgactttctaatatctgcatccctcttattaatttttgtactcagctgaatgccgagccccatgagctcctcgagctgggacccaatggccacgagatgaaggaatgaaggcagtcttcgcttggcgcctataaccgcaaacgatgagtggacatgtcccggctgtgggcctgtttccacatcctgcccagcaacgatagcgatagcgatgactacgacgacgacgacgaggagttttaaaggatcgccgcaggatcgtattgtatcagcgctggaaaggagtcatcacgtttgtttgcgaattattttgggtgaccaagtcgcatctaattttcagattgatcaatttgaagcagctcctccggcagaggatagatatctgccagagtacaagtactaagccagcaacgaatttaagtgacacattcgttaaatagtttgttttttccaaaatgaatagatcgaaaagcagcgagaacagcaataagatttaagatgaaaacaacgtaacatttatcgcctaaattagggatactttcaaggtgtacataatttttaaatataattatattaaattgagttcaaatttgcattacattctccctatgattagtattacaattgagcagtaaaattagttaaattccaagcaagcaatcccaactttaagcaattgcatttgattaggtcgcaaattgttgagattcgtatctagtatttgttaaaacatattctataactttttgacatagcaaagcgaaacaaaataattaaaaaagacaaatatttaacaatagaacacagataaattaacatactaataggtgaaaagcaaaaccaaatccaatccaaatcaaaccacaatttcaaatgccgttacaagttcgtgttcatagttgagctttgtaaatacttaatagcttaagtatacatacataaaactttatggaaatatttatatttaaagcgtggaaaccgaattcttggatgacaataatagagtgctgcaatcacacatacagtcaatttatacgagtaacgaattatttataaaatattaataaaactaatataaattaggtcacatcttttcaaaaatcaaccaaatattgacacaaatacacaaaatcaataaaacaaagtaaatacttgaatgtttgccatgctttcagccaaaaaggagaattttttaggttacgaatcaccaaaatgtttgtagttgtgcgtagtctaaatatatgtttactaataaatctttatgaatattaaacgaacttttcaagcattttaacttaaggtatttgggtgaagtttcaattcaaattgatctgttgggtaggttttatttcttatacacaatattatacatcaggcatacaatttttactggatgataagaattaacgatatgtttgatttcatttatcatacacatttaaaatgaaataaataagtttatttcaatggttctaaaatttgttagagctttggcaagtttgcaagccattgaataaaagcttttagtagtttccattggattttgcacagatggcgcatttaataaacttaatcgaaacttaaataatattaatacttaaaaacaaaaaaaaaatgagaattctacccttttatttgatcattaaataatactactaaatattttttttttttcaacgttacttgctattttacacgctacagtttaaatgaaatggtgtttaaattttaacattttcgaaaatccattttgttaggcaactgttgacttcagttttgcctttaaagtcgccatccttttgatctacgtatttagtgtcccatctgcatgtacttctgttgctctgccgaacccttctccaaaaagtaactgcccctaaagaaaataaaaggaccataacagaaaacaatgctccccaaatataaaattggtggccatcaaagggggagagaatccttgatactggggtagcaaggatatgcaggcggcaggttgtcaaaacaaacaaatataataaaataaaacaaagagccaacgaagcaaaagtatatttcgatgatttctcaactttttcttcattcggcttcactagcttctttgtttgcgcagcgtaaaaagttttgaattattgtgttttagcatcgtcttagaaaaacccatcaggcaagttggacctagcatacttgacagcctttattattagataaacccaaaatttttgaaaacggcttaaatatttgacttaagttagatac

SEQ ID NO: 7199 - DNA, 2978 bp, DROSOPHILA
gagtcaggttctactgccgctgctagcagagccgaccagaccacatcgtcagaaatcggattcggaatcggtgtgtgggatcactgcctgatcagaagtcagttgccatttagccgcgtgctcgggaccacgcgctcctccgatcctcccccgtttcgattaggggtcgtgcctgaagggttcttgaatacgtcgggagttgttccccagcctgcggcacatgtgaataaatttgctttttacaggacatccttttattttactttatattagagggaggagataggctgaggcgacgcattgactgccaatcgtgctttggagtacataaaaaggggtttccagcaggacccagggttgtccagaccctgaaccaatccatagatcttcaccatgacgcgacccaaacaggatggcggcaagttcaaggccttcatgcaggagaatgtccttaccatggccaccgttatcggtgtgtttgtgggtggactcatcggcttcatcatcaaaaatagcactggcgagtggtcgaagagagagatcatgtacatatccttccccggcgagattttcttgcgaatgcttaaatgtttgattgtgccgcttttggtctcatcaatcaccagtgccattggtggactcgacctgagcatgtccagcaagattgctaccagagccattacttactactttgtgaccaccatatcggccgtgattctgggaatatgtctggtgaccacactgcgtcccggccagggagccaagatcgtggagacccagacggagagcattgataaggcatcgaaggtgctcaccccagacacgcttatggatttggtgcgaaacatgttcacggacaacatcattcagtcgaccatgttccagcaccgcactgagatctatgagaacactagcattagcccagcacagcctatggaaaactgggagttcaagtcggctcagcgcgagggttctaatgtcctgggtcttgtgatgttcagtgttatcctaggtaccaccattggaagaatgcgggagaagggacaactgctgcaggatttcttcaccacactgagcgaggcaatgatgaccatcacctcatgggttatttggatttccccgctgggtgttgcctttctgatagccgccaagatcattgagatggaatcgatagcagcaacgattcagtcattaggatggtatttcataacggtcatgataggtctattccttcacggttttggtacgattgcggtgatcttcttcctgggcacccgacgtctcccgtaccgctatattgccaagcttagtcaggtcctggcaactgcatttggaacaggttccagctcggccaccatgccgctgaccatcaagtgtttggacaacatgggcatcgatccgcgggttactcgatttgtcattcctgttggtgccacaattaacatggacggaacggctctctatgaggctgtggctgctctgttcatcgcccaataccgtgagatgagctattccttcggcaccattgtggccgtcagcataacagccacggcggcatcgattggagctgctggaatcccgcaggctggacttgttaccatggtcatggtgctggacacagtgggcttggagccgaaggatgtgtccctcatcatagccgtcgattggctactggatcgcttccgcaccaccattaatgtaatgtgcgatgctctaggcactattttggttaaccatctgtcgaagaatgatttggccagcgtggataggctgaatgccgagccccatgagctcctcgagctgggacccaatggccacgagatgaaggaatgaaggcagtcttcgcttggcgcctataaccgcaaacgatgagtggacatgtcccggctgtgggcctgtttccacatcctgcccagcaacgatagcgatagcgatgactacgacgacgacgacgaggagttttaaaggatcgccgcaggatcgtattgtatcagcgctggaaaggagtcatcacgtttgtttgcgaattattttgggtgaccaagtcgcatctaattttcagattgatcaatttgaagcagctcctccggcagaggatagatatctgccagagtacaagtactaagccagcaacgaatttaagtgacacattcgttaaatagtttgttttttccaaaatgaatagatcgaaaagcagcgagaacagcaataagatttaagatgaaaacaacgtaacatttatcgcctaaattagggatactttcaaggtgtacataatttttaaatataattatattaaattgagttcaaatttgcattacattctccctatgattagtattacaattgagcagtaaaattagttaaattccaagcaagcaatcccaactttaagcaattgcatttgattaggtcgcaaattgttgagattcgtatctagtatttgttaaaacatattctataactttttgacatagcaaagcgaaacaaaataattaaaaaagacaaatatttaacaatagaacacagataaattaacatactaataggtgaaaagcaaaaccaaatccaatccaaatcaaaccacaatttcaaatgccgttacaagttcgtgttcatagttgagctttgtaaatacttaatagcttaagtatacatacataaaactttatggaaatatttatatttaaagcgtggaaaccgaattcttggatgacaataatagagtgctgcaatcacacatacagtcaatttatacgagtaacgaattatttataaaatattaataaaactaatataaattaggtcacatcttttcaaaaatcaaccaaatattgacacaaatacacaaaatcaataaaacaaagtaaatacttgaatgtttgccatgctttcagccaaaaaggagaattttttaggttacgaatcaccaaaatgtttgtagttgtgcgtagtctaaatatatgtttactaataaa

SEQ ID NO: 7200 - protein, 479 aa, DROSOPHILA
MTRPKQDGGKFKAFMQENVLTMATVIGVFVGGLIGFIIKNSTGEWSKREIMYISFPGEIFLRMLKCLIVPLLVSSITSAIGGLDLSMSSKIATRAITYYFVTTISAVILGICLVTTLRPGQGAKIVETQTESIDKASKVLTPDTLMDLVRNMFTDNIIQSTMFQHRTEIYENTSISPAQPMENWEFKSAQREGSNVLGLVMFSVILGTTIGRMREKGQLLQDFFTTLSEAMMTITSWVIWISPLGVAFLIAAKIIEMESIAATIQSLGWYFITVMIGLFLHGFGTIAVIFFLGTRRLPYRYIAKLSQVLATAFGTGSSSATMPLTIKCLDNMGIDPRVTRFVIPVGATINMDGTALYEAVAALFIAQYREMSYSFGTIVAVSITATAASIGAAGIPQAGLVTMVMVLDTVGLEPKDVSLIIAVDWLLDRFRTTINVMCDALGTILVNHLSKNDLASVDRLNAEPHELLELGPNGHEMKE

SEQ ID NO: 7201 - DNA, 6228 bp, DROSOPHILA
atcggagaagtgtccttggcgagcaggcgctccacaatgggcagtgctgcgttacgaaagtgagtgactgtgaagggttcggccggtgtggccacgtccagtagatgatgtcgtgcccgggactgctcctccttggttgccttggcggtggcgatgtccaggtgggtgtaaacctgcatggagtcagcgctgattatttctcctccgaagcgttcggccagttgcaaagacagtttcgtctttccggtgcccgtggagcccaggactacaattagcggcacctttcgaatcatttccacttattgcgagtgaatttaagtcaattaaggcaaataaaacccacacgttttgagcacgtgtattccgatggggaccgaaccacttgttgccgtcagctgttttttgtgcttacaagtaattggtattctgtttgcaattggcgtatattaagttaattatttgctaaaaaataaacctattttgatgcataaagtgattgtttaaacttacaaatcgaaaaataatggtagagttttaaagggaaatagtggaaccacacaaaattctgccggaatatacaagcaccgcgttgccaactactctgttgataagcgagccaatgttgccctaagaaattcataatgggcgggaattttaaactgattttaggttgtaaggaattgtatataaaaaccaagttttttaaacttttaagattacaaaataagaatcaaattagaattatattttagtacaaattcggaactcagataaattaagataaaaacggaactcaaaagtttaattaaaggcactgcatgatttgcttaagaatatgcaattattatattttttatataaatataatgaataattctttatttttaatttgttgtttttagatatcctcgcgatacatcgcatcaatgattgcacaaaatttgggccatccctatgcgctcgtgtcatctctaacgcgtacgcggtagtgtggccgaagcagcgcccagtttcaatcctgcacgggcagctagtatcgtatatctttcgtgcatttctttaatttacctgcagttccgttccgaataacaaaactggatcaatcagtttgattaaatttggagtactcgctgtcacagcggaacacagggcaggcagaaacctctggtgctcgtacacttttattatttgccgcaccgtgcgactttcactttttacaattcgcacaagaagaacaacaacaccagaaacaaaaacagcaacaacaagggcggccagcagcaacaacaaaaaaagaagaaacgaaggcaaagacgaagacgaagagcgatgagtgtgaaaaataccagagcggacaacatcaggccacagagtgcagcgagaattgtttaagaatcggtgggttgcacggcaaatgcaaagcaaaataacaataacaaaccagcacaacagggccgcctgtgtgtgtgtgcgtgagcggtagagggtgtgtgtgtgtgtgcgtgtgcgtgtgcccgtgcgtgtgtgctccagcgagagtgcgagtgtgtgcgtgagtacattgagtacatttcggtgcccccaaaaactttgtgtgtgtacgtggtttggattgaattcgctgtcgaattgggtcaattcgcagaaatccaccatggagagcaggacccaaatgaatcagtcgaaccagcaacagcagcagcagaggaatcgcctgccctcctcgccaagtccaccgctgagtgtggtcagtctcactggcggtccgaatgccaacacaaccttgatgggccttgagcacgatgcagtgccctcgtcgcagctgggcaggaacaacaacaacggaggtggccaccatcggagtcacagcattaccaatgcagcgaccacatcactggcgaatcttctggacggatttacagcgcgcgtctccacagcggtgagtgtggcaggtggtactaacatgctaatggaccggagcagccaaagcgccgccagcacaccaggatcaacccattcaatagccagcctcaccagcatgggctcactgggcaccacggccaatgccctgtactcctccatcggcagtgcactgaactccatcacctcacccatacaggcagctgctgcggcggccacggctacaaccacagaggtggtggtggcggccgcctctgtgatcaccaaccacctcagctcacccaccagcggcactccgccccacggcctggatgtagatgagggcgacgacgagtgcgacgactgtgaggaggacgaagacgatccggtggacaacgatggacacattgccgcccccacgccgaacaaaagctgggccgagaacaagcaagtggtgcaggagatacgcaagaagatgtgcaacctgtcctccatggtgcccaccaatgtgcagttccgccacttgtcagatggacgtgccaggtgctacttcctcggcactccgccgcaaagctgggagactacgctgctctttgccgacattaacctaacgcagtcggaggagcagcagttattggtgcagcgactggaggggattgcatctgatgagtggagtcccactatgaatgcaggatcccccaccagtagcggccaccagccagcgtttcttttcaattccctgcccaggcctaggtatgttaacaatcgttgtatgcttgagacagtactaaggaatttcccaacttggatagactcccatggagtccactattacagcaacccattcaaagtagtgggggcagcggaggcagtggatcggccagtccctatgctcgggagtatcaactactgcaggagcgcaaacgcctctcaacctggggcattaccagctacgagttacacaagccctcgggaaaactggtattcccctgcttcaacgacctatatcaatgcctggacacaggatacaatgtaagcattacaaaaaattccattgttccttacttacttcctttctatcgacagtctgggctgctgtttcccacgcagctacgcacctgcccccaatggacggctctggatccgcagatttgtccacagaactccgacatgatagcctacatcagtgattgcgatctgtttgtcactcacacgctcagtgggcacgaaaagcgcctcacttacacgtccaccgggcggcattcgtatgtggacgatgcattgagtgccggtgtgccctcttacgtgatgcaggaggagtttagccgctaccaaggcttctggtggcagccacattccaatgacggtatctaccgcattgtctacgaggaggtggatgaatctgaggtctccgtgtacacgtttccatcatcaacggcaatgcacggcagggtagacgagtaccgctttccccgcaccggtagcccaaacgccaagtccaagctcaagctggttcagttcgtactgaacgaggcactgcaggtcagcgaaattgccatcaaggatctgccctactccctgttggctgtttttagctggttagagtacattgtacgtgtcggctggacaccggatgctaaatagtaagtatacccctgaatgtgaaacatgttgcaaccaaataattctgaaatatctaataataagaaaaagttctttcgcctctatggaagcttgccagaagttaaattataattgactgtgcattcttttcacttgccagcgtatgggttcaaggactggatcgaaagcagcagcggctggacgtaatccttattccactggacaacttctgcgagtcctacagcagtcaggtttcaacgccgaccgactcaataggcgaccacagctggcgcagcctgtacagtcgcacaatcacgccactgcaggttatatacacggaacgctcggatagctggattaatgtgcatgatatgcttcacttcctggatctgacggaaacaagcgtcaccttcttgtgggcatctgaggagactggttttcgtcacctttatttggtgaccgccagcttgttgttgagccaagcaaatggacagccagatcccggatccgttggcgcgcagcccagtttcgtggatctatcggcactgcaaccgcgcatcctcaacaaggtggccttgaccagcggagagtgggaggtgctggccaggaatctctgggtggacaaggccaacaagctggtgtactttgtgggacttcgagatacgccgctagaaaaacacctgtacgttgtgagtctggagcggcccgaacacattcgcctgctaacggagccaggttactcatacctcgtggaattcgatgatgtacgtatgatcactgtcattatctagctaaagtgaaaatataatattgtgcccaaataagtatgctataatttagcattttaacgatcttttcccaattttctcacagcaatgcaagttgatgctgctcgtttactgcaacatacagcggctgcccagttgcaaggtgatgcgcgttaaccagacatgctcgaacggtggagtcaacggcattcagatttcacttgttggctatctccacgaaggcggaaagccggagccgcagtactgtccgcaaattttctcgccgcagttgccgtcgggagatatcgtgtatgccatggttttcaagccgcacaattttgagttgggtgtcaagtatcccacggtgctcaatgtttacggaggacccgaggtgcagaccgtgaacaacacatttaaggtaggtttcacaaaatacagagttctttgtctaacttcgatgtaattctgtattttcttagggaaaacatcaattgcggatgcatatgctggccgcgcagggatattgtgtcatctgcatcgactctcgaggatcgcggcatcgaggcaagcgattcgaaagtcacatccgtggtcggatgggtcaggtggagctgacggatcaggtggatgcgctgcggagcttgtctgaccagttgggctacattgacatggatcgcgtggccattcacgggtggtcatacggtaagttatctcgagataggtgattgacattgttatagtggggtatttcccacaactctgcatactatttaatctaatcaacaagcaagtcattctgaacttgcaagtacacagacagaatgaagatgccttatcggtttatgaacgttaaattaatgcactataatggttactttcaattgagggaactgggtaaaggtaaaggcattgcaataatttccatatggttgtcatttcaacagggggctatcttagcctgatgggcctggttcagtatccgaaaatctttaaagtggccattgccggagcgccggtcaccaactgggagtattacgatacgggctacacggaacgatacatggatatgccgcaaaataacgaggccggttactcagccggttcggtgctcgaatacgtaaactcttttcccgaagagtgagttcttaagctggttcttaaattgtcaaattttcgaaacattcatgttttcttttgttcagggacaaacgcctgctgctcatacacggcctgatcgacgagaacgtgcacttctgccacacctcgcgtctgatcagtgctttgaacaaggcaaacaagccgtacgaggtgcatctgttccccgaggagcggcattcgttgcgtaatctggaatcgaataaaaactacgaaactaaattactgtcattcttgcaaaacttatgagattcgtaaatgtcaacagccgaaacaagatcgcctgcttaggcagtaaaactagacccgccccacgccctcgtccctttgcaatagttttttacatcattgtctttgtttttatttgaatttttgttgttcgaactattgtttttattcgataaagaaaatgagagaaaacgaaatttgtatcatatttttagcatacttaatttataaacgtacgcagttgtaagtataatggaaagttgaatgaatgaaagtttacctgccacccaatattagacttcagatcaagaccaagcagcttattgtaattaatttatacttaatgttctacaacacacgtcatatactcttaactatgttttaattgtgtttgatatccgcaaatgtacatttttcctatcagtaattataagttgtgttttagtgcgtatgtacgagtatgagtgacctgtatgcgtgttttccacagaaacggaaaaaaaaaaccttaaacttgtcatgcctttggggcaggccatcaattaatgttagttct

SEQ ID NO: 7202 - DNA, 3783 bp, DROSOPHILA
cagcgcccagtttcaatcctgcacgggcagctagtatcgtatatctttcgtgcatttctttaatttacctgcagttccgttccgaataacaaaactggatcaatcagtttgattaaatttggagtactcgctgtcacagcggaacacagggcaggcagaaacctctggtgctcgtacacttttattatttgccgcaccgtgcgactttcactttttacaattcgcacaagaagaacaacaacaccagaaacaaaaacagcaacaacaagggcggccagcagcaacaacaaaaaaagaagaaacgaaggcaaagacgaagacgaagagcgatgagtgtgaaaaataccagagcggacaacatcaggccacagagtgcagcgagaattgtttaagaatcggtgggttgcacggcaaatgcaaagcaaaataacaataacaaaccagcacaacagggccgcctgtgtgtgtgtgcgtgagcggtagagggtgtgtgtgtgtgtgcgtgtgcgtgtgcccgtgcgtgtgtgctccagcgagagtgcgagtgtgtgcgtgagtacattgagtacatttcggtgcccccaaaaactttgtgtgtgtacgtggtttggattgaattcgctgtcgaattgggtcaattcgcagaaatccaccatggagagcaggacccaaatgaatcagtcgaaccagcaacagcagcagcagaggaatcgcctgccctcctcgccaagtccaccgctgagtgtggtcagtctcactggcggtccgaatgccaacacaaccttgatgggccttgagcacgatgcagtgccctcgtcgcagctgggcaggaacaacaacaacggaggtggccaccatcggagtcacagcattaccaatgcagcgaccacatcactggcgaatcttctggacggatttacagcgcgcgtctccacagcggcagctgctgcggcggccacggctacaaccacagaggtggtggtggcggccgcctctgtgatcaccaaccacctcagctcacccaccagcggcactccgccccacggcctggatgtagatgagggcgacgacgagtgcgacgactgtgaggaggacgaagacgatccggtggacaacgatggacacattgccgcccccacgccgaacaaaagctgggccgagaacaagcaagtggtgcaggagatacgcaagaagatgtgcaacctgtcctccatggtgcccaccaatgtgcagttccgccacttgtcagatggacgtgccaggtgctacttcctcggcactccgccgcaaagctgggagactacgctgctctttgccgacattaacctaacgcagtcggaggagcagcagttattggtgcagcgactggaggggattgcatctgatgagtggagtcccactatgaatgcaggatcccccaccagtagcggccaccagccagcgtttcttttcaattccctgcccaggcctagactcccatggagtccactattacagcaacccattcaaagtagtgggggcagcggaggcagtggatcggccagtccctatgctcgggagtatcaactactgcaggagcgcaaacgcctctcaacctggggcattaccagctacgagttacacaagccctcgggaaaactggtattcccctgcttcaacgacctatatcaatgcctggacacaggatacaattctgggctgctgtttcccacgcagctacgcacctgcccccaatggacggctctggatccgcagatttgtccacagaactccgacatgatagcctacatcagtgattgcgatctgtttgtcactcacacgctcagtgggcacgaaaagcgcctcacttacacgtccaccgggcggcattcgtatgtggacgatgcattgagtgccggtgtgccctcttacgtgatgcaggaggagtttagccgctaccaaggcttctggtggcagccacattccaatgacggtatctaccgcattgtctacgaggaggtggatgaatctgaggtctccgtgtacacgtttccatcatcaacggcaatgcacggcagggtagacgagtaccgctttccccgcaccggtagcccaaacgccaagtccaagctcaagctggttcagttcgtactgaacgaggcactgcaggtcagcgaaattgccatcaaggatctgccctactccctgttggctgtttttagctggttagagtacattgtacgtgtcggctggacaccggatgctaaatacgtatgggttcaaggactggatcgaaagcagcagcggctggacgtaatccttattccactggacaacttctgcgagtcctacagcagtcaggtttcaacgccgaccgactcaataggcgaccacagctggcgcagcctgtacagtcgcacaatcacgccactgcaggttatatacacggaacgctcggatagctggattaatgtgcatgatatgcttcacttcctggatctgacggaaacaagcgtcaccttcttgtgggcatctgaggagactggttttcgtcacctttatttggtgaccgccagcttgttgttgagccaagcaaatggacagccagatcccggatccgttggcgcgcagcccagtttcgtggatctatcggcactgcaaccgcgcatcctcaacaaggtggccttgaccagcggagagtgggaggtgctggccaggaatctctgggtggacaaggccaacaagctggtgtactttgtgggacttcgagatacgccgctagaaaaacacctgtacgttgtgagtctggagcggcccgaacacattcgcctgctaacggagccaggttactcatacctcgtggaattcgatgatcaatgcaagttgatgctgctcgtttactgcaacatacagcggctgcccagttgcaaggtgatgcgcgttaaccagacatgctcgaacggtggagtcaacggcattcagatttcacttgttggctatctccacgaaggcggaaagccggagccgcagtactgtccgcaaattttctcgccgcagttgccgtcgggagatatcgtgtatgccatggttttcaagccgcacaattttgagttgggtgtcaagtatcccacggtgctcaatgtttacggaggacccgaggtgcagaccgtgaacaacacatttaagggaaaacatcaattgcggatgcatatgctggccgcgcagggatattgtgtcatctgcatcgactctcgaggatcgcggcatcgaggcaagcgattcgaaagtcacatccgtggtcggatgggtcaggtggagctgacggatcaggtggatgcgctgcggagcttgtctgaccagttgggctacattgacatggatcgcgtggccattcacgggtggtcatacgggggctatcttagcctgatgggcctggttcagtatccgaaaatctttaaagtggccattgccggagcgccggtcaccaactgggagtattacgatacgggctacacggaacgatacatggatatgccgcaaaataacgaggccggttactcagccggttcggtgctcgaatacgtaaactcttttcccgaagaggacaaacgcctgctgctcatacacggcctgatcgacgagaacgtgcacttctgccacacctcgcgtctgatcagtgctttgaacaaggcaaacaagccgtacgaggtgcatctgttccccgaggagcggcattcgttgcgtaatctggaatcgaataaaaactacgaaactaaattactgtcattcttgcaaaacttatga

SEQ ID NO: 7203 - protein, 1042 aa, DROSOPHILA
MESRTQMNQSNQQQQQQRNRLPSSPSPPLSVVSLTGGPNANTTLMGLEHDAVPSSQLGRNNNNGGGHHRSHSITNAATTSLANLLDGFTARVSTAAAAAAATATTTEVVVAAASVITNHLSSPTSGTPPHGLDVDEGDDECDDCEEDEDDPVDNDGHIAAPTPNKSWAENKQVVQEIRKKMCNLSSMVPTNVQFRHLSDGRARCYFLGTPPQSWETTLLFADINLTQSEEQQLLVQRLEGIASDEWSPTMNAGSPTSSGHQPAFLFNSLPRPRLPWSPLLQQPIQSSGGSGGSGSASPYAREYQLLQERKRLSTWGITSYELHKPSGKLVFPCFNDLYQCLDTGYNSGLLFPTQLRTCPQWTALDPQICPQNSDMIAYISDCDLFVTHTLSGHEKRLTYTSTGRHSYVDDALSAGVPSYVMQEEFSRYQGFWWQPHSNDGIYRIVYEEVDESEVSVYTFPSSTAMHGRVDEYRFPRTGSPNAKSKLKLVQFVLNEALQVSEIAIKDLPYSLLAVFSWLEYIVRVGWTPDAKYVWVQGLDRKQQRLDVILIPLDNFCESYSSQVSTPTDSIGDHSWRSLYSRTITPLQVIYTERSDSWINVHDMLHFLDLTETSVTFLWASEETGFRHLYLVTASLLLSQANGQPDPGSVGAQPSFVDLSALQPRILNKVALTSGEWEVLARNLWVDKANKLVYFVGLRDTPLEKHLYVVSLERPEHIRLLTEPGYSYLVEFDDQCKLMLLVYCNIQRLPSCKVMRVNQTCSNGGVNGIQISLVGYLHEGGKPEPQYCPQIFSPQLPSGDIVYAMVFKPHNFELGVKYPTVLNVYGGPEVQTVNNTFKGKHQLRMHMLAAQGYCVICIDSRGSRHRGKRFESHIRGRMGQVELTDQVDALRSLSDQLGYIDMDRVAIHGWSYGGYLSLMGLVQYPKIFKVAIAGAPVTNWEYYDTGYTERYMDMPQNNEAGYSAGSVLEYVNSFPEEDKRLLLIHGLIDENVHFCHTSRLISALNKANKPYEVHLFPEERHSLRNLESNKNYETKLLSFLQNL

SEQ ID NO: 7204 - DNA, 7972 bp, DROSOPHILA
tcgtctattataaattctttactcaactaaagcgactgttgacttgattccctgaccttatatcaattaaatcaataaataataataattgattaaaaattttcaatttgctgctaattgtcctaaatttcgtaaattgtgcaaatattcttcatcactagccatttccaaccgtccgctagtgggatagtccttacaaaattcgagattatgggaacttaaagagctagaaagctggaaggtagttaatggaacttgtttcataattttgtagctagcagtgaaataaaacatacaggtagttagttcattttaaaattgtatattctccttcaaaaatatatatacatattttgatttgattttgtttgttgttttagttgttttctagtatgcattatacatacgtatatcattttagtagctgcatccctagcgtattctaaacttattcaattaatgttacgattatattattgctgtcataaattattaaatctaaatcatgcactacaaaagtgtgggggcggagcaagatatgttctggcgatcgatcgatccgatagcagcccgtttcgagtgctgctaagccggagtcgtcataatcatcgtcacactatcgccaacacaatctggcccggctaattctaacccagatgatttacaatacttcttcatgtgaccgcgatgagtggatgtggtaaatttcgatgaaggacccatttacactgggcgattacaatagtcagaaaccaatcgttgaagttcagtttggattggtttcgttcgagggctacggctaagctacggctcataaacgtatcctgcatttaggcgctagattcctacacatatataaatatatcacaaaatcagtgaaattaaaattcgctggagtatttgcttgtttcgctttggatgatgcatgagaagagctctttgaaacgttgagtgataaaatgtttggcaatgtcctagctcagcagacggcaacaacctgtcacctgaagctgatgccgcacttgcggctgatcttgggcgtgtgaatatatgctattgacagcagcaatggtacatcattttcggacaactgcagtggatttgtaatgtcgctcagtcggcacggatcagtctcaagcaggaatgctgccaaagtttccgattgtaggtagatttcctgtaacttggactccaagaacgacaaacactaaaaccaaatattcagaaattagcaatgaaaaatgtatgatcaaatttgcggtgcctacctcataggctggtatgccgcctgcattcatggcctgtacggtttccagcatgctggacactagctgagacatgcccacgggagaactctgaccaccggcataaggaaactgctgcgtctgagatgaaattagccgtacatcccacttgtccatgtccgccacaattgcaatgttctccgccggctgcgagattagcgaggctgagcgcgcagccagagctagatcctcccgcagatgcatctcccacttattgggcggagcacaagtaccctatgacataggaaacaaaatataatcagtattggctcaatcgcaaagatagcaaagcaatttcccacctgcaataccatgtctgagacgtaatgatcgctaacgcttaacagcagcgagggaatgaagccggcacgcagctggtcgcctggagattcgtcgtcctgcggcaattccttgatgcccggaacaggcagtttcaagagctgctgagacacgttgaccgctgcacacttggcggccaccgaggagacggaactgcgtcctgacggcactcgtttgggctgctgcttgcgcatgtacgtggtctgcatttgggttgggatcgttggagttggtggttcgactgcaacagaggactttagcgtgtctatggaggccgcagagtttacagattgtagagcctttgagctgaatccattaccgttcccgctttgattgtagcaatgcatttcatcggtctcgaattccagttcggtggcattggaaggtgtttggttccaggtggccgaggtatttatgccaacgccactgctgcaaactacgcaacgatcgctattcgcagtcactggagttgtcggtggaagcagtgcagccgtggagctactgctagcagctagtgtagccgtgctatcgctaccctttagggcagctgcctcactggcctccagtttggtgaccttgtccattagcagatcgtagttagacatcaatagattcttgttcttcatatagttggtagctatttgcggatactgttcaaaattgaacttcatacccgagtgcttgcttctgtcgtgggtgcgctgatgttgtgcacacagcattagagttggcttagaatcttgatctccgctcaggtcctcactgctctttttcaggttgatcagtggctcattgtcgcccaggacgaagactactccgttgccattatctgcggatgtttgtcgacagatgccgtgctcacgctcgattagcttgtggcagtgatcaaaatgaatctgctcctccaggctaacgttttcttttatgggctcaatgccccatgtcatgcgatcgcttttgcccatgctgttctgcgttatcaaatcagagagtgacaaatgcgaggctcgtctctcatgactcaggggctcaaagtcacctactccagtttctccagtcttgctctgctgttgatcggggtttccctcaacggagtagctgctgctgcgtcgctccagtttgcggttgatgatccgaatgccctgctgcagcttggccaaatcacttagactcagtccctcctttacacctgctaccggcaccatgttccaaaagaaattctttttcggaggtgcctccacgttgtcttcatagtcgatggcctcgatggcaccgtcatccacggaacctgtacttacggagccagtgccgctcgactgctcctcctccatgcacagctccacgttatccggcgtggttactgtcaaacggatccggccgtctttgccagtacgaaagtactgctgtgcctgccgcgccagcagcatcttcttgtcaatacctgtgtccattaaatagtttccgatacgcagctcctgctgcacaaagtgagagtctcggaaggccaacacagtgggaatctcattctttttcagagtctgcatgccatcgctggcgtccagggacccagagtccaaaccatctgggtccccatcctcgttgtccctatcgtacatgttcagttcgccattctcatcgtccgcatcatcagcaattgcatttagattctgtttgcaggttgccgccctgctcaatccgcgcttctgcgtcggtggactcttgtgcctctcctgcgtacccgtttgatttttcgtctggctctgggcggcaaggtcgttaataagctgcttgttaaagtcctcccgcttggccgctcgccgcacttcgctgcaccgaataaagtatgtgagcacgtttagcagcttctctacccagagcttctctgctccacacacaatggtgcgagccagcttcggcggcatgccgatggctccataaaggtcgccgagctgggcccacagcgcattgtacggatgcttctgggcaacttggagtagctttgccctctgctcaatggccgctgcagaggcagacgactccgatcgtttagaaccggagctattgaaggcggacacggtggctacccatccgaggtgatgagtaagaattcccgtcagcatggtgctaataaaactgcaaataaacaaaacaaaaaaactaattagatataaatctaaaaccatctcagcatagacgttgctatgatagtcaaacttacaaattagagtccttagtatcggcgaaggagagtaggtcgcacagctccttgatgaatctctcggccacagtcttggagtacttgctgccactggtggtgatgctcagccagacaggtgtcttgatgcgcggggcagtgaagagatcgctgaaccactgttgcgtatcctgccaggcctggaacatgatctgaggtccacacacaaaatcctgattatttgaaattcaaacggtattgtatatgtgtgttccttacctgcagaaagttcttgtggttgatgtaagccagttctgtactggctctcaatcgactaagcatagattccagcaaggcaatatgctcactacaaaacagctccatctcctcttcgaaggactcactcatcgagatacacacggccagtcccagtttcgcccgccgccgcagattggcctgcctcctgcccatttccggattacttcgcgtttcattcgcacaatagctcgctcgtcgatactgcggtggagccatgccaccaccttcgctgccccctccagctccgcctcctgctggtgctaccacagggccattcaatgcgtaattgtcgctaagaaagccgataaaatcgttcttggaatgctcgttctcgaaggaggtgcgcaaattacgcgagattcttcgctgcaggcagccatcgctggcaaatccgtccaggtaaggagaccccgtatagcacgccaagtccatgctcagcttccgcattgcatccgactgatccgagaggacactgcccaaactgctgcgcgtggatgagtactgatatgaccactgatcccctccagctgcactgccactcccactggccgaatagcccgaatccgtggcagtgctgtatgttgatgagtatcgaggaccgctggagtcgatcgaatgaatcgacagtgactgctgatcagccggcgtcgccggaacgtccagcggtggcgtcaggctcatctgccgacctacactcacgctgaacggcattgagaacgagttcatcgagagaccatccatggatccatgctcgctgcatatcgatgtgcgcggcgtcgccaggctattcgtggagagcgtagagtacggcgagtggccagatcctccattactggtgggcgtcaggtagacctgggagcacaggattctggacggttccggcagccagtgcaccttcagagccgttccgcaaaaggacatcggcaacgagccaaacaccatttcgcccaccggcgtgatgtcggctcccgagggtcgattgtgctgtttaaaaataacaaattggtcaatttaaaacgaagttaagtaagctgctactctgcttatggtattctgggtccacggctctaaaatctgtatgcttagttttaactttctagattttatagttcccgagatgcgttttacacccgaccggtcataagttcgaatagattacttaatagatgactcaccttatagccgtactctgcgcacacctcgatgaaattgctaccattgctggaatgtgacttcgacggaatcttgccattctgcagcgatgtgtacttctcattcttaaggaactttcccccgccactcgtactggtcgatgatatggatgcggatgtggccgattggtccttgtgcatcaccttctggagggcattcgagtcgaagagcaatcgccgagtatcatcctctttgtagagcagaactcgcacctggctgccctcgaaggggaatcgactgcaaagaaggatcaaaggtaaaagtaaattaatttaggcacatactcgtactaaagaagattgtaattacaaaatggttagaattaatacattttgttttaccgcgaatcgactaatgcactgttcaaaattcccctctgtatagattagttccactggtttttttattttccatatatttgccacatcgctgccatttgacaccattcaaaatcgggaatctagagttccgctcgaaggtcatcaaaatgccacccgcagcttcgccgcctagcggaggttcattataatgcgcacatctcgagcagctctcgtattttgtgctgttcattgtcgtcgataaaatggcaaatgctatgctttatatatagcgatcctctgtttggcacgtgacgattactcatgcccccatacgagcggtgctgtcagtgccgtcttcaaatcttttacagccccaaagcgcaatgtcgattgataaggccgagtaaaacgtactaatgctgaactttgaacccccctgaaataggggggagtgaagtgaaggtgtcgtcgaaagtcacatgacggcaaacttgaatgttaaattaaaccaatttatttttgccggttctataattggctgatccaagtagcgctggcaaatgaggtatacgagtatatctcggcggaacagaacaaatacaagtctaaggtctcaatgaacgaaatctatttaaaacttaaatgaattcaaacaaagtttgctcgacgatttagtgaatatattcgaataactgaaccaatggcagaacgcgattatacaaaaaattgtacaatattttaggtcgttctaaagcaccctacaaaactaattgaaactctgagatgaactgtgtgaaatacaaaaagaaaaaagtgaatagtaatgcataatttgttgacagatcctgtcaacgctaattatactccaatccctcgaataaccgacgaaacccattcgaaatccattcgaaatccattccactccacaggccagacaaatcggcagccaccgtactcgatttaaagctcgtacaacagatttgagctaattaatttagtggctgtataaatggcttgtctaagtagcgctaagtttgcaaaggcgccttctctgaaattagcgctataattaacaattagcccaactgatgatagtcgtttgccgtctcagtgggtggggctggtctaaatggtggggggagtgggcgaactagttttagagcttaataaatgttttactgcccagcgataagaaggggggagcccgcacgcaggtcgattacgaaggtgtttttgtttttttcttttttttttttttttgtttggttttaggtcggtcacgagggcccttgatatagtgtggatatattgtggtctggccggccagccggacggactgcaccggcggcccctttgttgtcctcggactgtccaatgtctggccatcccggatgggggcgaatttattgaccgtgcttacttggatttaaagggcggcgtatgcatgcgacaaagggtaatttcaactgcagcttcgcgatagcgccaactgtctggccggaaagttccgtagttacaggttgtacttgtccaactcgactttgcctatctataatttcataacagcaaaacaaattcctcatttagtttgctggtcactcctccttaagccccacaatttgggaaccaaaacccattgtgtgataaaatatctacaaattcattaggcattagtacctcttaacgagttagcaatgtatttatactttatgatcgattgttaataataataaattttacacgaattagcttttttatctgctcaatttactttaaaaattcaacaataagtattgagcaaatatttatatctgtagctcttcacatcaagaccaaattgataatttcaattgaaaatataaacaattttgttatttaccaacaagtcacgaattaattcagagtatttatttttgaataagatttcaatgaactaaaaaaaatacgtgtaaaatgtaactccttgctttattattatacttttgaattggcaatggaaattgtgtttaaaaaagccactatatttttcatatttattttcatcttttgcattctctttggttccaaagttggtgtggaacttgtagtttgttttcgagttggagaagttaaactgtaacatttaccgttggacccccgattagcgcggactgacgacgcgtcgatatctttatggccgcgatgctagtcagcaaatgaagttcaaggcgctcgcgatcgcactgggagctcgagaactggggaaccgaactgggaacggggactgaaaagcccaggtcccgtgc

SEQ ID NO: 7205 - DNA, 4414 bp, DROSOPHILA
cataaagatatcgacgcgtcgtcagtccgcgctaatcgggggtccaacggatattttatcacacaatgggttttggttcccaaattgtggggcttaaggaggagtgaccagcaaactaaatgaggaatttgttttgctgttatgaaattatagataggcaaagtcgagttggacaagtacaacctgtaactacggaactttccggccagacagttggcgctatcgcgaagctgcagttgaaattaccctttgtcgcatgcatacgccgccctttaaatccaatcgattccccttcgagggcagccaggtgcgagttctgctctacaaagaggatgatactcggcgattgctcttcgactcgaatgccctccagaaggtgatgcacaaggaccaatcggccacatccgcatccatatcatcgaccagtacgagtggcgggggaaagttccttaagaatgagaagtacacatcgctgcagaatggcaagattccgtcgaagtcacattccagcaatggtagcaatttcatcgaggtgtgcgcagagtacggctataagcacaatcgaccctcgggagccgacatcacgccggtgggcgaaatggtgtttggctcgttgccgatgtccttttgcggaacggctctgaaggtgcactggctgccggaaccgtccagaatcctgtgctcccaggtctacctgacgcccaccagtaatggaggatctggccactcgccgtactctacgctctccacgaatagcctggcgacgccgcgcacatcgatatgcagcgagcatggatccatggatggtctctcgatgaactcgttctcaatgccgttcagcgtgagtgtaggtcggcagatgagcctgacgccaccgctggacgttccggcgacgccggctgatcagcagtcactgtcgattcattcgatcgactccagcggtcctcgatactcatcaacatacagcactgccacggattcgggctattcggccagtgggagtggcagtgcagctggaggggatcagtggtcatatcagtactcatccacgcgcagcagtttgggcagtgtcctctcggatcagtcggatgcaatgcggaagctgagcatggacttggcgtgctatacggggtctccttacctggacggatttgccagcgatggctgcctgcagcgaagaatctcgcgtaatttgcgcacctccttcgagaacgagcattccaagaacgattttatcggctttcttagcgacaattacgcattgaatggccctgtggtagcaccagcaggaggcggagctggagggggcagcgaaggtggtggcatggctccaccgcagtatcgacgagcgagctattgtgcgaatgaaacgcgaagtaatccggaaatgggcaggaggcaggccaatctgcggcggcgggcgaaactgggactggccgtgtgtatctcgatgagtgagtccttcgaagaggagatggagctgttttgtagtgagcatattgccttgctggaatctatgcttagtcgattgagagccagtacagaactggcttacatcaaccacaagaactttctgcagatcatgttccaggcctggcaggatacgcaacagtggttcagcgatctcttcactgccccgcgcatcaagacacctgtctggctgagcatcaccaccagtggcagcaagtactccaagactgtggccgagagattcatcaaggagctgtgcgacctactctccttcgccgatactaaggactctaatttttttattagcaccatgctgacgggaattcttactcatcacctcggatgggtagccaccgtgtccgccttcaatagctccggttctaaacgatcggagtcgtctgcctctgcagcggccattgagcagagggcaaagctactccaagttgcccagaagcatccgtacaatgcgctgtgggcccagctcggcgacctttatggagccatcggcatgccgccgaagctggctcgcaccattgtgtgtggagcagagaagctctgggtagagaagctgctaaacgtgctcacatactttattcggtgcagcgaagtgcggcgagcggccaagcgggaggactttaacaagcagcttattaacgaccttgccgcccagagccagacgaaaaatcaaacgggtacgcaggagaggcacaagagtccaccgacgcagaagcgcggattgagcagggcggcaacctgcaaacagaatctaaatgcaattgctgatgatgcggacgatgagaatggcgaactgaacatgtacgatagggacaacgaggatggggacccagatggtttggactctgggtccctggacgccagcgatggcatgcagactctgaaaaagaatgagattcccactgtgttggccttccgagactctcactttgtgcagcaggagctgcgtatcggaaactatttaatggacacaggtattgacaagaagatgctgctggcgcggcaggcacagcagtactttcgtactggcaaagacggccggatccgtttgacagtaaccacgccggataacgtggagctgtgcatggaggaggagcagtcgagcggcactggctccgtaagtacaggttccgtggatgacggtgccatcgaggccatcgactatgaagacaacgtggaggcacctccgaaaaagaatttcttttggaacatggtgccggtagcaggtgtaaaggagggactgagtctaagtgatttggccaagctgcagcagggcattcggatcatcaaccgcaaactggagcgacgcagcagcagctactccgttgagggaaaccccgatcaacagcagagcaagactggagaaactggagtaggtgactttgagcccctgagtcatgagagacgagcctcgcatttgtcactctctgatttgataacgcagaacagcatgggcaaaagcgatcgcatgacatggggcattgagcccataaaagaaaacgttagcctggaggagcagattcattttgatcactgccacaagctaatcgagcgtgagcacggcatctgtcgacaaacatccgcagataatggcaacggagtagtcttcgtcctgggcgacaatgagccactgatcaacctgaaaaagagcagtgaggacctgagcggagatcaagattctaagccaactctaatgctgtgtgcacaacatcagcgcacccacgacagaagcaagcactcgggtatgaagttcaattttgaacagtatccgcaaatagctaccaactatatgaagaacaagaatctattgatgtctaactacgatctgctaatggacaaggtcaccaaactggaggccagtgaggcagctgccctaaagggtagcgatagcacggctacactagctgctagcagtagctccacggctgcactgcttccaccgacaactccagtgactgcgaatagcgatcgttgcgtagtttgcagcagtggcgttggcataaatacctcggccacctggaaccaaacaccttccaatgccaccgaactggaattcgagaccgatgaaatgcattgctacaatcaaagcgggaacggtaatggattcagctcaaaggctctacaatctgtaaactctgcggcctccatagacacgctaaagtcctctgttgcagtcgaaccaccaactccaacgatcccaacccaaatgcagaccacgtacatgcgcaagcagcagcccaaacgagtgccgtcaggacgcagttccgtctcctcggtggccgccaagtgtgcagcggtcaacgtgtctcagcagctcttgaaactgcctgttccgggcatcaaggaattgccgcaggacgacgaatctccaggcgaccagctgcgtgccggcttcattccctcgctgctgttaagcgttagcgatcattacgtctcagacatggtattgcagggtacttgtgctccgcccaataagtgggagatgcatctgcgggaggatctagctctggctgcgcgctcagcctcgctaatctcgcagccggcggagaacattgcaattgtggcggacatggacaagtgggatgtacggctaatttcatctcagacgcagcagtttccttatgccggtggtcagagttctcccgtgggcatgtctcagctagtgtccagcatgctggaaaccgtacaggccatgaatgcaggcggcataccagcctatgagtgtttgtcgttcttggagtccaagttacaggaaatctacctacaatcggaaactttggcagcattcctgcttgagactgatccgtgccgactgagcgacattacaaatccactgcagttgtccgaaaatgatgtaccattgctgctgtcaatagcatatattcacacgcccaagatcagccgcaagtgcggcatcagcttcaggtga

SEQ ID NO: 7206 - protein, 1385 aa, DROSOPHILA
MHTPPFKSNRFPFEGSQVRVLLYKEDDTRRLLFDSNALQKVMHKDQSATSASISSTSTSGGGKFLKNEKYTSLQNGKIPSKSHSSNGSNFIEVCAEYGYKHNRPSGADITPVGEMVFGSLPMSFCGTALKVHWLPEPSRILCSQVYLTPTSNGGSGHSPYSTLSTNSLATPRTSICSEHGSMDGLSMNSFSMPFSVSVGRQMSLTPPLDVPATPADQQSLSIHSIDSSGPRYSSTYSTATDSGYSASGSGSAAGGDQWSYQYSSTRSSLGSVLSDQSDAMRKLSMDLACYTGSPYLDGFASDGCLQRRISRNLRTSFENEHSKNDFIGFLSDNYALNGPVVAPAGGGAGGGSEGGGMAPPQYRRASYCANETRSNPEMGRRQANLRRRAKLGLAVCISMSESFEEEMELFCSEHIALLESMLSRLRASTELAYINHKNFLQIMFQAWQDTQQWFSDLFTAPRIKTPVWLSITTSGSKYSKTVAERFIKELCDLLSFADTKDSNFFISTMLTGILTHHLGWVATVSAFNSSGSKRSESSASAAAIEQRAKLLQVAQKHPYNALWAQLGDLYGAIGMPPKLARTIVCGAEKLWVEKLLNVLTYFIRCSEVRRAAKREDFNKQLINDLAAQSQTKNQTGTQERHKSPPTQKRGLSRAATCKQNLNAIADDADDENGELNMYDRDNEDGDPDGLDSGSLDASDGMQTLKKNEIPTVLAFRDSHFVQQELRIGNYLMDTGIDKKMLLARQAQQYFRTGKDGRIRLTVTTPDNVELCMEEEQSSGTGSVSTGSVDDGAIEAIDYEDNVEAPPKKNFFWNMVPVAGVKEGLSLSDLAKLQQGIRIINRKLERRSSSYSVEGNPDQQQSKTGETGVGDFEPLSHERRASHLSLSDLITQNSMGKSDRMTWGIEPIKENVSLEEQIHFDHCHKLIEREHGICRQTSADNGNGVVFVLGDNEPLINLKKSSEDLSGDQDSKPTLMLCAQHQRTHDRSKHSGMKFNFEQYPQIATNYMKNKNLLMSNYDLLMDKVTKLEASEAAALKGSDSTATLAASSSSTAALLPPTTPVTANSDRCVVCSSGVGINTSATWNQTPSNATELEFETDEMHCYNQSGNGNGFSSKALQSVNSAASIDTLKSSVAVEPPTPTIPTQMQTTYMRKQQPKRVPSGRSSVSSVAAKCAAVNVSQQLLKLPVPGIKELPQDDESPGDQLRAGFIPSLLLSVSDHYVSDMVLQGTCAPPNKWEMHLREDLALAARSASLISQPAENIAIVADMDKWDVRLISSQTQQFPYAGGQSSPVGMSQLVSSMLETVQAMNAGGIPAYECLSFLESKLQEIYLQSETLAAFLLETDPCRLSDITNPLQLSENDVPLLLSIAYIHTPKISRKCGISFR

SEQ ID NO: 7207 - DNA, 3468 bp, DROSOPHILA
tcaccaaaatgtttgtagttgtgcgtagtctaaatatatgtttactaataaatctttatgaatattaaacgaacttttcaagcattttaacttaaggtatttgggtgaagtttcaattcaaattgatctgttgggtaggttttatttcttatacacaatattatacatcaggcatacaatttttactggatgataagaattaacgatatgtttgatttcatttatcatacacatttaaaatgaaataaataagtttatttcaatggttctaaaatttgttagagctttggcaagtttgcaagccattgaataaaagcttttagtagtttccattggattttgcacagatggcgcatttaataaacttaatcgaaacttaaataatattaatacttaaaaacaaaaaaaaaatgagaattctacccttttatttgatcattaaataatactactaaatattttttttttttcaacgttacttgctattttacacgctacagtttaaatgaaatggtgtttaaattttaacattttcgaaaatccattttgttaggcaactgttgacttcagttttgcctttaaagtcgccatccttttgatctacgtatttagtgtcccatctgcatgtacttctgttgctctgccgaacccttctccaaaaagtaactgcccctaaagaaaataaaaggaccataacagaaaacaatgctccccaaatataaaattggtggccatcaaagggggagagaatccttgatactggggtagcaaggatatgcaggcggcaggttgtcaaaacaaacaaatataataaaataaaacaaagagccaacgaagcaaaagtatatttcgatgatttctcaactttttcttcattcggcttcactagcttctttgtttgcgcagcgtaaaaagttttgaattattgtgttttagcatcgtcttagaaaaacccatcaggcaagttggacctagcatacttgacagcctttattattagataaacccaaaatttttgaaaacggcttaaatatttgacttaagttagatactcccaaaattcttggtgaatgcattgcccaaactatgccctacagaagcagcagctaagcaccgagctctaagaaccatcttcagccatgctaatcaatgatgccactagagatcgtcccatctatcaggatatccagcgtcttacagatgcccaactgagtaccatgtgcaaaagccacggtctcattctgggtcccataacttttcaaaatagacgcatggcagagcgcaagctccatatagcaatgatcacagagcgggccaagtaccgggcccatcagcagtttgccctggagtgcaacatgaaaacccaagttccgcctgcgcagcaaaactacggcttagtggacgtactgccccagaactattaccaacccatgccaccacaaacttactggccatctccgggcaccaatttgcgcagcccacctccgcctagttggaatacccaaaatcgtcgggagcgaacggacccggtgctcgagccacgtcagtacgttagttggaggcaacagaacaggaaccaaaaaaatactgaaaattctggtaataattttctgggtttcaagatgcccttttccctgggggctgccagggatctcaggtcaatgattaccagctccatcaagcgttttcagggaggagaagcggagaacgcgcccgtgaaattccaggatgggccagtgcagaaaagaggggagaagaagaccacgcacgaacatgaagaatattatcaggagtattccgataaagatagcgtgagaaaaccatccacctctgaccatgaaccggatacgctatctggtacttcagaggatgaaggccaggaaattgagaggaaggaccttactacccaagactcctatccgtatccctttagctttcgggaaattaagagacaaatcaatggtgcggaatcccgacatgaactacgcgactacaagagtttcattagcctatcgagtgtttatcacgagttcgaacgccaagtgccaatggcacggactgcaccatctgtggattcgaagccacgcttcagctggtggtggcagtggagggcgaaggcgggagatgagcgaattccggaggcggagcgaaccaccgaacaggatctgctgcaggagcgtgagttgaagaccatcaactacctgagcgaggcgccttcgcgtgcggatgacggtatactggagttgatgggcagggtagagctccgcgatgacagcgaggaggaggtggggctggaagacactcaaatagcacggggatcccgatcctgggtgggcttctgccggcacatcttccacctgctctgttgcgatcatcacggaaaactcgacccggaaaagctgcgctgcagtttcttctgctgctgcatggccttcggtgtctacatgggcttcaaaatgatgcggtagtgacataaagtgggcaattttatacgtgtgtatgtccatcagtattcaggaatttatgcatatctcagttgagaaaacgatgtgcatcgctttgttgtattcatcgtaatcatctgcctttgttttcttatgttgagatacgaactatattcttaatacactacagtgcaaaaatcctttcatttcaaattggatgaataactggtcagaactggctattttcgtttattttcaatgacgtcatttatgacgtaatactatattcatagatgttgtctgcaatttgtaagcaaaatggccctcattggagaacgtagctctttgcggcacctggttccatttgtgacaagtcgtcgtttgcttgccaaattctcacttctaggtggcacggaaatgaaactgtaattatattcaaggcaccctgagaaggaagttctttaagattaaaattattaaaaaggaatatttttgctagattgcaaacatattgctgtttatatcatatttgtaggttttagtaaagtttagtaaataatatgatgtcctacaagactaaatcaattttttattatacttatgtatccccattccaacggcgaaatcaattttgattgcccaactaaccaaacaaaatctaatcaaatgcaattggcgcgcccgtaaactccagcgaggaacagacataaattaaagtttggccataaaacaacaaagagacataaaatgggcataacaaatttaaacagcataaacaattgacaacaaagtgggctcccaatctgaactatagaacagatcgcacggtttttgactccggtcgaattgcagatttgcgtcgagtataaatctgcagctataaaacgagtgacaggactcaattgcctggctggcacacacaaattgagacagtcgttggtttgggcaggactctcagtttgtctttatgccaattcaatttaccgccaaatcgctctgtcgagttttagtccgaacccctgga

SEQ ID NO: 7208 - DNA, 1468 bp, DROSOPHILA
ataaacccaaaatttttgaaaacggcttaaatatttgacttaagttagatactcccaaaattcttggtgaatgcattgcccaaactatgccctacagaagcagcagctaagcaccgagctctaagaaccatcttcagccatgctaatcaatgatgccactagagatcgtcccatctatcaggatatccagcgtcttacagatgcccaactgagtaccatgtgcaaaagccacggtctcattctgggtcccataacttttcaaaatagacgcatggcagagcgcaagctccatatagcaatgatcacagagcgggccaagtaccgggcccatcagcagtttgccctggagtgcaacatgaaaacccaagttccgcctgcgcagcaaaactacggcttagtggacgtactgccccagaactattaccaacccatgccaccacaaacttactggccatctccgggcaccaatttgcgcagcccacctccgcctagttggaatacccaaaatcgtcgggagcgaacggacccggtgctcgagccacgtcagtacgttagttggaggcaacagaacaggaaccaaaaaaatactgaaaattctggtaataattttctgggtttcaagatgcccttttccctgggggctgccagggatctcaggtcaatgattaccagctccatcaagcgttttcagggaggagaagcggagaacgcgcccgtgaaattccaggatgggccagtgcagaaaagaggggagaagaagaccacgcacgaacatgaagaatattatcaggagtattccgataaagatagcgtgagaaaaccatccacctctgaccatgaaccggatacgctatctggtacttcagaggatgaaggccaggaaattgagaggaaggaccttactacccaagactcctatccgtatccctttagctttcgggaaattaagagacaaatcaatggtgcggaatcccgacatgaactacgcgactacaagagtttcattagcctatcgagtgtttatcacgagttcgaacgccaagtgccaatggcacggactgcaccatctgtggattcgaagccacgcttcagctggtggtggcagtggagggcgaaggcgggagatgagcgaattccggaggcggagcgaaccaccgaacaggatctgctgcaggagcgtgagttgaagaccatcaactacctgagcgaggcgccttcgcgtgcggatgacggtatactggagttgatgggcagggtagagctccgcgatgacagcgaggaggaggtggggctggaagacactcaaatagcacggggatcccgatcctgggtgggcttctgccggcacatcttccacctgctctgttgcgatcatcacggaaaactcgacccggaaaagctgcgctgcagtttcttctgctgctgcatggccttcggtgtctacatgggcttcaaaatgatgcggtag

SEQ ID NO: 7209 - protein, 442 aa, DROSOPHILA
MLINDATRDRPIYQDIQRLTDAQLSTMCKSHGLILGPITFQNRRMAERKLHIAMITERAKYRAHQQFALECNMKTQVPPAQQNYGLVDVLPQNYYQPMPPQTYWPSPGTNLRSPPPPSWNTQNRRERTDPVLEPRQYVSWRQQNRNQKNTENSGNNFLGFKMPFSLGAARDLRSMITSSIKRFQGGEAENAPVKFQDGPVQKRGEKKTTHEHEEYYQEYSDKDSVRKPSTSDHEPDTLSGTSEDEGQEIERKDLTTQDSYPYPFSFREIKRQINGAESRHELRDYKSFISLSSVYHEFERQVPMARTAPSVDSKPRFSWWWQWRAKAGDERIPEAERTTEQDLLQERELKTINYLSEAPSRADDGILELMGRVELRDDSEEEVGLEDTQIARGSRSWVGFCRHIFHLLCCDHHGKLDPEKLRCSFFCCCMAFGVYMGFKMMR

SEQ ID NO: 7210 - DNA, 6291 bp, DROSOPHILA
aataaatttcgtcctcttttcgctcatcatcaattttgtgctagtaatatggctgacagccgaaaagtatgccatagccatttttattatgcgaatgctcgtgcaaggggatgaaaacgttgagaagcaagcgaaataatgaagagagacagcaacataataaaaatcaaagtaatgttcaataatagacgaacgatttcggacatttcactaatgcattactttaattcaataacttttgggcaaataaattagcgcaattctttgtattgtaccaaaataaataataataccttatttattattactatacaagtcttgctagttaacagtaaaccatctggcgcattctgttccacaagttatataatataattgtgaatacaaattctaaagctcattgattgattggcctgataactgtttagatgttacaatatcatttggttttaaattcatttcctcccatcgtgaaattataaaaaatagctagtcattctaaacgaaaaacacaaagttctggaatatttttcttttaagcgaaatcgtatgataatttataccgtggaggtttgccaaataagctacaaaagcaatctatagtttcataaattactaaagagtatcttaacgagataaacaatattataataaccccacccggcataatgaaatctccacatgcaaatgcaattttattcaagtacttttcgtacttagtacttagttattgcgtttaagactctttgttattgatttccttctctttctggtttccctattgaagagattatctatctatctcgctctgactttatcagcacttatcagtgttggcaatgagcttttaactactttatgcctatctactttttctcttaaaaccatcccatactaataactacataatacctcaatcatatacttattatgattttgctccacctaattaattatataaaacaaggtatactatgtggaaattcttttaagttataaagccagctgtgtgtatcagttcaaaccgttaggtcacaaaaattttatttattttaatttaaaaaaaaaattattaaattttcggtctaaattgtgttattgttctttatatggctcctaacagttaaaaatcttatagataagggcgaccatatgtagctatttttggctatgttcttctgacagcacttgtggcgtggcgcgagttcccctctagacacttaaatattcctaagtagttttcgcgagcggcaaagctacgaaatcgtttcagttgtccgtcgaccgctgaacaattaagacgcagttctagttttgcgctctcagtacttttctctagtttttctatccggaaaagtataaaaaataatctattcaaaatgctgcgcgttttgaagaccggtgccctgctgcgttcccaggccaagaacttcgcagcagctgttgcgaactactcctccctcccgcagccacagacaacgcccgatatcctctacaccggggtaagtcctaatcctaactcaaatccaaaaaaaaaaaaaaataaaaagtgaaaagcattataaataaattgcggcatttgtagcaatcgcacttgcaatctgagtaaagaactcaacaggaaagcaagcatttgacttgtttttgagctgaccttgaggcgagcaactacagctgttatcgccctagagcccctcctcaaataccctacatatgcgaatccagtttttaggttctccggtgtaggtcttccccatttcgattttaacgaaaagaaattggcaaatcagcgcaacgcaagcgagtctcaccgcattcagatcacgtacaccaaatgtttatcggcagatgtaggggattgtaggggattaggctgcttaagcgaatcgaaagaccggcgactaaaataaatatacaaaggcgatatcgaaaaagcaaaaacaacaatcgcatatgtagttcgccggctattgttgttgttatttctgcttcagcttctcattgtttgccatacccggtttctttgttacgtcagcagtggcgctcgcacacgcaaaacaaaaatttgtttgccgcaaattctcatcatttattcttctcatcgcctcgcgctttcatttcttctctagggaaatttgcataaatttaaccattgtcattttttatctttagtgtcaccaattaaaactagcgttcgttcgatttaattgaaaaggaattgcggttaggaagcgagccaaatgtggtttttgtccagatgttaaatgggatccaatgaaattagagcagttcgtatatagtaaacatttttgcagaaaaaacttgaaaatccaatgtgcacggtttttatttgtctatatatatttcagaatttttaaagaaactcctagcttacatcgctcttaaactgtctttaaataattgttagtgttctatgttttccaaaaacaaggaagttcttaaaaatttgtatataataaatatttttgcaaatgaacttgattttcaaatatgcatgtcttgcataccaatatatttttgtttttaagtctaaaaatgaaatcttgcatacctcttaaattggcttagaatagcaaataacatatatatagaccatatatgtacatatatgctgaaccctaaagcaaaatatttcaattttacaagaattgagcattcgtctattttgagtgaactgcatattatgcaacctttatagtacttatacatatgccataatctgagaatctgctttcataacaagaaatatcagcccataatgtctcgcgcaccacaaacgttctaatctcttgatttatcttattgtatttgtgtttgttggcataggcagtttccacttcttatcaccggcagccctattattttgggggtctttactgggcgagataacatggcacacttataagattggcttccctaatcgaaccagtattagactcgtctagccagacccccgaaaactaatgcacacgtgcgtcgtcgctatgtttatattttgctatgtctggcggaaagttttatattcgcaagcacattgtgaaattcaaaagtagatgtatgcaaaaataaaaacaaaaagaaataaaaatgttctataaaataggatgacgtgaggggttggacgcgagggctcacttcgtttcaattttaatcagttagccggtaaacgttttagattacccagactgggggattgtcagattcaggtagccatgcgaacgaaacaatcagtcaattgcgatagaggaataacacgcacggcaggcaataataacaaataacagcagtcaagggcttatcatatagaggagtggcttgtttgtcaatccaacaaaacgatgtaaaatacaaatgaattcaatagaagagattgtgaatatgatatggcactaattgaagctgttaactacttattgcaggtatttatcaacaacgagtggcacaagagcaagtcgggcaaaatatttgaaaccatcaacccgaccacagcggaagtcattgccgaaattcagtgtgctgataaggaagatatcgatattgccgtccaggctgcacgcaatgcattcaagtgagtgtgcaatttggatataaatcgactttgcttattaataacaactctatgatcactaggttgggatctccatggcgtcgcatggatgcctcggagcggggtcgcctgctctaccgcctggctgatctcatggaacgcgatcaggtctatcttgccgtaagtatcaagaaatattttaataattcaaggtctttagttggaagtttaaaatattaatatagtttatatatacttatatgcttatcaaaatttaattttccgacagagtctggagacccttgacaacggcaagccctacagcatgtcctacaacgtggatctcccgactgccatcaagaacctgcgctactttgctggatgggcggacaagaaccatggcaagactattcccatggacggagatttcttcacttacacccgccatgaacccgtgggcgtgtgcggccagatcattccctggaacttccccatcctgatgatggcctggaaactgggtcccgctttggctaccggcaacaccattgtactaaagcccgctgagcagaccagtttgactgctctgtacattgcccagttggtgaaggaggctggcttccccgaaggtgtggtcaatgtggttcccggatttggaactgctggcgctgccttggcgaaccactgcgatgtggataaggtggccttcaccggttccaccgatgtgggcaaacttatccaactagcatcgggaaatactaacctaaagagagtgacactggagttgggaggcaagtcgccaaacattattctgtctgacaccgatatggactacgccgtcgagacggctcactttggtctgttctttaacatgggccagtgctgctgtgcaggatctcgtactttcgtggaggacaagatctacgatgagtttgtcgagcgcagcgcggagcgggctaagaagcgcaccgtgggcaatccctttgatctgaacactgagcaaggtcctcaggtgaacgaggagcagatggaaaagatccttggaatgatcaaaacaggcaagaaacagggcgctaagttggttgccggtggcagtcgcccagagggcctacccggctacttcgtccagcccacggtgttcgccgatgtccaggatgatatgaccattgcaagggaggagatctttggaccggttcagcagctgatccgcttcaagaagctggatgaggtcatcgagcgggctaacaactccgagtacggattggccgccgccgttttcaccaaggatctggacaaggccaactacattgtgggtggcctgcgtgccggaactgtgtgggtaaacacctacaatgtcctcgctgcccaggctccgttcggtggctacaagatgtccggccatggacgcgagaacggagagtatgctctgtccaactacacggaggtcaagagcgtcatcgtcaaggttgcccagaagaactcctaagaaggaccagatatttcctccaagagggacgcttaatatggttcgccctacttaggtgctctaaattccggcgataatctacatctctataatgaacatagttttaaatacatctgtttgatatacctaactacggccagtttttgtattttttccattcggttagttttctttaagtgtacatttctatctagtacatatgtaatgcagctataaatcagtgcagggacctggtcaaacaattcaaaagttgttttatttacgttctatcttactcccctttgccctacagagttttatgtgtaattccaatgtttgccaatagattcttggctttgtttatagcacactctgaactgaatgtcattattttgcttatcccacaacactgagataggacaaacaagcacacagatacttcctcacagcttacactgcacgaaacattgattggtttagcatagagccaaaagcaaatggataaagtgagcaaccagcacacggagctcagggaactagcttgctcgtccatctaggagaaataagcttacatttatttgcatttattggcattttccatcgttttgttttagcctcgaatgcctgagtgtgtgtgtttgaatctgtgtgtggatttctgtggcactaagactcacatatcaggacgtactcaaacttacacagacacatcgggtcgtttttcatccaacatcatggcatacaaaaaaaaattggaaaaagttttccattagattggacagcagctgagcgtgtcaagtgctttgcggttagtggagaacttgttctcttattttccactttgttgttttcgaaattgaataagcgcatttgtatgcaatttatttaaaatttgtatttcaatttttgtgatgaccaaaggccaaagtgcaagtggttatttgttttatttattgcctagctttgaaaatgtcacttacgttgcggaaaagagtccagaatcttatttgcggtcttgtggaaaaaaatttaatttaagaaatcgattcaattaaactaggaatgtttatgtatgtattgaatttaactgaatattgccaagcgtgtttgaattatgagattaaatatttcatatcagtttgtatttaccgtagagtgcaaacttgtataaaacaaaaatgtattttgcattccgtttgcaggcgctgcaaacctaattcgatttgtgccaccttttcgtattgaacgaaaaaccagcaaa

SEQ ID NO: 7211 - DNA, 2182 bp, DROSOPHILA
gccagctgtgtgtatcagttcaaaccgttaggtcacaaaaattttatttattttaatttaaaaaaaaaattattaaattttcggtctaaattgtgttattgttctttatatggctcctaacagttaaaaatcttatagataagggcgaccatatgtagctatttttggctatgttcttctgacagcacttgtggcgtggcgcgagttcccctctagacacttaaatattcctaagtagttttcgcgagcggcaaagctacgaaatcgtttcagttgtccgtcgaccgctgaacaattaagacgcagttctagttttgcgctctcagtacttttctctagtttttctatccggaaaagtataaaaaataatctattcaaaatgctgcgcgttttgaagaccggtgccctgctgcgttcccaggccaagaacttcgcagcagctgttgcgaactactcctccctcccgcagccacagacaacgcccgatatcctctacaccggggtatttatcaacaacgagtggcacaagagcaagtcgggcaaaatatttgaaaccatcaacccgaccacagcggaagtcattgccgaaattcagtgtgctgataaggaagatatcgatattgccgtccaggctgcacgcaatgcattcaagttgggatctccatggcgtcgcatggatgcctcggagcggggtcgcctgctctaccgcctggctgatctcatggaacgcgatcaggtctatcttgccagtctggagacccttgacaacggcaagccctacagcatgtcctacaacgtggatctcccgactgccatcaagaacctgcgctactttgctggatgggcggacaagaaccatggcaagactattcccatggacggagatttcttcacttacacccgccatgaacccgtgggcgtgtgcggccagatcattccctggaacttccccatcctgatgatggcctggaaactgggtcccgctttggctaccggcaacaccattgtactaaagcccgctgagcagaccagtttgactgctctgtacattgcccagttggtgaaggaggctggcttccccgaaggtgtggtcaatgtggttcccggatttggaactgctggcgctgccttggcgaaccactgcgatgtggataaggtggccttcaccggttccaccgatgtgggcaaacttatccaactagcatcgggaaatactaacctaaagagagtgacactggagttgggaggcaagtcgccaaacattattctgtctgacaccgatatggactacgccgtcgagacggctcactttggtctgttctttaacatgggccagtgctgctgtgcaggatctcgtactttcgtggaggacaagatctacgatgagtttgtcgagcgcagcgcggagcgggctaagaagcgcaccgtgggcaatccctttgatctgaacactgagcaaggtcctcaggtgaacgaggagcagatggaaaagatccttggaatgatcaaaacaggcaagaaacagggcgctaagttggttgccggtggcagtcgcccagagggcctacccggctacttcgtccagcccacggtgttcgccgatgtccaggatgatatgaccattgcaagggaggagatctttggaccggttcagcagctgatccgcttcaagaagctggatgaggtcatcgagcgggctaacaactccgagtacggattggccgccgccgttttcaccaaggatctggacaaggccaactacattgtgggtggcctgcgtgccggaactgtgtgggtaaacacctacaatgtcctcgctgcccaggctccgttcggtggctacaagatgtccggccatggacgcgagaacggagagtatgctctgtccaactacacggaggtcaagagcgtcatcgtcaaggttgcccagaagaactcctaagaaggaccagatatttcctccaagagggacgcttaatatggttcgccctacttaggtgctctaaattccggcgataatctacatctctataatgaacatagttttaaatacatctgtttgatatacctaactacggccagtttttgtattttttccattcggttagttttctttaagtgtacatttctatctagtacatatgtaatgcagctataaatcagtgcagggacctggtcaaac

SEQ ID NO: 7212 - protein, 520 aa, DROSOPHILA
MLRVLKTGALLRSQAKNFAAAVANYSSLPQPQTTPDILYTGVFINNEWHKSKSGKIFETINPTTAEVIAEIQCADKEDIDIAVQAARNAFKLGSPWRRMDASERGRLLYRLADLMERDQVYLASLETLDNGKPYSMSYNVDLPTAIKNLRYFAGWADKNHGKTIPMDGDFFTYTRHEPVGVCGQIIPWNFPILMMAWKLGPALATGNTIVLKPAEQTSLTALYIAQLVKEAGFPEGVVNVVPGFGTAGAALANHCDVDKVAFTGSTDVGKLIQLASGNTNLKRVTLELGGKSPNIILSDTDMDYAVETAHFGLFFNMGQCCCAGSRTFVEDKIYDEFVERSAERAKKRTVGNPFDLNTEQGPQVNEEQMEKILGMIKTGKKQGAKLVAGGSRPEGLPGYFVQPTVFADVQDDMTIAREEIFGPVQQLIRFKKLDEVIERANNSEYGLAAAVFTKDLDKANYIVGGLRAGTVWVNTYNVLAAQAPFGGYKMSGHGRENGEYALSNYTEVKSVIVKVAQKNS

SEQ ID NO: 7213 - DNA, 3935 bp, DROSOPHILA
atttaaaagaccgttttagaagtaaaagttatcactctttatcggtagatttggttcccccatctgtgcgctctctatcctgccagcttttcttcatttcttgcagcttttcctgtcgccgccgccgctcagtggactttctctgctcttgtgccttgacttgcgcggcaattgaatgctctccgtttagatgcacgtccagtttttccagtagaagtttacgagcctccactcgattctttgatgctagacgatgtgtgtgacacttgaccgttatattggtgggtagatggcgcaagaacacgcagttggatgtcttgttgacagcctggccaccaggaccactgccgcgcatgaaggtctcctcgatatccgactcctgaagcacgggaaagcgggagtagtccagattggacttgcagcgcacagcggtcggaggcagcgccaggaatcgcaccagacctcgcagcattcctacagaatgcgtcccttctttagcagggtctctccgcgctgaaatataagttcattttgtaaatcagttatgaaatacgaaagtggcacttaccttaaagctgaattccacttccacgggattcgtaagggaacggttgtcccgaaactcgtggcgaactcttcccagaaagtagttcttgtcggtcagctttaggtgattgccgtaacgaattaaatgcttgtataaacgcaaaatttgctgccgcgaaggttgaaccattttcatatttcactctcacatgtgtgacagtgctggttaacgcagaactacaacaggttggcagttcagcaaaaacacaatcagctgcggcgttgtgcgatcaaaacaaaagcaacagttataaaaataaacatttgaaaaaaacgcaatgataagattataaatcttaagtagcccacaatttacgattcccccaccactgttaaaaattcctagtcacggttaaacagtgtattaaactctaaataggtaatgcatgtcactttaacatctattttattatctacagttacgctatacctgaaatgcctgaatacttttacattaggctatcaattgattactccttgggcaacttgtcaagatcaatgccgtcatcaatggacacccctgtcgcctggctcagctccagcatttccttaacctggtgagcaacctccctgtccacaacttctccacctcgattcatggtccgttcgatgatttcctcgtcagacagttgcaaggcgaacatctcctcgggcgagatgtccaagggatccaccaaactcatgaggaaactggccgatatggataagctgtacggcaggaaacgcacgtactccttcagaagctcaccgcgactaagaaatagcgtaattagtattatattatttcttggcagtaaaaagctttacaggattatcttatcttatcacatcgagcacctaatgagtatttttagatttttgatttgcattcatatcgcttgtttgaaattttaaaagcttatgaataatgaataataataacaactcaccttaggaaatccggaacctcctccttggcgtgctccctatagctattatgaagcgccaaggtgtattcacagaagatggcctcgaagtttggatcgcgtacctcggcaaaaatggacacggctagaaagacgttgagatcgaccatgggagaggagactcgcaatgtctggtagtcgaacatcatgatctcctgcggctcctccttgtcatcgtacctgtacgccacattattcctcacataatcgccgtggcacagggtggccagtggctccctgggcgccacccgttgcctaccgtattgcgaatagtccgagatcatgaaacagaacttcttaacaaactcctcgtcgatctgtggctgataggtggccaccgccttggccgctcgatcgatgctcgttttcatggtgagcttccattccggatgaatgttatcgttggcatagcgagattccttcagattgtcagtcagctgggcaaacttttccgggttcttgtgcttcatggcgtacgcaaagccatggaaccttcccaggtaactcacggcaatcatggcgtgctgcagactcagacccacacgatccttggtgacccgccatccctgctccgcgaaattctccagaatggccacagccgaatgctggttcaactcgccgtaatagtacttgggtgcggcaaacttgccatcggtgaacttctgaaactctggcagaatttccgtatagaaatttatctcgttggtaaaaaggggcccaaactgtatggattcatacatttctggtggcatagcaggtgttttctacaaaaaaaaaaaaaaacaattaattattggtattctggggtcattgcatgccaaagtaaacttcatcattagatgtgatttattttgaattcaaaatcaattcgctttgttcttttgttgagatgcctccctctatttcacaatgtttgccataaaacccacactctcactaagctatctgagtttgctggaaaacaaaactggtaagtagtacgcagttaaggcacttatataatataatttaaattccgcgagtatagtaaatcttttcgttgtgtttttagatatccagatagattgtttaagatttatttatactatgtgaatggaataaacctaccttaaccaccatttttcgctgaaacttttgcccgtcgtattcaaaattaatggttgtccggtagcaaaaagttagcataaaggcctccgagtggccaattacatcaatgtcgatgtcccccacatggaatgtggtcaccttggactcgctgtagttgtccaccaggcgcccgttcctcagaattgacggaagaaccgtgtatctcagccattgcctctcagcctcgatcttctccatttcgtcggtactgacgatcccaaccgcttcgcttgtggatagcgaatgagcataaaccatttcatatagctcattttgtactactctccaaaagctcattcgttgttagagattacacgataagagcgaattggaaatgaaaagctttctaatcattaaaagcactttatggtttatagagaagcagtacctacctaatgattagcatgatgcaatttggcatgttaaaatgatatgataagatatcatgacgcaaagatagggggatacgctatttattagttttaattagttttttttttttgtttattgtgtgcaaagtttaatgattcctttggattaagttctattttccataatcacaggtatcgatatatttttagtcaaaatttccagttttagaaaaagctatcctaccgttgcagttcgactatcgaccaactaccaatgggcctcaactggtatttactcaaaacgaccgggtcaatgaccagggccaacacctacgttcgaaagttcacgaatggatcgcagcaaagtcgagatatcagcatgccatccaaagtgccaaagaggacaagtgcttcgatcaggatcacggatttggataacatgtcatatatgtcctcttcttcgcgaaaaggcaaaataacgagcggccgacacgatcagttgaaaatgtcgaagaatgctcaacacgacgatgtcgtctgtccaatgcaagcgagtaggaagcccatcgaggagcccactgttcgggattcgccacaaatgcgcgagttcttcgaggaagtgcgtcagcgaaagctcaaggattactatcttcagatgaaggctgcacaaagaaatccagcgatgtcccatgtgtgtccggattgtggttttgtgaagcgggataagaaggatctcagcaaaaacatttactgcacgggggataaacgattgaggataaaagattgtgatcggcatggggatctcacctggctgtggaactcctccgctgcatatcctcactctgca

SEQ ID NO: 7214 - DNA, 1305 bp, DROSOPHILA
ggatcgtcagtaccgacgaaatggagaagatcgaggctgagaggcaatggctgagatacacggttcttccgtcaattctgaggaacgggcgcctggtggacaactacagcgagtccaaggtgaccacattccatgtgggggacatcgacattgatgtaattggccactcggaggcctttatgctaactttttgctaccggacaaccattaattttgaatacgacgggcaaaagtttcagcgaaaaatggtggttaagaaaacacctgctatgccaccagaaatgtatgaatccatacagtttgggcccctttttaccaacgagataaatttctatacggaaattctgccagagtttcagaagttcaccgatggcaagtttgccgcacccaagtactattacggcgagttgaaccagcattcggctgtggccattctggagaatttcgcggagcagggatggcgggtcaccaaggatcgtgtgggtctgagtctgcagcacgccatgattgccgtgagttacctgggaaggttccatggctttgcgtacgccatgaagcacaagaacccggaaaagtttgcccagctgactgacaatctgaaggaatctcgctatgccaacgataacattcatccggaatggaagctcaccatgaaaacgagcatcgatcgagcggccaaggcggtggccacctatcagccacagatcgacgaggagtttgttaagaagttctgtttcatgatctcggactattcgcaatacggtaggcaacgggtggcgcccagggagccactggccaccctgtgccacggcgattatgtgaggaataatgtggcgtacaggtacgatgacaaggaggagccgcaggagatcatgatgttcgactaccagacattgcgagtctcctctcccatggtcgatctcaacgtctttctagccgtgtccatttttgccgagcttctgaaggagtacgtgcgtttcctgccgtacagcttatccatatcggccagtttcctcatgagtttggtggatcccttggacatctcgcccgaggagatgttcgccttgcaactgtctgacgaggaaatcatcgaacggaccatgaatcgaggtggagaagttgtggacagggaggttgctcaccaggttaaggaaatgctggagctgagccaggcgacaggggtgtccattgatgacggcattgatcttgacaagttgcccaaggagtaatcaattgatagcctaatgtaaaagtattcaggcatttcaggtatagcgtaactgtagataataaaatagatgttaa

SEQ ID NO: 7215 - protein, 402 aa, DROSOPHILA
MEKIEAERQWLRYTVLPSILRNGRLVDNYSESKVTTFHVGDIDIDVIGHSEAFMLTFCYRTTINFEYDGQKFQRKMVVKKTPAMPPEMYESIQFGPLFTNEINFYTEILPEFQKFTDGKFAAPKYYYGELNQHSAVAILENFAEQGWRVTKDRVGLSLQHAMIAVSYLGRFHGFAYAMKHKNPEKFAQLTDNLKESRYANDNIHPEWKLTMKTSIDRAAKAVATYQPQIDEEFVKKFCFMISDYSQYGRQRVAPREPLATLCHGDYVRNNVAYRYDDKEEPQEIMMFDYQTLRVSSPMVDLNVFLAVSIFAELLKEYVRFLPYSLSISASFLMSLVDPLDISPEEMFALQLSDEEIIERTMNRGGEVVDREVAHQVKEMLELSQATGVSIDDGIDLDKLPKE

SEQ ID NO: 7216 - DNA, 3413 bp, DROSOPHILA
atgaaagatgttaatatatttaatattgtttacttataaacggggaatacaatatttctaaaactttttacgcaaaatcgattgaatattggttacttttgattccgtacaataacatacttgttaataaacaaatttagtgactacaattactacgttcactcctttctcctgccaaaaaacattttattgatgcagaagtctacctgctcattaatgcatcgccctgtgtcctaaaaatgttagtattttatgttgggtacctgcccatgttttttgcgtttcagttattaagtcaactaatgatgcacctgataatgataatgaggtaaaaggaaacccttgttcgctaatcctccaaaagtggggtttttcgaatttctagttaaatttctaggtaagatcatagatctccttattgcgcattgaatgcaaatgcagagaggacgagagagagcagctgcggagagcacgatgcacacaggtaaacatatttgaatatatggcccacactagagcaaatataacggcatcgcttcgtttgcggcttcgattggtgcaagtgtacgagttcggcacgtgaggcaattctacataaacaaggcgaaacctgtttagccgagtgccgcgattggtcgacgcatatacctgaatgaacatgcatactctcggcggaacgcccgagagagcgttctcttttggcagcttcgtgtaatgagccgagtgccgagtgcaggggcagtataaaaaggccgcaccaccgccaaactcgctcagttattcccagactctaaccgattcacataaccatctctcccaacgcaatatacccgaaatataaccgatattcaatcgctttgcttaacggaacacgcgtttggtatttgtgcatcgatcgagtatttgtgcctgtgtgaacatgacacactgaaaacaaagtgacgaaaattaagaacattttacaacaattccggtaaactatcaataaaaagccagtaaaatgcataccgtggaagacatgttggtggagaaaaactacagcaagtgcccgctaaaaaagcgcccagttaattaccagttcgaggcgcctcaaaatcacagtaacaccccaaatgagccgcaggatttgtgcgtaaagaaaatggaaattctggaggaaaatccctccgaggaactgatcaacgtcagcgattgttgcgaggacgagggtgtggatgtagatcatacagatgatgaacacatcgaggaggaggacgaggacgtcgatgtggatgtggactcggacccaaatcagacccaggctgcggctttagctgctgccgcagctgtggccgccgctgcagccgcctccgtggttgtgcccacgcccacatacccgaaatatccctggaacaacttccacatgtcgccctacaccgccgagttctacaggaccatcaatcagcagggtcatcagattttgccgctgcgtggcgatctcattgcgcccagttcgccgagtgactcgctgggctccctgtcgccgccaccacatcattaccttcatggtcgcgcaagctccgtttccccgcccatgagatctgaaatcatccatagaccaatcggcgtgcggcagcaccgtttcctgccctatccacagatgcccggttatccgagcttgggcggctatacccatacccatcatcaccatgcgcctatctcgccggcttattccgagaattcctactactccatgcgatcgatgacgcctgaatccagctgcagctcctcgctgcccgaggatctatccctgaaacacaagaacctgaacttgaatctaaacactagccagccgggagagcaagcagcagccaaaaccggggatatgtcgcccgaaactatgccgaatgcctccgccaagaaggacaagaaccagccgccgcgttaccagtgcccggattgccagaaatcttactccaccttctccgggctgaccaaacatcagcagttccattgcccggccgccgagggtaatcaggtgaagaagtccttcagctgcaaggattgtgacaagacctatgtttcgttgggtgccctcaagatgcacattcgcacccacacgttgccctgcaagtgcaatctgtgcggcaaggccttctcgcgaccatggctgctgcaaggacacattcgcactcatacgggagagaagcccttcagttgccagcattgccaccgggcctttgcagatcgctcgaatctgcgagcacatctgcagacccactcggacatcaagaagtactcctgcaccagttgctcgaagaccttctcgcggatgtccctcctaaccaagcattcagagggcggatgtcctggcggcagtgcaggatcctccagcagcagcgaactcaactacgccggctatgccgagccgtaaggcaatatatttatatatacattatatagctgagatcccagccatgttccaccaaaaattagttcctagctctcttaggcggctccaagttcccgaaactcccagtgcagacacacaacttcaagcagaatttcacttgttttttaatttctagtcagcattttctcccagaagagagaaaattaaaaattacgttttaatttgtacaatccggcaacatttttgtaaccaccaccaccaatttgaatagtttgaaccattttaaaatgtgtgcccataatatatcctaaagatgaactttgtaaagtattcttcgatttatcctgtacataatgtattatgtctaactgtagactctaagctgaacaaatgaaacgccagacaatcaatcgtaagcaagacatacatctctatattttatacgatagtatttttagcctagctgtaaaaaccgtaaactatttttgatatgaccactactttttcgcgtacacattgaaaatgttctactgtagcttaagtgaagataagcaaacaacacatacatatattttgatacgaaaatgttttgtaattctaagtaatttattgcatcaagcgaagaaagaaggaaatacattttatttacatacaaaaaaaaaacattgaaaacgtttttatttcattaatgggtgggctttgggacctttttatttcaggataatatgcaagtcgttctacacaaacttagaaaaaatcttttatttttctatatacggtaattatgttaacaataccatacatatatttgaaacagtcttaatttgatactcctatatgccaaaacattgttaatttaatcatatttaagcatggtattttcatatcaacttcagtggttaaatctttataacatttctggtcagctaatgtaatatttgacatatttaaatgtacatatatacaacctttaaatatttatctgttgaatgcttagaccacattttctattgtccacatt

SEQ ID NO: 7217 - DNA, 1413 bp, DROSOPHILA
atgcataccgtggaagacatgttggtggagaaaaactacagcaagtgcccgctaaaaaagcgcccagttaattaccagttcgaggcgcctcaaaatcacagtaacaccccaaatgagccgcaggatttgtgcgtaaagaaaatggaaattctggaggaaaatccctccgaggaactgatcaacgtcagcgattgttgcgaggacgagggtgtggatgtagatcatacagatgatgaacacatcgaggaggaggacgaggacgtcgatgtggatgtggactcggacccaaatcagacccaggctgcggctttagctgctgccgcagctgtggccgccgctgcagccgcctccgtggttgtgcccacgcccacatacccgaaatatccctggaacaacttccacatgtcgccctacaccgccgagttctacaggaccatcaatcagcagggtcatcagattttgccgctgcgtggcgatctcattgcgcccagttcgccgagtgactcgctgggctccctgtcgccgccaccacatcattaccttcatggtcgcgcaagctccgtttccccgcccatgagatctgaaatcatccatagaccaatcggcgtgcggcagcaccgtttcctgccctatccacagatgcccggttatccgagcttgggcggctatacccatacccatcatcaccatgcgcctatctcgccggcttattccgagaattcctactactccatgcgatcgatgacgcctgaatccagctgcagctcctcgctgcccgaggatctatccctgaaacacaagaacctgaacttgaatctaaacactagccagccgggagagcaagcagcagccaaaaccggggatatgtcgcccgaaactatgccgaatgcctccgccaagaaggacaagaaccagccgccgcgttaccagtgcccggattgccagaaatcttactccaccttctccgggctgaccaaacatcagcagttccattgcccggccgccgagggtaatcaggtgaagaagtccttcagctgcaaggattgtgacaagacctatgtttcgttgggtgccctcaagatgcacattcgcacccacacgttgccctgcaagtgcaatctgtgcggcaaggccttctcgcgaccatggctgctgcaaggacacattcgcactcatacgggagagaagcccttcagttgccagcattgccaccgggcctttgcagatcgctcgaatctgcgagcacatctgcagacccactcggacatcaagaagtactcctgcaccagttgctcgaagaccttctcgcggatgtccctcctaaccaagcattcagagggcggatgtcctggcggcagtgcaggatcctccagcagcagcgaactcaactacgccggctatgccgagccgtaa

SEQ ID NO: 7218 - protein, 470 aa, DROSOPHILA
MHTVEDMLVEKNYSKCPLKKRPVNYQFEAPQNHSNTPNEPQDLCVKKMEILEENPSEELINVSDCCEDEGVDVDHTDDEHIEEEDEDVDVDVDSDPNQTQAAALAAAAAVAAAAAASVVVPTPTYPKYPWNNFHMSPYTAEFYRTINQQGHQILPLRGDLIAPSSPSDSLGSLSPPPHHYLHGRASSVSPPMRSEIIHRPIGVRQHRFLPYPQMPGYPSLGGYTHTHHHHAPISPAYSENSYYSMRSMTPESSCSSSLPEDLSLKHKNLNLNLNTSQPGEQAAAKTGDMSPETMPNASAKKDKNQPPRYQCPDCQKSYSTFSGLTKHQQFHCPAAEGNQVKKSFSCKDCDKTYVSLGALKMHIRTHTLPCKCNLCGKAFSRPWLLQGHIRTHTGEKPFSCQHCHRAFADRSNLRAHLQTHSDIKKYSCTSCSKTFSRMSLLTKHSEGGCPGGSAGSSSSSELNYAGYAEP

SEQ ID NO: 7219 - DNA, 3434 bp, DROSOPHILA
acttgcaatattggtatcaaactctcgcacacgcgaattaatgcgagactatatcggttcggagcgtactagttcggatcgaatcgagtagtggagggagcggtgtggacgctgcgaagctcgaaagaagactgaacgcgaccagcccggtggttgtcaatatgaatacgttgtggagtggactagcagtgctttgggatgttgcaaaccatgccgaaacgaagcaaaaccactggcctggctgcacgccgtactgtggtaggtattcggcaggtgttggtacagacataaatatctattagctcggctaatctaggcggaactggccgtctggcctaagaggcttaggctgggtccaagtgatgggccaagtagttgacttttgactacatgggcgggactgctgggtaccacaagatgcaagtcccaggcccaggaactctttggcatattttgggaaacattaactttgccatttggacgagttttattgactttgctgcttttcagcgaataagatatattggcatcattatggatgcaaaattagcaacggatcgaattggtttccattacacaatggtccagctttgcattcgcagccaccgcggcggtggtttccactttgtttgccttaattaggtggttatcaatctcctatgcaaatctattgttgcccaatgtcgcgaatattggtaattagtgcagtctttcctgtgatttttgcacacgctaaattatgcatgttaccaattttgttgcaaaaaaataatatgtttgtgtcttccagtcccaactgatggtttcaaaaaggccgccaaagttgaaaatatcgatatcatgcagatgatatatggatacttgtcctgctaaggtagtgctgtcagagttgcttaaactgattagttataataaaccatcagttaattccaggtatgaaaaaaagcgtgcattatgtaaattgcatagtgaaattaaatcgacaatttgtaatctcgctgcgaatttccaggaatctccagccctggccggcttatcgatacatctggcacaaaaggcgtgcagagttgttctccaaatttcctgtcgcgaattttattcatttataattaattacaagccatggccgaactggacgatttcttcgcgaaaaaggacaagaagaagtccaagaacaagactaagttcgtgaccgccgacgagatggtgaagaacctggaggacggcaccaagcgcgaggtggtcaagcccaaaaaacctgaggtagccgctggcggcgtggcagtagtaggcgaaaacgagaatagcggcaccaaggtgccagagtccgccccggtgagtccgaatctcagtctggtgaaatcagcgcccgttggccacctagggcatgtttataagttcattgttttgccgctccgtagcccgtcgaggaggaatggaaggagttcgaggaggagcagcgcaaggactacagtggcttaaagatcggccagctgagcaccatgtgagttttcgaacgttacgccgaccgcctaatccatgagcaggagaaaaggccacttccattgatttactttccatttgaccccgcatattgcgaaaactcgctttctatagctcttcggcccgttccagaactgcccaggaaagttccgagtcgcaagctgctcgagtgccctctgccccggacggcggcaactacaatgaggacgatgaggacagcaatgggtatgacaacgcggacgtaaacaaggagcgcgtcggccacggaccctggaagaaagttgtcccagccgaggaggtaatgcagattccggtgcccgtggaggtggaaaagcactcgtccaagacctacgtttcacccgcgctacgatacagcgtaagtaagaagagcgagacgatccagatcgagtttaatcaacttctctgcagcagcaggccggaagtggactgggaggcggccctactgggggggcattgcgtccacgacgcgccgcccccgacatcaccaataccgagtttttcccaaccttaagtgcggcgcgtccggaggaacagcgcaagaagaaaaacgaacccgccttcgaagaagtccgtcacggaagccgtttccagcgtgttcaggagtccacggctgccccggtggcggcctccaaccgattccagtcgcttgacgacgaagcaagctaggtcagcccacgccaacggtgctgttgctggccacttgaaccgctatctaccacagtgtccgctgccgagctcaagccatccaaaggttctatgccagcacatgcagattttctaggctttttgattcatataaaccaccactgctactcttaccctaaaccacaaactactattgttcatttcgttttgcattttgaaaaatggattaatgtaatacaatacgaataatacccatgcgttgaaatccgtttataaacgttacttttttatacgtttccgtttctcacttttccatggcgaggtcttccgggcagctgtccaagtagctgcaaaatcagtaagaaagatcatctctggctgaaacagtgcgtactgacttttcattgtacggcctctccggcgtgttgtggtacgagatcagcagctccttggccagcatcttgtctgggaagttgcgaatcaggtacagccagcactgaatggttctagacataggggcaatagtgagttattacatctggccatcaccccacaccctcatactcattctgttccattaatatggtttgttgctcgcgatcatagtagtccgggtagtcttctagtatgtccagtttggagagcatggtctcgtccacttcgtagacttcgccttctatgtggttcccctcacccgggcgggcgagcagaaatgggatgttgtagcgggttccgacaaccaggggaaacttcgtttccgttttcccccttccaaggaatcgggcttggccgttctcctttttcgtcagccagtggtgattgggctcaccgcgcttcaacgtgccatacacaaagacccttgccgccattctcagcttttcagccattgcgcttcccgccgccaggcttatcagtttcaagcggtatcgtgctatcaaatccgacctgtagattgcgcagtcgacataacccgtccgctcttcttcttgctgccattcgcaccgaatctagcctccgtacaccgcgagaaactgaagccctcggcactgggctgtggaaaattaccagggactgctgtccagcatctttacttctataatagaacgaggggcattttattttattttaaattgcttcagtttatttgctttgtttgtcgaaaactatcaaattacagactacgtttgctaaaacctaaataatgcgtatggtacatatgtatcagtttatatcgtttgcccatatatacgggtatatatcgatca

SEQ ID NO: 7220 - DNA, 1164 bp, DROSOPHILA
gcgaatttccaggaatctccagccctggccggcttatcgatacatctggcacaaaaggcgtgcagagttgttctccaaatttcctgtcgcgaattttattcatttataattaattacaagccatggccgaactggacgatttcttcgcgaaaaaggacaagaagaagtccaagaacaagactaagttcgtgaccgccgacgagatggtgaagaacctggaggacggcaccaagcgcgaggtggtcaagcccaaaaaacctgaggtagccgctggcggcgtggcagtagtaggcgaaaacgagaatagcggcaccaaggtgccagagtccgccccgcccgtcgaggaggaatggaaggagttcgaggaggagcagcgcaaggactacagtggcttaaagatcggccagctgagcaccataactgcccaggaaagttccgagtcgcaagctgctcgagtgccctctgccccggacggcggcaactacaatgaggacgatgaggacagcaatgggtatgacaacgcggacgtaaacaaggagcgcgtcggccacggaccctggaagaaagttgtcccagccgaggaggtaatgcagattccggtgcccgtggaggtggaaaagcactcgtccaagacctacgtttcacccgcgctacgatacagccagcaggccggaagtggactgggaggcggccctactgggggggcattgcgtccacgacgcgccgcccccgacatcaccaataccgagtttttcccaaccttaagtgcggcgcgtccggaggaacagcgcaagaagaaaaacgaacccgccttcgaagaagtccgtcacggaagccgtttccagcgtgttcaggagtccacggctgccccggtggcggcctccaaccgattccagtcgcttgacgacgaagcaagctaggtcagcccacgccaacggtgctgttgctggccacttgaaccgctatctaccacagtgtccgctgccgagctcaagccatccaaaggttctatgccagcacatgcagattttctaggctttttgattcatataaaccaccactgctactcttaccctaaaccacaaactactattgttcatttcgttttgcattttgaaaaatggattaatgtaatacaatacgaataatacccatgcgttgaaa

SEQ ID NO: 7221 - protein, 265 aa, DROSOPHILA
MAELDDFFAKKDKKKSKNKTKFVTADEMVKNLEDGTKREVVKPKKPEVAAGGVAVVGENENSGTKVPESAPPVEEEWKEFEEEQRKDYSGLKIGQLSTITAQESSESQAARVPSAPDGGNYNEDDEDSNGYDNADVNKERVGHGPWKKVVPAEEVMQIPVPVEVEKHSSKTYVSPALRYSQQAGSGLGGGPTGGALRPRRAAPDITNTEFFPTLSAARPEEQRKKKNEPAFEEVRHGSRFQRVQESTAAPVAASNRFQSLDDEAS

SEQ ID NO: 7222 - DNA, 3143 bp, DROSOPHILA
agcctagctgaaccatccctttttgttcattgaattccacttggctatgttcaccaaaatggatgccacacactggtccttgtcccgattttggccgtagtaatcgacaaactcgccatcgggattgaccaggtacatgatgatggtgtgatccacaatataatcgttgtcctcgtcccgcggtccagcgctgaaataaaccctgaaggccttgcacactttgcggatttgttcgacggttcccgtgagtcccagcagtttgggggagaactcttttacgtatttggccaccacctctttggagtcacgttctgggtcaacggtgataaagatgggctgcactgctggcgtttgcggggacttttctgtgaaggtttgagaaacatggttttttttgggtttggaagaaatagtcaggctctacttaccaacttcatcgacgacggcggccatcttctctagctcatcgggacaaatatccgggcagtgggtgaagccaaaatagatgagcagccacttgcctaagaagtcctccgatttgcgaacagctccctgcgaatcaactaattcccaactgccgccgatggctgcttttcccaattgccgctgacgctccttcattctcgcctcatccttctcgctcttcacgtacagcatgaagcccactcctccggctccaagggctccaatgacggccagacttctccaagagatcggacccttgcctttagtggaatctgcgggagcggcataatgacgaattgcgggctgttgtgcccagcgacgacagctgcccactaagcgttgcagggagcgggacatcttacgcccggtttcagaaatttgaaggctttacgtaaatcttctggagaaataaaaatatcgccggtgtcctgctgcttcttcctattcagccagtcacggcgaaacagcatttatttagtacataaagtatatttatttagtatattagttagtttgttagttagtttggtatattttggtattagaaggcggtcttattgattccaacacgtgcggttcaattttgttaaattatttaataaaaacaccggggcaaatggcaagcaaaaatcgcaaggagccgcttctgtacatggaggagtatcgggtgaagcaggatccgcaggactatggactggcggacgatgtattttccgttcaggctttcaaggaaaagctgcacatcaaaatcgtcaggtaaatctcaatagaaattagaatcttacgagtcgattaacaattggtgttcacttctagaaacgacgaagacggcctggagttcgatctgattggcgtgtatcccgccattgcaaatgccttccgtcgcctgatgctcagcgatgtgcccagcatggccatcgaaaaggtgtacatatacaacaacacctcgatcatccaggacgaggtacttgcccatcgaatgggtctacttccgttgcgggctgatccccgtctattcgcataccgcaccgaggaaagcactgaggcggggaccgagcaggatacgcttgaatttgagctgaaggtgaagtgctcgcggcgacgggatgctggaaaagatcagtccaacttcgatgacatttacaaaaaccacaaagtgtactcgggtcatctgaagtggctgcccaaaggaaagcaggcgcagatatacagcgagagtgctgtgaactgcattcacgatgacatactgattgcccaattgcgtccgggtcacgagttggatctgcgcctggtggcggttaagggacttggacgggatcacgcgaaattctcgccggtggccacggccacctaccgactgctgcccatgattaagctgaaccgcgaggtgaccggtaaggatgcgtacctattacagaactgtttctcaccaggagtaattggcattgacgagaatgaaactgcctatgtaaaggatgcacgctacgacacgtgcagccgaaatgtgtatcgctatccccagctaaacgacgctgtgactttggcccgtatccgagatcactacattttctccgtggaatcagtcggcgcactgaagcccgatgtcatcttcctggaggcggtcaaggtattgaagagaaagtgccgggcgctaattgacgaaattgaggcagaatagttatttatttagttgttaaagaaattatattatgtacataagacagcttgatataaattgtaagcctacgaagatcgtgcttgctctctcttgcgcttgagcaccttcaggcgaaattccgttaggaccacctgcagacgctcctggcacattagtgcgtcctccaggtccatgttgttcagctgcagagccaaactcttgccaaacaagtcaaattcactaataatggtgtcttccgtcatcgcgtcgacttggtattcgttattaatctccgtatcttccggcttgagctgtatcatctcttcctcgtagaccacctcttggtcctggagatctgtttcattctgttgtacttcgaggaactcgttctcaacctcaaattcttgctcttgatagggctgatctgttctgagtaaatcatccaggattgagtcgttcgaggcgatttcgtcctcctccgtctcctcctccatgctctccaccttcgtgtcgttcttgatctttggctgcattttgctccttggcttttgccttggataggtctttgatttggctttgggctttgctttgggtgaaattatggaggcctccaagtctgggtcatgctcatctttgacaagttcacccttaatcatattctgtaggtataaatacggagttgttaattttatgtaaattagtaatgagatgagaattttttttttggagcgataagttgtgcatcgcatagagggagctactggtttggttaaccattgcacaagaagtagtcaatggaatagttaacgaaaagtatggcgaaaactcacacaaaaatcgtgtttgaaatttagtttggatcgcaaaatatttgaatcaataatggacacgggtcattcctattgcttatgcacaaacccaatcccaccttggcaagaatgttgtggtacttgaaactttcctggtgtttccgcgttgcgaggtgctgcttgatggacgctagtctggcgaggacattgat

SEQ ID NO: 7223 - DNA, 1083 bp, DROSOPHILA
ttggtattagaaggcggtcttattgattccaacacgtgcggttcaattttgttaaattatttaataaaaacaccggggcaaatggcaagcaaaaatcgcaaggagccgcttctgtacatggaggagtatcgggtgaagcaggatccgcaggactatggactggcggacgatgtattttccgttcaggctttcaaggaaaagctgcacatcaaaatcgtcagaaacgacgaagacggcctggagttcgatctgattggcgtgtatcccgccattgcaaatgccttccgtcgcctgatgctcagcgatgtgcccagcatggccatcgaaaaggtgtacatatacaacaacacctcgatcatccaggacgaggtacttgcccatcgaatgggtctacttccgttgcgggctgatccccgtctattcgcataccgcaccgaggaaagcactgaggcggggaccgagcaggatacgcttgaatttgagctgaaggtgaagtgctcgcggcgacgggatgctggaaaagatcagtccaacttcgatgacatttacaaaaaccacaaagtgtactcgggtcatctgaagtggctgcccaaaggaaagcaggcgcagatatacagcgagagtgctgtgaactgcattcacgatgacatactgattgcccaattgcgtccgggtcacgagttggatctgcgcctggtggcggttaagggacttggacgggatcacgcgaaattctcgccggtggccacggccacctaccgactgctgcccatgattaagctgaaccgcgaggtgaccggtaaggatgcgtacctattacagaactgtttctcaccaggagtaattggcattgacgagaatgaaactgcctatgtaaaggatgcacgctacgacacgtgcagccgaaatgtgtatcgctatccccagctaaacgacgctgtgactttggcccgtatccgagatcactacattttctccgtggaatcagtcggcgcactgaagcccgatgtcatcttcctggaggcggtcaaggtattgaagagaaagtgccgggcgctaattgacgaaattgaggcagaatag

SEQ ID NO: 7224 - protein, 333 aa, DROSOPHILA
MASKNRKEPLLYMEEYRVKQDPQDYGLADDVFSVQAFKEKLHIKIVRNDEDGLEFDLIGVYPAIANAFRRLMLSDVPSMAIEKVYIYNNTSIIQDEVLAHRMGLLPLRADPRLFAYRTEESTEAGTEQDTLEFELKVKCSRRRDAGKDQSNFDDIYKNHKVYSGHLKWLPKGKQAQIYSESAVNCIHDDILIAQLRPGHELDLRLVAVKGLGRDHAKFSPVATATYRLLPMIKLNREVTGKDAYLLQNCFSPGVIGIDENETAYVKDARYDTCSRNVYRYPQLNDAVTLARIRDHYIFSVESVGALKPDVIFLEAVKVLKRKCRALIDEIEAE

SEQ ID NO: 7225 - DNA, 7403 bp, DROSOPHILA
gagtgtgtgtgactgtcttgagttgagccggcgaatcaactagctggccatgtgctgataggaccaaaagcaatagcaaccagtcgcccagcaccacagagcgtatgagtgatatttacagtcgggccgtaaatcatacttaacttaatatacaatatataccctcatatgtttgcccttttgggccatgtgcgtgctccattctttcgggcgacgaggtcaatacaggatgccaggctaatgtggttatagggttagagaatatttccattgattgcttttggcaataacaaggaaaacatcatttgtgtaattgttagtgtttattagatgaaattcgattaagcaacgaaatgaataaggattgaatggaaataactaaaagctctaaaatataatcaatttattgtaaatgcattaaagtgctgtgtttatatcaaataaaacaactagtgtttaaatttataaaaaaaattaatatttaaaaacattaaaatatttgaattcgtttaaacttttaacttaccttgaaacggggcaacgctttcttcttgccatatgcatacatcagaattgacttcaataaaaaatgatataacatcttcaccaccagaccaactcgtttattattaacaatcaacaagaccatctgccgagcaagacaaattcaattgggcaataagataaatgtactccaataaaattagaatttaaatgctagagtcaccagctgaataaatacatataataacaatattaagtgtaattgaagccacaatttgtactaattatagtcaatggctatttcatacgtcccatttgcaggcaatttgtggtaaaaatcaacaacaacttccgcataaccatacaaagtagcaccaaaaatattcaataaaagacaagcgaagccaacaaaaaaaaaatccagccagcaacaattgggataaaaaccaaaacaataacctcaaattgaatgagcgtaagccataattatgaccaaatgagccagccaacaaacacaacaacaacgcaaacaaaagcatcgaaaaggccaagcagattcaacagcaaaatgccggttgtcaacagcagattagcagagttagctcggataacagtactcttaacagcactgcttgtgagctacgccagtggcttgcaaactgtaggcgaatcagcaggtgagttgatgcagtaaatataaaacaaaccaaacaaatttattatatttaaatattaaagaaaatgtaaaaagagagccgaaatgatataaattttttagacacattgctgaataaatatatattttcctgatttttatttataattgataaacttatttaaattttgtacaaaacggtcttagacaaatttattggatatactatccgtatgtatattttaaattcatatttttaaccctactaaagcaagctttttgtgacttattgtttgaaaattacccacgactaccatttatgtccattacacttgaggcccatgttaagcgtcagaagcttcacgtggcaattaacgcccagcgaccttggccaaattaatgcctacataagcattaacaccaagccaaaatgaagtgaacatgcaagtgtatttcctttagacaatgtaaacaacgattgccacttatatgcgaaaaataagtatctgcccacctggcatgtgaatttgcgtaagtccggcaaataatcaagcgagtgcttgatggttaaaacaaatgtcggctggcaggtaggcaggcaggcaggcaggcaatcataataatggccataacgagccaataaacgatgcagcccatcgccgctgcccccacccctcacacacacacacacacacactcactcgccgaaaagcagtcaataaacgcggccttaatgctcaactgacagacatccgcctaacggagttggctatatgtgcgatgtacgtgcagcagtcgtatatactcgcagtataatttatatgccaaacagctgctgacatcgcccagtctcccttttctcctggaaaaatgagcaaaatataaggaatcccaaacacaggatctggatgagccgaagtcccatttgcctagagctcatatttcactccacggcaaaactgttgattcattcatgaataatgggttttcttattaaagtggttttaaagtcggtcttcgaattgaacagcatttatgtacctataaatcatcaagcaaaacacctaaaaattagcagataacattttgaatgatttattaaactagattgacagcttgcgaacttcagattgtaataaattaaaatggtgttaggtgatgacagcaattacacgacagcaatcccgaatttgaaattgttatttaatatcacacttctttaattttcaaaagagtgcttcttggaaactgaacagacttatcagcttatctggtatttaatcacaatgccgtgtcgtaaagtcaattgttttttaatgtgagtgtatttttagcagtgattttccgattgcctatggccattgttttcattgctacgctgtgttgattagaactacgaaatattttccttttgttaaacttggttaaaccattttcatgaccagaaatctttatgagcctatgaagattaaccgcatacttgaaatattctatagattcgccgacaatatctaatagcaagctcatgctgaatcatttcgcattggcgaaggaaaaattataatccactaccttataggccaggttgttcccgttgatccggatcttgaaggcattttatgtgcactttattgccttcttgaatgcctaatttacatacaactgtcgacacttgtcgataatattcattcaattttgctagagaatgtgaatccaattaagttgaaactgttgaaagcaaatatttattaataatttcagtagacataagctgacacatactgtcaatttaaaataattcataacaaaaaaaaataattaaaacaaaatgtaatatttaacaataatttaatttataatgcaatgcacacactaaaaatatacctgaagaaccggtttgccttgtattgtgagaactaagtcataacatccatagtaattctcactttcattattattcgcacatgtctaccaatatgtgattcagagttcaaggcacctggggccagacaattagcacacgttgtgaacatttatgaactaataatgggtctttgaaatcagaacatatgtgggaatatccaagtgtgaaactaagccatgcattcaattaagtgagctataaattgcaaatcccaggcgcgtgataagccgcgaaaaaaaagactaaagaaaatgttttgttcctaaactgtttgtatttgttcggctttctttgattatgacccccagtgaattatatttgctagagattaggcaattgtgtaccagggcaaacaagaacaaagctgaataagacgttgcacaaattttatcatggaatgttttaagtgttacaaatcattccacttatgttataatcctttaaaattatatcaaaccctttggaaattgtgatttatatttcaataaattaaatattgcattttttcttagatgataataccatctgcctgtatcgagagtacaacaccacttatcgaaaggagattggcgcagtgtggtttgcctcaaaggatccatgtttggtgtattcctgtgcagctggtgtggccaaggatccacaggcgcatattgtggccacccaagtcgactgcaatgagttctactgtgaagtggtaagtgaccactaagtcctataactattgtacaatattatcatcctgtccatgtgtctttgcattgcagggttccgagctgcgtagtgtcgaaggcagttgctgcggggagtgtgtaaggactcactgtcaacacaaccacactctgtatgcggtgggtgaatcatggcacaatgatgccgattgcacgctcatcgaatgtggacgtctggataatggacagattgtaatgaatacatacaagagaaattgtccggctttgactgaagattgtccagcttcaagattggaggagcgaaactgttgtccctactgcaggcccctccaaacggccaggattgaggagctgcaggacaatgtagcggagagcacggatgatatttggacagccgaatggtatcgaaaccatccctgcaatcgggattgtcaagtgggagccgaacccatgacctgtcgctacaagttcgtggtggaatggtaccagaccttttccaaagcctgctacgattgtccacggaatcttacggactgctcccgaccacattgtgtcatgggcgatggtttagagcggagtatcactgtggtcaatcgtatgatgcccgggccagcgattgaagtctgtgagggcgatgaaatagtggtcgatgtgaagaatcatttgttgggcgaaagcacatcgattcactggcatggtctgcaccagaagaagacaccctatatggatggtgtaccacacatcactcagtgtccaattactccacatgcgaccttcaggtattcctttccagccgatctctccggcactcacttctggcattcgcacactggcatgcagcgaggtgatggagttttcggtgccttaatcatccggaaaccaaagacagccgaaccacacggaggactctacgactttgacctcagcgagcatgtgatgattgtccaggattggatacatgacacaggtgccagcatattttcctatcatcatcactcccgaggtgataataagccccacaatctgctcgtgaacggcaagggacgttactataatcgcatttgggcggaagcgaagcaagctcatcgcagagctgaggagagaactacccaaccggtggaaccattgcccaagtcccaggtggacttcgttcagacactaccgagacaagctcgattggctaaaactaatacaaccaaactatttcccgtgaattcccgccaaaagaggggtaatttaaatgagatacccttggaactagttccccatcagatttacacagtgagaagaggttttcgttatcgcttcagaattataaatgcggaatatctaaactgtcctattgtggtgtctattgacggtcataacttgacagccataaactcggatggctttgatattgaggcaatggacgtgggctctatagttacctattccggtgagcgatttgattttgtactaaatgccaatctcgaggttggaaactattggattcgactaaagggtttgatggactgcagcgaagtctttacttccgcctttcaagtggccattcttcgctatgagggagctccagatgaagagcctactgcggaattgagttacggccacaaggctgagggcattgaactgaatgtgatgaaccgcggtcctggttacccggacaccaaaaccgttgcagaaatgagggctctgcccatctatgatcatgtctcgggcatcgatcacgatacactgaaaccggaagcggactacaagttcttcatctactacgatttctatactaagaataatcccgattttcacgataaagatctttatgccatggacatggagatgacccagcagaatcgcctatacacgcctcaactgaatcatataaccttaaattttccttcgctagcactgctaccttccaggagtcagctaaaggactcggacttctgtaacgaaacgagcttaatggatcagggtatcgattgtcgccaggagttctgcaagtgtcatcatgtcctgcaggttccattgggcgccgtggtcgagatgatcatcgtggacgagggattccaatactatgccaatcatccctttcatttgcatggaaacgccttcagagtcatgggattggagcgtttgggcgaaaatgtcaccgttgaaatggttagtaactttgttcgaaggaaataaaaaatatttatttaacttgtaactatttatattctcaagataaaacaactggatcagttcaatctactcaagcggaatctggacaatccacccgtgaaggacacagttactattccagatggaggctataccatcatcagattcgaggcctctaatccgggctattggcttttccattgccacatcgaattccatgccgagatcggtatggctctggtcttcaaagtgggtaacgacgatcaaatggttccggtgccagagaactttcccacctgcggcgattataatccagacttaagatctgatggaggaactacagaagattcgggatccagcaagccgataacagctactcccccaaatacaggaggcggtggatcgggtctggaacccacttggattacattgatgattagttccatgctagtgaaactctatcgataagagctggccttcaaaagagagcacaatccaaacttgccaaacgaaatttagagattatttattgaagagttggaaagatcgtgtagatcaaattgattttgattgatgtagaaatatatttgttttccggcacctgtacatattccatacaaaaatattcgcatcgttgtagcataagcatctgtgattgtctaagaaaatgtttaaataagtcatttaaataaatatctaaatgtttttgtaagatttttggtgtttctaatgaagaggtagaatcttataatcatgagtgtaaaattgctctcaaagatatatattgaaaaacaaattttaactttaatgtacatatatatagaattccacaaaacgtaaaataaatctgtttcaaatgttcctaattattgcaacaatttattcggcaaattctacaattttattgtataatgaggaacccagtcgaaatattgatatttcgtcaggtggctggagatcagatgaaccagccaacgacctcgtcgtcgaaagctgtcttatctggtcccttctggcaacagctggctacggtcttgttgtcgtcttttccaactcaaaatatcaggaatggacagggacctgatcttcacccgttgacccgatgaagatagctgaaattatggcgatgttattgcaatccgaataaagtcatcacattaaatgcgctggacatctggaatcggtgcatctgtggtgttatataagagcagccacctactagcttaacatcagacagagttagtcactcatcacatcacaatccaagccacgtcaaccccaaataattaaccccaagcaaaaatgtttgactggaccggtaagaatgttgtctatgtgggcagcttcagcggcattggatggcagatgatgatgcagctgatgcagaaggacatcaagatgatgggcattatgcatcgcatggagaacgttaagatgatgaagaagctgcaggccattaatccatccg

SEQ ID NO: 7226 - DNA, 2853 bp, DROSOPHILA
atgagccagccaacaaacacaacaacaacgcaaacaaaagcatcgaaaaggccaagcagattcaacagcaaaatgccggttgtcaacagcagattagcagagttagctcggataacagtactcttaacagcactgcttgtgagctacgccagtggcttgcaaactgtaggcgaatcagcagatgataataccatctgcctgtatcgagagtacaacaccacttatcgaaaggagattggcgcagtgtggtttgcctcaaaggatccatgtttggtgtattcctgtgcagctggtgtggccaaggatccacaggcgcatattgtggccacccaagtcgactgcaatgagttctactgtgaagtgggttccgagctgcgtagtgtcgaaggcagttgctgcggggagtgtgtaaggactcactgtcaacacaaccacactctgtatgcggtgggtgaatcatggcacaatgatgccgattgcacgctcatcgaatgtggacgtctggataatggacagattgtaatgaatacatacaagagaaattgtccggctttgactgaagattgtccagcttcaagattggaggagcgaaactgttgtccctactgcaggcccctccaaacggccaggattgaggagctgcaggacaatgtagcggagagcacggatgatatttggacagccgaatggtatcgaaaccatccctgcaatcgggattgtcaagtgggagccgaacccatgacctgtcgctacaagttcgtggtggaatggtaccagaccttttccaaagcctgctacgattgtccacggaatcttacggactgctcccgaccacattgtgtcatgggcgatggtttagagcggagtatcactgtggtcaatcgtatgatgcccgggccagcgattgaagtctgtgagggcgatgaaatagtggtcgatgtgaagaatcatttgttgggcgaaagcacatcgattcactggcatggtctgcaccagaagaagacaccctatatggatggtgtaccacacatcactcagtgtccaattactccacatgcgaccttcaggtattcctttccagccgatctctccggcactcacttctggcattcgcacactggcatgcagcgaggtgatggagttttcggtgccttaatcatccggaaaccaaagacagccgaaccacacggaggactctacgactttgacctcagcgagcatgtgatgattgtccaggattggatacatgacacaggtgccagcatattttcctatcatcatcactcccgaggtgataataagccccacaatctgctcgtgaacggcaagggacgttactataatcgcatttgggcggaagcgaagcaagctcatcgcagagctgaggagagaactacccaaccggtggaaccattgcccaagtcccaggtggacttcgttcagacactaccgagacaagctcgattggctaaaactaatacaaccaaactatttcccgtgaattcccgccaaaagaggggtaatttaaatgagatacccttggaactagttccccatcagatttacacagtgagaagaggttttcgttatcgcttcagaattataaatgcggaatatctaaactgtcctattgtggtgtctattgacggtcataacttgacagccataaactcggatggctttgatattgaggcaatggacgtgggctctatagttacctattccggtgagcgatttgattttgtactaaatgccaatctcgaggttggaaactattggattcgactaaagggtttgatggactgcagcgaagtctttacttccgcctttcaagtggccattcttcgctatgagggagctccagatgaagagcctactgcggaattgagttacggccacaaggctgagggcattgaactgaatgtgatgaaccgcggtcctggttacccggacaccaaaaccgttgcagaaatgagggctctgcccatctatgatcatgtctcgggcatcgatcacgatacactgaaaccggaagcggactacaagttcttcatctactacgatttctatactaagaataatcccgattttcacgataaagatctttatgccatggacatggagatgacccagcagaatcgcctatacacgcctcaactgaatcatataaccttaaattttccttcgctagcactgctaccttccaggagtcagctaaaggactcggacttctgtaacgaaacgagcttaatggatcagggtatcgattgtcgccaggagttctgcaagtgtcatcatgtcctgcaggttccattgggcgccgtggtcgagatgatcatcgtggacgagggattccaatactatgccaatcatccctttcatttgcatggaaacgccttcagagtcatgggattggagcgtttgggcgaaaatgtcaccgttgaaatgataaaacaactggatcagttcaatctactcaagcggaatctggacaatccacccgtgaaggacacagttactattccagatggaggctataccatcatcagattcgaggcctctaatccgggctattggcttttccattgccacatcgaattccatgccgagatcggtatggctctggtcttcaaagtgggtaacgacgatcaaatggttccggtgccagagaactttcccacctgcggcgattataatccagacttaagatctgatggaggaactacagaagattcgggatccagcaagccgataacagctactcccccaaatacaggaggcggtggatcgggtctggaacccacttggattacattgatgattagttccatgctagtgaaactctatcgataa

SEQ ID NO: 7227 - protein, 950 aa, DROSOPHILA
MSQPTNTTTTQTKASKRPSRFNSKMPVVNSRLAELARITVLLTALLVSYASGLQTVGESADDNTICLYREYNTTYRKEIGAVWFASKDPCLVYSCAAGVAKDPQAHIVATQVDCNEFYCEVGSELRSVEGSCCGECVRTHCQHNHTLYAVGESWHNDADCTLIECGRLDNGQIVMNTYKRNCPALTEDCPASRLEERNCCPYCRPLQTARIEELQDNVAESTDDIWTAEWYRNHPCNRDCQVGAEPMTCRYKFVVEWYQTFSKACYDCPRNLTDCSRPHCVMGDGLERSITVVNRMMPGPAIEVCEGDEIVVDVKNHLLGESTSIHWHGLHQKKTPYMDGVPHITQCPITPHATFRYSFPADLSGTHFWHSHTGMQRGDGVFGALIIRKPKTAEPHGGLYDFDLSEHVMIVQDWIHDTGASIFSYHHHSRGDNKPHNLLVNGKGRYYNRIWAEAKQAHRRAEERTTQPVEPLPKSQVDFVQTLPRQARLAKTNTTKLFPVNSRQKRGNLNEIPLELVPHQIYTVRRGFRYRFRIINAEYLNCPIVVSIDGHNLTAINSDGFDIEAMDVGSIVTYSGERFDFVLNANLEVGNYWIRLKGLMDCSEVFTSAFQVAILRYEGAPDEEPTAELSYGHKAEGIELNVMNRGPGYPDTKTVAEMRALPIYDHVSGIDHDTLKPEADYKFFIYYDFYTKNNPDFHDKDLYAMDMEMTQQNRLYTPQLNHITLNFPSLALLPSRSQLKDSDFCNETSLMDQGIDCRQEFCKCHHVLQVPLGAVVEMIIVDEGFQYYANHPFHLHGNAFRVMGLERLGENVTVEMIKQLDQFNLLKRNLDNPPVKDTVTIPDGGYTIIRFEASNPGYWLFHCHIEFHAEIGMALVFKVGNDDQMVPVPENFPTCGDYNPDLRSDGGTTEDSGSSKPITATPPNTGGGGSGLEPTWITLMISSMLVKLYR

SEQ ID NO: 7228 - DNA, 6229 bp, DROSOPHILA
aattagcacattcgttttcctctttaaataaggagaatccacttaaagaaatctgataatcgctgcatattgtgctatttattttatgttaaaaaagtatattcgcaagagcataaaaacaatctgatcgggttaatcttaactttttcgctgctccattctcattgattactacagcacaaaaaaaaagtggggaaagcgtggaatcctaactagaagaacggaagatagaataatggataaaaaacaaaggggcagggcagcaaaaacttaaatcattggcaaatacctttttacgatgcggattttaatcaaagtttttgccaccgctgtcagtttcttttttttacttaaaatggtaataaaaaaaaaaggggaaacgacgataaataaacattttaaaataattgctaacggcgtgttgttgcgctttagtgaacttattagtctaccctcgcaccggccaatttccacaattgattagtttaaaattgcattttttggacatttaaatgggaatctaattgattgccatttttattgagagcacttaacactatacaatggcaggttttgtatttaagctatatattcctcgtttatacagtgtcaaattaattattgattttataagcagctaagaaaatgattgtttaatttggaccgattgatcatcgaggacttaaaatggacttaaaataattggatattagcaactttgaaaagatcccgtttactcccaaaacttcagaatcaacccacgaacttctttaagccagtgtgaccccacccgctctttagctctctttcgctccatctcgcttccgcacatcgattggcgaaagcttcgctcgcactcgatatcagctcacaacttcgcttgcaagctcgccgcggaaagctcgcgatcacacgggtcgaaatcgaaatcgaatcgcggtagagagcttttcgaagtgcgagcgtcgacgttttatttctgcggctcagtcggttttagttcgttctgttggagaaaagcagcaatcacacgttcgcaaggtgaacgcgaagacacagcaaagtaagcccttcccccccaccaacacacacacccacccaaagcaaataagtaacaataaataatggaatggctggaagacggttctgggcgatttaaacaattagcgaaagaaagcggcattgaaatccgtcttgaattcgccccgaaaaagtgacgaagcagcgatcaaagcgcagagcgaaaacacgcacacagactgcaagtgtgttagataataagtgcagcacaagtccacacttgagtaaaataatccctaaaaaagccgaatatcaattagttttccaaggagcttgaaaaagtgcggtatgaaaacgtgaaaatttgcgcgtggaaaattattttgccttgtcagctgacccccttccccgtgttcgctccatccctgtcgcaccgcgggtcttgtgatcgccgccgctcttgcgctcgcttgctctcccatttcgaaactcgaaacagaagtgggagttattcgtattccgataatgaaaaaccaatatggagaacgagcgacgtaaaaaaggcggcccaaagatttttaccatttcccttacccacttttttttcatttgtcagctgacggcaatgacagtagtcttgtgatcaacgtcaaaagcaattgtcaaatattcgaactcgaatggagagcgagagagccagagcggagagttgctctcccactccaccctctcttgtttttctttgctgataattatgaaaacccgcatattttgaaaaacatgcatttcagttacattcctccgttgaatttgtcaacctgtggttgttttttcacagctcttattttatttatttagcgattagtttgacaaattgctctcttcgaactttcaaagctctgtcacgtgaaacgaaagctctgcttttaaagttttacgcagcataatcaaagagggggagttaaaaaaaaaataattaaatcaatcgaaattattagctgctaacctacaactttataacctataatcgaaaaatttgggagctgtgggctctacaaaaacttaacctgtaaatgtagcagatacacctgccccttgtcagctgacagagggctgagcaagaaattagtgataagaaaatgttcacctttatcttcgcccttttgcagccagcatttaacaattttcctcttctattttccctccattgcagtcgaaaaaacagaataaagcaaaatgtccaaccttaagcgtttcgatgatgaggagcgtgagtccaaatatggacgtgtcttcgctgtctccggtcctggtaagcacctaactatactgactaaccataactcatgctatctaaaagttaataaaaataagttaataatacctgtgaactggaaaccttactttgatgattagtctagaacttacacttctgtgtgaaataatggcaactttagaaatgtgtccacctatttgtgattaatattcaaacaactcaaacattttggtttcattattcaaaattaaatgtgaataattttaataattaattaattgtttctttaaacttttttctataattctaacaaaaacatcatcaagtatcattaataataaaaaattttaaaagaaaatgttcaatggaacctatcttcgtttgctgagttataaaaacttcttgaatgaaatgtagcccccctaacccgaccaaccgcttcattccagtcgtcaccgccgaggccatgtctggatcagctatgtacgagttggtccgcgtcggctactacgagctggtgggcgagatcatccgtctggagggtgacatggccaccatccaggtgtacgaggagacctctggcgtaactgtcggagatccggtgctgcgtaccggcaagcctctttccgtggagctgggacccggtatcatgggcagcatctttgacggtatccagcgtcccctgaaggacattaacgagctgaccgaatccatctacatccccaagggtgtgaacgtgcccagtttgtcccgcgtggccagctgggagttcaaccccctgaacgtcaaggtcggctcccacatcaccggaggtgacctgtacggtctggtgcatgagaacactctggtcaagcacaagatgattgtgaacccccgcgccaagggaacagtgcgctacatcgccccctccggcaactacaaggtcgacgatgtcgtcctggagaccgagttcgatggagagatcaccaagcacaccatgttgcaggtgtggccagtgcgtcagccacgtcccgtgaccgagaagctgcccgccaaccaccccctgctcaccggacagcgtgtgctcgactcgctcttcccctgtgtccagggcggtaccaccgccattcccggagctttcggttgcggcaagactgtgatctcgcaggtgagagtcccacaaattgagaatttaaggagcgatgcctcgtgtagcctccatacactcaagtttcataaaaatacaatccctaataaatcatttacttgcttgcaggctctgtccaagtactccaactccgatgtcatcatctacgtcggttgcggtgagcgtggtaacgagatgtctgaggtactgcgtgacttccccgagctgtccgtggagatcgacggtgtcaccgagtccatcatgaagcgtaccgcccttgtggccaacacctccaacatgcctgtggctgctcgtgaggcctccatctacactggtatcaccttgtccgaatacttccgtgatatgggttacaacgtgtccatgatggctgattccacctcccgttgggctgaggctcttcgtgaaatttctggtcgtctcgctgagatgcctgccgattccggctacccagcctacttgggagcccgtctggcctccttctacgagcgtgccggtcgcgttaagtgcttgggtaaccccgagcgcgagggatccgtgtccattgtcggagctgtgtctcctcctggtggtgacttctccgatcccgtgacctccgccactctgggtatcgtgcaggtgttctggggtctcgacaagaagttggcccagcgcaagcacttcccctcgatcaactggctcatctcctactcgaagtacatgcgtgctctggatgacttctatgacaagaacttccccgaattcgtgccgctgcgtaccaaggtcaaggagatcctgcaggaggaggaggatctgtctgagatcgtgcaactggtcggcaaggcctctctggccgaaaccgacaagatcacgctggaggtggccaagctgctgaaggacgatttcctgcagcagaactcctactcctcgtacgatcgcttctgccccttctacaagaccgtgggcatgttgaggaacatcatcgacttctacgacatggcccgtcactccgtggagtctacggctcagtctgagaacaagatcacctggaacgtgattcgtgaggcaatgggcaacattatgtaccagctgtcatccatgaagttcaaggtgggttaacacgcaaatttatccattgcctagacactgggtgaccacatttttcaatccatttcaggaccccgttaaggatggtgaggccaagatcaaggctgacttcgagcagctgcacgaggacctgcagcaggccttcagaaatctggaggactagagaccgcgctggccctacttttacactctaatcttatatttgttatatagttaacgtttaaaaatgaaagcagtcaaaaaccatccgaaaaagcctaatcaaacaccaacaattccgtgctgcattcgatgaaaaacaaaagtccaacaaataccacaacttcttggtgcctgcgagagatgtaaacattccggcctgcggttaatactttcccctaaccacgccccctccgccccttgaagggcaactctaggcaacagcaactacaacgtcctgctatgtacttccatttacaacaacaacaccaacatacacttgaataaaagtacacggacactggcgcacacacaacacatacataaaagacacaaatacaaatgcatgcataaatagtattattgtttaatgaatggaaattcttgtttatttgtgaaaaaagtcatgttttctccctgtttgtttgttaaatttatgtaaatatttaaagtatgaaatattaaatgtacgaataaagtgcaacaacaaatacatttaatgtaattgaaagtgaatttcactggcagcagaatggatattaaaaatgtgtcaactcgataaaaagataataagttaaaatatttttttgaattttaaaccttcattatataaacatacttgactatatgaaagctaagaaaatgggaatatattgaaaagcataatctaaaatcctatatcattctcagtcatcaccttagtctttccataaacttctgccccatttattttatttatttgacaatattagtaaaaattgtaccaagtgaaaaaattgtatatatttaaaccaaatggaaaagaagtcctgggttgcaccgcttacctcgttcaccaacagtaacgcaagtaacgaagacagagcccgcaactcgggatcgttaaaccaagatggggagccaaggtccgtgcctcacccaacggttccggctaagaagtgcacatgtccaacctgcgcttgccaacgtaatgaccataaatccaatccggtaccccctccccctcaatcacgcaagcctgtagccgagccggaaagtccccatgatacagtcaatgacgaggacagtttgaaggacttgagacgttcgacggaccaatcccacaagagcgctcacatcgccttggagaagaatgaggactcgggttttgtgatcgagcaggtggttgatacgcacaaatattcgtcggatgaagaagaggaggaggcgacgatgggtcgcattttcggagtctccggtccggtggtcaatgccgaggagatggccggcgcagccatgtacgagctggttcgcgttggacactcccagcttgttggtgagatcattcgactggagggtgatatggccaccattcaggtttacgaggatacttcgggtgtgagcgtgggtgatcccgtctaccagacgggaaagccgctctccgtggaattgggacccggcatcatgggcagcattttcgatggtatccagcgaccattgaggtccatcagtgaactaaccaactc

SEQ ID NO: 7229 - DNA, 2471 bp, DROSOPHILA
ttcgttctgttggagaaaagcagcaatcacacgttcgcaaggtgaacgcgaagacacagcaaatcgaaaaaacagaataaagcaaaatgtccaaccttaagcgtttcgatgatgaggagcgtgagtccaaatatggacgtgtcttcgctgtctccggtcctgtcgtcaccgccgaggccatgtctggatcagctatgtacgagttggtccgcgtcggctactacgagctggtgggcgagatcatccgtctggagggtgacatggccaccatccaggtgtacgaggagacctctggcgtaactgtcggagatccggtgctgcgtaccggcaagcctctttccgtggagctgggacccggtatcatgggcagcatctttgacggtatccagcgtcccctgaaggacattaacgagctgaccgaatccatctacatccccaagggtgtgaacgtgcccagtttgtcccgcgtggccagctgggagttcaaccccctgaacgtcaaggtcggctcccacatcaccggaggtgacctgtacggtctggtgcatgagaacactctggtcaagcacaagatgattgtgaacccccgcgccaagggaacagtgcgctacatcgccccctccggcaactacaaggtcgacgatgtcgtcctggagaccgagttcgatggagagatcaccaagcacaccatgttgcaggtgtggccagtgcgtcagccacgtcccgtgaccgagaagctgcccgccaaccaccccctgctcaccggacagcgtgtgctcgactcgctcttcccctgtgtccagggcggtaccaccgccattcccggagctttcggttgcggcaagactgtgatctcgcaggctctgtccaagtactccaactccgatgtcatcatctacgtcggttgcggtgagcgtggtaacgagatgtctgaggtactgcgtgacttccccgagctgtccgtggagatcgacggtgtcaccgagtccatcatgaagcgtaccgcccttgtggccaacacctccaacatgcctgtggctgctcgtgaggcctccatctacactggtatcaccttgtccgaatacttccgtgatatgggttacaacgtgtccatgatggctgattccacctcccgttgggctgaggctcttcgtgaaatttctggtcgtctcgctgagatgcctgccgattccggctacccagcctacttgggagcccgtctggcctccttctacgagcgtgccggtcgcgttaagtgcttgggtaaccccgagcgcgagggatccgtgtccattgtcggagctgtgtctcctcctggtggtgacttctccgatcccgtgacctccgccactctgggtatcgtgcaggtgttctggggtctcgacaagaagttggcccagcgcaagcacttcccctcgatcaactggctcatctcctactcgaagtacatgcgtgctctggatgacttctatgacaagaacttccccgaattcgtgccgctgcgtaccaaggtcaaggagatcctgcaggaggaggaggatctgtctgagatcgtgcaactggtcggcaaggcctctctggccgaaaccgacaagatcacgctggaggtggccaagctgctgaaggacgatttcctgcagcagaactcctactcctcgtacgatcgcttctgccccttctacaagaccgtgggcatgttgaggaacatcatcgacttctacgacatggcccgtcactccgtggagtctacggctcagtctgagaacaagatcacctggaacgtgattcgtgaggcaatgggcaacattatgtaccagctgtcatccatgaagttcaaggaccccgttaaggatggtgaggccaagatcaaggctgacttcgagcagctgcacgaggacctgcagcaggccttcagaaatctggaggactagagaccgcgctggccctacttttacactctaatcttatatttgttatatagttaacgtttaaaaatgaaagcagtcaaaaaccatccgaaaaagcctaatcaaacaccaacaattccgtgctgcattcgatgaaaaacaaaagtccaacaaataccacaacttcttggtgcctgcgagagatgtaaacattccggcctgcggttaatactttcccctaaccacgccccctccgccccttgaagggcaactctaggcaacagcaactacaacgtcctgctatgtacttccatttacaacaacaacaccaacatacacttgaataaaagtacacggacactggcgcacacacaacacatacataaaagacacaaatacaaatgcatgcataaatagtattattgtttaatgaatggaaattcttgtttatttgtgaaaaaagtcatgttttctccctgtttgtttgttaaatttatgtaaatatttaaagtatgaaatattaaatgtacgaataaagtgcaacaacaaatacatttaatgtaa

SEQ ID NO: 7230 - protein, 614 aa, DROSOPHILA
MSNLKRFDDEERESKYGRVFAVSGPVVTAEAMSGSAMYELVRVGYYELVGEIIRLEGDMATIQVYEETSGVTVGDPVLRTGKPLSVELGPGIMGSIFDGIQRPLKDINELTESIYIPKGVNVPSLSRVASWEFNPLNVKVGSHITGGDLYGLVHENTLVKHKMIVNPRAKGTVRYIAPSGNYKVDDVVLETEFDGEITKHTMLQVWPVRQPRPVTEKLPANHPLLTGQRVLDSLFPCVQGGTTAIPGAFGCGKTVISQALSKYSNSDVIIYVGCGERGNEMSEVLRDFPELSVEIDGVTESIMKRTALVANTSNMPVAAREASIYTGITLSEYFRDMGYNVSMMADSTSRWAEALREISGRLAEMPADSGYPAYLGARLASFYERAGRVKCLGNPEREGSVSIVGAVSPPGGDFSDPVTSATLGIVQVFWGLDKKLAQRKHFPSINWLISYSKYMRALDDFYDKNFPEFVPLRTKVKEILQEEEDLSEIVQLVGKASLAETDKITLEVAKLLKDDFLQQNSYSSYDRFCPFYKTVGMLRNIIDFYDMARHSVESTAQSENKITWNVIREAMGNIMYQLSSMKFKDPVKDGEAKIKADFEQLHEDLQQAFRNLED

SEQ ID NO: 7231 - DNA, 3281 bp, DROSOPHILA
gattacgccgaagcgtatgagcacattgccttcttcgaggagaatccagaaaaccaggccaagatgcaaaagcgtcgcgccaagtatctggaagatcttttggatctgcttgaccccatcttttacatgaagatatgccgagaatgctggtatggagccggcacagctcatgctgccgtgatggatgtccgtctcgacatcattcgggccactagcacgccagcgccggaggacatcaagaaggtcaatcagagctgtatgaaggccatcaagcactttgagagctatgtcaaatcctatctggtcaaaccgcccagcgaggaatggcgacccaacatggacgtggaggagcaacgccacatgctctacgcccacttccacatcggtcgcatctactacaagctgatcagtggccatccgctccagcagctggagcacctaactagttgccacacctactaccagagattcgatgctggttgccagctgcacaaggaggcggccgagacgctgcagggcgagattggtgttgtgcgtgaaatgctccagctgttgccgctcaagataaacacgattaaggccaggttgaacaaggctgggctaaccgcgtgagaatttccaaaaaattaattgcatttgctaaaagctttatacgtagtcaaaataaatcgcgtttctttcaaggatatttaattgttaatacattagtaacttacatgttacattctgatagcgaaagtaagccgcttttcgattttaattgccgacagcataaatttatttcttgctactcgtgaatggtacttatgccggagtatggcttggcgcactgtttcatatattgattataataaataagttgaactacttcgaaactcaattttttgccgagcatttctaaatttcacaaaactaaattgaacgaagctctgtctccgaaatacttttcaaacctggcaaccctggctgccagccattcacatacgaacagctgttttttccaaacaggaagaggaagagcgccgttggcctagccaaaatcagggaaaatatagtttaatagccaagtttaaactgccactatagttttaatagtgaataataacagtaaactgctagttcgttccttaaaaaatggcacacgccacgccacaggtatgtgattgcctcaaaaataaagaggaaactggtagtgcgccgcgtttctgtgacgcaatagctgcgttaactttcgtaaaccccatggaataacaaagcgtttaaaccttctgcagggcgtaaagctattaaacggatggaagcgtccgggtcgctttgacaagggtctgggagcccagctgcccgaggcgtacaggaagttctggcgcgagtggaagctgacgaccccggctgcggtccattatatccccaaggagcagcagtgggaacgagatgaggtgacgcacgccatcaagccggtgcagaacatcccgctgccattgatcgatacgccggaatcgcaccgtggcatctggggtggcgaggccgtgatcaagggctttcagaaacgcgagcaaacaaagcgtcgcgtgccgcacttttgggtaccaaatcttaggcgttcggtggtccatagtcatgtgctggactgctacatgtccgtggtggtgacggaacgcacgctggagcagatccatgaatgtcatggctttgatcactacctcctcaagaatcgtgcctgcgatcttcgctccgctttggctctgaaactcaagcgagaggtgcttcaggccctgcagaacggtgttccagccctcgccgacgagcccgaacgccaacaggaagtgcttaaggaataccgccgctatctggaaccatatacgcccgaggaaatcgattggtacggccatacctatttggaggccatacgcaagctgcaaaagcagctgcgcgaagcggaaaaggtggtgccgcataagttggagttccgcggaaagcttatcgagcagctgcgccaggcggggatcagcgaagcgggaaagctggagaagccggatgcattagcagcagaatcgtcggtcgaacacaaggattcggatatcgaagcgcttacaaagctgtaagtcacaaatacttctgtaatgaatttcctaaccaatgatttattccagggaatcctccccctcttccagttggctgtctaaaatcaatcctttcggcaagaaagaaacctagaaaagctgtccgcgtttgtttttgatttatgtgtttagcctcgaacgaataaacataacttcggaaacatttcgttacaatttgaaggtattaaaacgttgttactcgaacgtctttatttcaaatattcgttacatctggtactgtataaaaacaagtagaatcacacactgaacatgaacgtacgcggcaaagtagaaaaaggaatgattgcaaatccccacgagaatacagaaatacattgacaaatcaactacgctgatcactttacgcttagactatggttagtgtatagctccgcaagcgggcagagagctttgtgccgtaaatgatcccagtccgagctggaagccaggtaggccttaagcgattggatttttcctcattaattcgatgtcagccttcatcatgtcgctaaccaattccacgaaggtaactttaggcgtccagtttagctctcgattggctttggacgcgtcgccttgcagcagatcgacctccgtcggccgaaaatactttggatttatgcggacgcgcacaatacccgtgccgttctccactcccacctcgtccacacccttgcccttccacgttatctctcgatcaatatgcttgaacgcggcttccacgaattcgcgcacactgtgcgtttcgcctgtagctatgacgtagtcggaaggagactcccgctgcagcatcatccacatggcctccacgtagtcgctggcatgtccccagtcgcgctttgagtcgagattgcccagttcaaaatactccatttgcttgtgataaatcttggccacgctacgggtgatttttctagtcacaaagttctcgccacgtcgtggactttcatggttgaagaggattccattacaggcgtacatgttgtaggcttcccggtagttgatgacgatccaaaagccgtacatcttagcgcaggctaaagttaggtgggattaagtattacttttagcatacattatcgaagctgctgccttaccatatggcgacctgggatagaagggcgtctgttcgttctgtggcgtctccaccactttaccata

SEQ ID NO: 7232 - DNA, 1110 bp, DROSOPHILA
ccaaacaggaagaggaagagcgccgttggcctagccaaaatcagggaaaatatagtttaatagccaagtttaaactgccactatagttttaatagtgaataataacagtaaactgctagttcgttccttaaaaaatggcacacgccacgccacagggcgtaaagctattaaacggatggaagcgtccgggtcgctttgacaagggtctgggagcccagctgcccgaggcgtacaggaagttctggcgcgagtggaagctgacgaccccggctgcggtccattatatccccaaggagcagcagtgggaacgagatgaggtgacgcacgccatcaagccggtgcagaacatcccgctgccattgatcgatacgccggaatcgcaccgtggcatctggggtggcgaggccgtgatcaagggctttcagaaacgcgagcaaacaaagcgtcgcgtgccgcacttttgggtaccaaatcttaggcgttcggtggtccatagtcatgtgctggactgctacatgtccgtggtggtgacggaacgcacgctggagcagatccatgaatgtcatggctttgatcactacctcctcaagaatcgtgcctgcgatcttcgctccgctttggctctgaaactcaagcgagaggtgcttcaggccctgcagaacggtgttccagccctcgccgacgagcccgaacgccaacaggaagtgcttaaggaataccgccgctatctggaaccatatacgcccgaggaaatcgattggtacggccatacctatttggaggccatacgcaagctgcaaaagcagctgcgcgaagcggaaaaggtggtgccgcataagttggagttccgcggaaagcttatcgagcagctgcgccaggcggggatcagcgaagcgggaaagctggagaagccggatgcattagcagcagaatcgtcggtcgaacacaaggattcggatatcgaagcgcttacaaagctggaatcctccccctcttccagttggctgtctaaaatcaatcctttcggcaagaaagaaacctagaaaagctgtccgcgtttgtttttgatttatgtgtttagcctcgaacgaataaacataacttcggaaa

SEQ ID NO: 7233 - protein, 302 aa, DROSOPHILA
MAHATPQGVKLLNGWKRPGRFDKGLGAQLPEAYRKFWREWKLTTPAAVHYIPKEQQWERDEVTHAIKPVQNIPLPLIDTPESHRGIWGGEAVIKGFQKREQTKRRVPHFWVPNLRRSVVHSHVLDCYMSVVVTERTLEQIHECHGFDHYLLKNRACDLRSALALKLKREVLQALQNGVPALADEPERQQEVLKEYRRYLEPYTPEEIDWYGHTYLEAIRKLQKQLREAEKVVPHKLEFRGKLIEQLRQAGISEAGKLEKPDALAAESSVEHKDSDIEALTKLESSPSSSWLSKINPFGKKET

SEQ ID NO: 7234 - DNA, 3304 bp, DROSOPHILA
ggtcttcaaagtgggtaacgacgatcaaatggttccggtgccagagaactttcccacctgcggcgattataatccagacttaagatctgatggaggaactacagaagattcgggatccagcaagccgataacagctactcccccaaatacaggaggcggtggatcgggtctggaacccacttggattacattgatgattagttccatgctagtgaaactctatcgataagagctggccttcaaaagagagcacaatccaaacttgccaaacgaaatttagagattatttattgaagagttggaaagatcgtgtagatcaaattgattttgattgatgtagaaatatatttgttttccggcacctgtacatattccatacaaaaatattcgcatcgttgtagcataagcatctgtgattgtctaagaaaatgtttaaataagtcatttaaataaatatctaaatgtttttgtaagatttttggtgtttctaatgaagaggtagaatcttataatcatgagtgtaaaattgctctcaaagatatatattgaaaaacaaattttaactttaatgtacatatatatagaattccacaaaacgtaaaataaatctgtttcaaatgttcctaattattgcaacaatttattcggcaaattctacaattttattgtataatgaggaacccagtcgaaatattgatatttcgtcaggtggctggagatcagatgaaccagccaacgacctcgtcgtcgaaagctgtcttatctggtcccttctggcaacagctggctacggtcttgttgtcgtcttttccaactcaaaatatcaggaatggacagggacctgatcttcacccgttgacccgatgaagatagctgaaattatggcgatgttattgcaatccgaataaagtcatcacattaaatgcgctggacatctggaatcggtgcatctgtggtgttatataagagcagccacctactagcttaacatcagacagagttagtcactcatcacatcacaatccaagccacgtcaaccccaaataattaaccccaagcaaaaatgtttgactggaccggtaagaatgttgtctatgtgggcagcttcagcggcattggatggcagatgatgatgcagctgatgcagaaggacatcaagatgatgggcattatgcatcgcatggagaacgttaagatgatgaagaagctgcaggccattaatccatccgtgaaagtggtcttcatgcaaatgaacctcatggaaaagatgtcgatcgaacaggcgatgaagaaaatgggtcaaatgatgggacacattgatgtgatgatcaatggcgagggtgtcctgctcgacaaggatgtggagactacgatgggcatgaatctggtaaggaatagataattaaattattgattggtatctcaacttctaaatcctttcccacagactggcatgatccagtcgacgatgatggccatgccctacatggacaagacacagatgggcatgggtggcatggtggttaacatgtcctctgtctatggcctggaacccgcgcccgccttttctgtctacgccgctgccatgcacggcatcctcggattcacccgctccatgggcgacaagatgatctaccaaaagaccggcgtcatgttcatggccatgtgcccgggactcaccaacagcgagatgattatgaacctgcgcgacaacgttacctggcaccactccgaatccatggtggaggccatcgagagcgccaagcgccaaatgcccgaggaggcagccatgcaaatgatccacgcgatggagatgatgaagaacggcagcatgtggattgtgagcatgggccagctgaaggaggttacgcccacgatgcactggcagatgtaaatggcttagttgagcgattatttgttaaatcatttcaaaaaaaaaaatatataaaaatattaggcctcccagtttgtttcttgttcaatctagctaccatttacaaatatttcttatcttataacgattccgtgtagagagtataactaaatacttacaaaattttgttttccattgagatcgtcttataaaaatattttttatataaatattggttcaaaatttgcaagactcggcttcttaccaacagatgtaccatgtcgaattatagggttacatataaaaatcgatgcattagctgtggcgtcgaagtaccagtcctttccacaaatggatgccatttcaaagttcaggacaaatttaattcttgtggctccaaaataagcaatcctcgaaaacggccgagtcaaataaaaaggcacaggaatatttctcaaagaaagctaaataatggttttaaatggtcttcatcatctacgaaaaaacgattctatccgttagtaaagaaacaaaaattgttgatgtcctcagagccctctcataaggctctaattttaagagagatgattaggttaggaagaaaaccgaatcgaaagttcgaaaaggctgcgagaaatagtgtatttccgggtaagtaatcataatgcaatttaaacatatcataacgaaaactttaattcttaggcatctgccgtacgatattgaaactgcaccagtatactaatcttgtacagtagagattactgatgtcacagattcttttgagatcaaagtccccaccatatggaatcatttggatggatggatcaatggatgtagatgaaatgggtacatgcagacatatatttttagaagaatcaatggaaatttaagtatttaaatatttattaagctaacgtacttatattgtgtacaacagttttcaattaaatggaataggaaaataaagtcctggatgaggtacatttacattgtaaataccagaaatgacagcttattgtaaatagtttaatatacatttattatcacatggtaaagtctgtatgattgacgtatttttcgaattaagtatttgaactattactgcaattgtttccctcaatcctccgattgagctcagcatcaaactctgcgtcattgaaaccgatgtctcgacggaagaactcatcgagtaccttagcttggcactggcctacctccattgcggctcgccaatccgcgacattttgaggaattttctgaccctccatcttagcatacaccggttccaggggacaattgtaatgacgcaagtcggccttcacgttcctggcagtattgattacatggtagcacactgcacactcgaacttctcaaagagtgatgctcccggagaagaatcgcctatgtggtactggcgcgtgacaagg

SEQ ID NO: 7235 - DNA, 1134 bp, DROSOPHILA
ttagtcactcatcacatcacaatccaagccacgtcaaccccaaataattaaccccaagcaaaaatgtttgactggaccggtaagaatgttgtctatgtgggcagcttcagcggcattggatggcagatgatgatgcagctgatgcagaaggacatcaagatgatgggcattatgcatcgcatggagaacgttaagatgatgaagaagctgcaggccattaatccatccgtgaaagtggtcttcatgcaaatgaacctcatggaaaagatgtcgatcgaacaggcgatgaagaaaatgggtcaaatgatgggacacattgatgtgatgatcaatggcgagggtgtcctgctcgacaaggatgtggagactacgatgggcatgaatctgactggcatgatccagtcgacgatgatggccatgccctacatggacaagacacagatgggcatgggtggcatggtggttaacatgtcctctgtctatggcctggaacccgcgcccgccttttctgtctacgccgctgccatgcacggcatcctcggattcacccgctccatgggcgacaagatgatctaccaaaagaccggcgtcatgttcatggccatgtgcccgggactcaccaacagcgagatgattatgaacctgcgcgacaacgttacctggcaccactccgaatccatggtggaggccatcgagagcgccaagcgccaaatgcccgaggaggcagccatgcaaatgatccacgcgatggagatgatgaagaacggcagcatgtggattgtgagcatgggccagctgaaggaggttacgcccacgatgcactggcagatgtaaatggcttagttgagcgattatttgttaaatcatttcaaaaaaaaaaacaaaattttgttttccattgagatcgtcttataaaaatattttttatataaatattggttcaaaatttgcaagactcggcttcttaccaacagatgtaccatgtcgaattatagggttacatataaaaatcgatgcattagctgtggcgtcgaagtaccagtcctttccacaaatggatgccatttcaaagttcaggacaaatttaattcttgtggctccaaaataagcaatcctcgaaaacggccgagtcaa

SEQ ID NO: 7236 - protein, 256 aa, DROSOPHILA
MFDWTGKNVVYVGSFSGIGWQMMMQLMQKDIKMMGIMHRMENVKMMKKLQAINPSVKVVFMQMNLMEKMSIEQAMKKMGQMMGHIDVMINGEGVLLDKDVETTMGMNLTGMIQSTMMAMPYMDKTQMGMGGMVVNMSSVYGLEPAPAFSVYAAAMHGILGFTRSMGDKMIYQKTGVMFMAMCPGLTNSEMIMNLRDNVTWHHSESMVEAIESAKRQMPEEAAMQMIHAMEMMKNGSMWIVSMGQLKEVTPTMHWQM

SEQ ID NO: 7237 - DNA, 3455 bp, DROSOPHILA
ttcttttgttatttttgtctttgtagtatttttttaaatgtattttactttaaggaattgtatctctagttctttttctcagtgtggtgtttatgagtgtgtaatgggcaaacaaataatatcatatcagttcggcttcctttggcaaatgcttatgcaaatagggtacgatcgggacgatcacttgcgtcatccgcagttcataaacattcaattggatcggatcggaaccgaaaggggttgtcagaggaagtgcacaccttgctccattagcatagaattaaccccgacaactgtgagattgagattcccacagtgcagcggacttgtttattaacatgtgacaattatgctaactgcaataaccctcagccaacccttagccatgctaagattttcacctatccgggactgcagctctgcagccatcccaaaccggatgcaatcagggatcaagggcaagcactctaagaatatgcaaatttcatttgccaccgaacttgtaaattacacttggacatgccgcgatgcggataacacctgggcatcggaaggaagaggttccataaaggggaaacgggaaggtgggatcacattaatgccgtgaggtttcccacagtacttacctggtttatatggggacatttctggttacttcccttggggcaatcaaggatgtgagttgttaaatagatgcggcttgagtggaaatcaacagagaatgcccttatttacttattattatttggatttaatgaaattttatcacgaacttcttagcttataagcttcataaaaagtaatactgaattaccaattatttattgaacatatttaaaagttctcgatacccaggtaagacttgttacaaatttttgattccttagtaagttttcagaataaattcctaaaagacctttccttttttttttattttttcttcaaaaaaaaaaaaaaaaatagcaaaatcaagctgaatattaaacttaaaataaaaagtatgggctggcgtgcctcaacgcactcggataagtccactaccacagatctttttgagggcccaactcctcggcattctctgctgtccggaaggtacaaacagagtttcgcctatttgacgctaaggactcggatgccgggaattatgcagcagattattatgcggctcctatccgatttgccagatctggtgaataaatatggcgaagaagtgcgcaaggatgtcaaacaaatagtggatgccgtagagcgactcaagatggaactgaaccgggatcgacagttcctgctgtttcacggcgctgagccggacaaagttgagtggaatgccttcataactgagatgccacgtcccaaaaagtccttttttcgcgcctgttggcttcatgccgagtgctacttgtacaggcgaatcttttccttcttcgaaaacagtcgccacctgcagaaatacgactgcttcgatcacttgaaaaaggaggatctgatgctcagcgagatggccatgagtgccctggctagagccacgcgaggcttggccaagagttacgatgcatttagcaagcttttgcggattaacctgtggggaaatcactttgaaatgcagatcggcgcctttagattcacggaggaagatagcaaggacgatataaatgtactggttaaggtggctgacatcgataggatactcctcgtggacgacaccactctgatttggaattgcttggtgttggcgagcaagagcagcgggaatcgcattgtggacttcatctgcgacaatggaggcttcgagttcttcacggatatgctgttactggaatatatggtagataataatctggccacccaagtgcgtctccacgtcaaggccattccgtggtatatatccgatgttacgcgtgctgatattgaatggacactagattttctgactggacaccgggatgagtgcctttcggcgttgggcaaaaagtggacacacatgatgaatacccagaaaatcgttatagctcctacatcgtacttctggactggaccacagccatatttcgttatggtggaatcggatatcgagctttatcgtttgcttaccacctccaagttggccatattcaagggcgatctcaactaccgaaaattgctgggtgactttatatgggattccacagaggagttcatcacttgcctgcgcggctttagacccaccaatatatgtgctttgcggactgtcaaatgcgaagtggtttgcggactgtcggagggattggctgattcgctcttaaagaacgatcacaactggatgatctcgggtaactatggcgttatccagtacaccgattcactgaaatgttcctgcgccttaccaggcgtagacagcagtgagaaaaacacccgtatgcctggtatggtggtgcccccgtctgaaaggtcgaccttaactcccaatcatccataaatgagtgcaaatttgtcagttgaaaatcgaatggcctcgttacacccactcggaatcaggttgtttgcaagtgcttctctctctcaaaaaaacaaaaagcccgagggatcgtttgggcccggctctaacagcgactctctttccggccaattgccgcttgactaatgctgtggtttttatagatggcgcgcacatgcgcacccatttgtcctgacgactcccaatttggaaatggaaagttgccacaccgccaaatgttgccaaaggcgtgaattcaaggcagcaaaaaaatatgaaaattaaatatgtgctgattaaattgattgtctttcgaaatcaaatttgtcacagaactactgactttaaaagtaaattgcgaaaaatcatatatgtgctgataaaaatctcagttattgttttcaattaattgaaagttgccaactattcttgacttcactttctcgttagttaggcaataatgcctattgtttgaaacatcttttgtgaaagaaaaataatattgctctactaagtttaaacaaatttcccaggctcattttcactaactttttcatccggttgcacctcaataaatattatatcgatgggagaccaagatcatcgaattagatttggtatcatgccgagctttctcagtaatttgaaaccataccaaaaagtatcgactaataattgtaagaatgctcctttaaattctgccgattcaaattaaatcattttacttgattgcccattccgagtgagtaaatataaaaaagcagcgatctagaaatattacaaaatcaaatgaacattctcacagccattaaggaggcaatttttgaaaagagcaacatgaggccgccaaattccgctgcacattttccgccgtagatccaagtacagtttccaaaaaatcgagggcgattaatcatcagtatagcaatgtttgagaactcgactgatttattttcccaccaaaatacaaaagccaccctgc

SEQ ID NO: 7238 - DNA, 1455 bp, DROSOPHILA
atgggctggcgtgcctcaacgcactcggataagtccactaccacagatctttttgagggcccaactcctcggcattctctgctgtccggaaggtacaaacagagtttcgcctatttgacgctaaggactcggatgccgggaattatgcagcagattattatgcggctcctatccgatttgccagatctggtgaataaatatggcgaagaagtgcgcaaggatgtcaaacaaatagtggatgccgtagagcgactcaagatggaactgaaccgggatcgacagttcctgctgtttcacggcgctgagccggacaaagttgagtggaatgccttcataactgagatgccacgtcccaaaaagtccttttttcgcgcctgttggcttcatgccgagtgctacttgtacaggcgaatcttttccttcttcgaaaacagtcgccacctgcagaaatacgactgcttcgatcacttgaaaaaggaggatctgatgctcagcgagatggccatgagtgccctggctagagccacgcgaggcttggccaagagttacgatgcatttagcaagcttttgcggattaacctgtggggaaatcactttgaaatgcagatcggcgcctttagattcacggaggaagatagcaaggacgatataaatgtactggttaaggtggctgacatcgataggatactcctcgtggacgacaccactctgatttggaattgcttggtgttggcgagcaagagcagcgggaatcgcattgtggacttcatctgcgacaatggaggcttcgagttcttcacggatatgctgttactggaatatatggtagataataatctggccacccaagtgcgtctccacgtcaaggccattccgtggtatatatccgatgttacgcgtgctgatattgaatggacactagattttctgactggacaccgggatgagtgcctttcggcgttgggcaaaaagtggacacacatgatgaatacccagaaaatcgttatagctcctacatcgtacttctggactggaccacagccatatttcgttatggtggaatcggatatcgagctttatcgtttgcttaccacctccaagttggccatattcaagggcgatctcaactaccgaaaattgctgggtgactttatatgggattccacagaggagttcatcacttgcctgcgcggctttagacccaccaatatatgtgctttgcggactgtcaaatgcgaagtggtttgcggactgtcggagggattggctgattcgctcttaaagaacgatcacaactggatgatctcgggtaactatggcgttatccagtacaccgattcactgaaatgttcctgcgccttaccaggcgtagacagcagtgagaaaaacacccgtatgcctggtatggtggtgcccccgtctgaaaggtcgaccttaactcccaatcatccataa

SEQ ID NO: 7239 - protein, 484 aa, DROSOPHILA
MGWRASTHSDKSTTTDLFEGPTPRHSLLSGRYKQSFAYLTLRTRMPGIMQQIIMRLLSDLPDLVNKYGEEVRKDVKQIVDAVERLKMELNRDRQFLLFHGAEPDKVEWNAFITEMPRPKKSFFRACWLHAECYLYRRIFSFFENSRHLQKYDCFDHLKKEDLMLSEMAMSALARATRGLAKSYDAFSKLLRINLWGNHFEMQIGAFRFTEEDSKDDINVLVKVADIDRILLVDDTTLIWNCLVLASKSSGNRIVDFICDNGGFEFFTDMLLLEYMVDNNLATQVRLHVKAIPWYISDVTRADIEWTLDFLTGHRDECLSALGKKWTHMMNTQKIVIAPTSYFWTGPQPYFVMVESDIELYRLLTTSKLAIFKGDLNYRKLLGDFIWDSTEEFITCLRGFRPTNICALRTVKCEVVCGLSEGLADSLLKNDHNWMISGNYGVIQYTDSLKCSCALPGVDSSEKNTRMPGMVVPPSERSTLTPNHP

SEQ ID NO: 7240 - DNA, 3372 bp, DROSOPHILA
gggaggcactctgcggcacacaccaaaccatccggattacccgccatatactgatcggcacagggacaggatccgtcctcgaagcacactccattcaggcagacgatgttgcagcgccttacgcactggcgggtgttgaccaccagcatttcgtagtcggagcaaagctgtgaaggctcgttgatctcccagtagccgtagtcgtagtaatagtgaccctctactactgcccacagcagcaactgtaggaagaccatccggcgcgacatctcggctaatggcaagtgatgagccgcggattggttcaggcaacgaaagggagagtgaaagtgctttccggaggctgcgcactttgtgtacggatctcattacggcctcggtcacgatcactgtgcacaaacacagtgcggatgacgcaatggcccccaacacactcggccaactgataaccgctcgaccgaagatcgtttcgatcggaattgcacatgatcagcccgaatcgaagcggcggcgtgcattactcacccgaacgggggtggaggcaatggtggggttggtggtggtggagtcgacagattggatccaactcgaacgcgtgtgcagagagccagggagagctattcgaggactgattctgaattcggaatgtctggatttccacgctctcaatgagaaatcggcgcccacatctgcataaggcactgaaaacatcaacatttaaaaatatacaaaatacattcgaaaaaaattcctcattaaattacaatattttatattaattatttcctctaagtaaacattcttaccaaacatagtcattcagtttcttaaattcttccggctgatttaaatttatacgataaatacgtaacgcataaaccaacttagaactcgattattacgatttgatgcaccaaaccttttcttccagtgctccgattggggcctggctccgtttgcgactgcagctggctttaatgggctccattcattcggtcggtcggagtcggcgagagatgacgctggcgaggaacggcagcagacacgcctgcgcgaacagaagctcagatccaaagttccagagtgtggaataaagttgccaaatagctgcagccgcttgggggattagcgaaaacgccatcgaggcagagttattttcccgctagactctatttcccttcgcttcgacgtcagctgcgaattttgttcttgacagagccgcggactgcgcggtctaccgcctcgccctcgccctcgtgctccccctatcccacagtcaacctccgctcgcgtgtgagtgtggggtgaataacataaaacagacggcagaaaggcaccgcataacagcgagcggcgaaaacataaaataaacaattccatttcgggctggtcagctgggaggaagttctggtctggccccgcgctgctggtggtggcgagtggtgcgacggtggtggtgggtgacggcaaagtgggtgtgggatgtgcgtgcccagacaaagtaagagcgcttagagtctattatctatccggcaagtgctgacgcgttgcgatcgcccgtcgtcgatcgctaaatctgtgtactccgaaaaatctggtgcatcaaaatgtgctacgttattatcaccatcgccagtctggtgtggttcctctgttcgctggtggccgacatgctctttgctgtggccctggtcacgcccaggtggctggtgggccccgcccaaggaacagactccaccgccagctctcaccaccaatcctcggtgggcatctacacgcgctgcaaggtcatgcaggagggcggattccaatgcggccgcttcgacttggacggactggccacggacagtagcgtttaccccaacgaatggaaagcggcaatgttcttcgtcatgctgggatttagtctactctctgtaacggtgatcctgaccctgatcacctgctgccgccagtcggcctgtggcaagagcatacacaacatgacggcctgcgcccaggtcgtagcaggtaagcaaccattactgtgatatcctcgcagcatttaagtttgcattgtttataggaatatgtatgatgttgggtctatttctgcatccgatgggatggcgagcgaaccggattcaacgtctatgcggcatggatgccgaacccttttaccccgccgactgtagcataggtaattctttgaaacttttcttagaaacttactaaacttaatccttacaggagtttcattctactgcggaatcattggggtactcctaacatttactgccgccggtataagcctaaaggcagagtcttccaatatgcgaactcgagttcgcagacgcgtggaggcgggcagtaaactggtctgtattccgtagctgcctttgaatacaataagaacactatctgacttggagcgagcatacttaacttcattctcgaattaaatttatcattagcataaataaacttttaacattctacagtatagatacaaggtgtgggtggatatctatacgaccctacttgttgcgcttgcccttagctttgccaggaggcttgccctcaacattaggctttgccttaggtatgtagacaccatggttcgtcttctttaggtgggcaaacagcttgttcttggagtcaaagacaagcctacaggtaacacaagtgtgttgcgacttggtcgggtcgaggtcctcatctccgcttttgggagccactgttgcctcctttgtattcggttccgaaacagtttgctctaatagcttaaccttcctagtcgtcgtctttttgcttttactctttttgctcgcttttttgcctttactccagtcttcatcctctgactcgctcttgattgccttcttttctattggctcatctggttcgtcactgccttccgcctgcgcttgcttgacagctgacttccttgcctttttgttttttttggttcgtttggctagcgaagattcttcttcgcttggaaccccgtcgaaagatatctgatcctcagagacttgcaattcttccagcgattcctgtacgcccattaaactgtcttcatggggttcattgtggaaagcgtcctcttcttcctccatttcctgacacagccggtcgacattttcattatgcttcttgctttcttcgtgattagcacgcgccttggcgtttttaaatgtcttgttgcatgccacgcagtaaagatcgtctacatactccacttcgtactcctcggcttcctggccgccttcatggtcaaagtcctcgccatcgtcgtcgttctcgtcttcatccgtgtaatcttctgacttgctatcgtactgctgctctaactgctttagctgctcctcgtagccctcgttaaagacatta

SEQ ID NO: 7241 - DNA, 1267 bp, DROSOPHILA
tcggagtcggcgagagatgacgctggcgaggaacggcagcagacacgcctgcgcgaacagaagctcagatccaaagttccagagtgtggaataaagttgccaaatagctgcagccgcttgggggattagcgaaaacgccatcgaggcagagttattttcccgctagactctatttcccttcgcttcgacgtcagctgcgaattttgttcttgacagagccgcggactgcgcggtctaccgcctcgccctcgccctcgtgctccccctatcccacagtcaacctccgctcgcgtgtgagtgtggggtgaataacataaaacagacggcagaaaggcaccgcataacagcgagcggcgaaaacataaaataaacaattccatttcgggctggtcagctgggaggaagttctggtctggccccgcgctgctggtggtggcgagtggtgcgacggtggtggtgggtgacggcaaagtgggtgtgggatgtgcgtgcccagacaaagtaagagcgcttagagtctattatctatccggcaagtgctgacgcgttgcgatcgcccgtcgtcgatcgctaaatctgtgtactccgaaaaatctggtgcatcaaaatgtgctacgttattatcaccatcgccagtctggtgtggttcctctgttcgctggtggccgacatgctctttgctgtggccctggtcacgcccaggtggctggtgggccccgcccaaggaacagactccaccgccagctctcaccaccaatcctcggtgggcatctacacgcgctgcaaggtcatgcaggagggcggattccaatgcggccgcttcgacttggacggactggccacggacagtagcgtttaccccaacgaatggaaagcggcaatgttcttcgtcatgctgggatttagtctactctctgtaacggtgatcctgaccctgatcacctgctgccgccagtcggcctgtggcaagagcatacacaacatgacggcctgcgcccaggtcgtagcaggaatatgtatgatgttgggtctatttctgcatccgatgggatggcgagcgaaccggattcaacgtctatgcggcatggatgccgaacccttttaccccgccgactgtagcataggagtttcattctactgcggaatcattggggtactcctaacatttactgccgccggtataagcctaaaggcagagtcttccaatatgcgaactcgagttcgcagacgcgtggaggcgggcagtaaactggtctgtattccgtag

SEQ ID NO: 7242 - protein, 219 aa, DROSOPHILA
MCYVIITIASLVWFLCSLVADMLFAVALVTPRWLVGPAQGTDSTASSHHQSSVGIYTRCKVMQEGGFQCGRFDLDGLATDSSVYPNEWKAAMFFVMLGFSLLSVTVILTLITCCRQSACGKSIHNMTACAQVVAGICMMLGLFLHPMGWRANRIQRLCGMDAEPFYPADCSIGVSFYCGIIGVLLTFTAAGISLKAESSNMRTRVRRRVEAGSKLVCIP

SEQ ID NO: 7243 - DNA, 5451 bp, DROSOPHILA
tatcaaattacaatgaatctacaattacatatcttactgaagtaagcgaatttgtatctgcagtgctatgcatttctcagtctaagctatgtgtttacatatttttcagaactatggtacagtatctcaaacagttggagccctatattattattattttcaatccaattcttatcatgtctgccggatgtgaaacaaaaagaaatctagacttttggtttttgaaacgaacccgggcccacggacggcggctccgcttgttggtgatgcggcaagtatgaattccgcactggcgctgcacgtcgtaattccaggacatatccctggaccaccagaccagctccacaggactgttgaacttgatgttttcgtagttaatgatattttccgaccagaagaacaatacggtcgccccaaccataagcagcgcaaccagtgcaattccgtaacgttgtgccagtcgcatgattatctttgcagttctttgctagctagataatcaaaattattcgctgcaccacttcgaaaagattcaaaaagccggtgcgccgcaatttcgctcgagcgccccaatttcgactgtcagtcgtcagctgattttgctcagatgtagtgttggataacgtttggtatttttgagacacgatttgcacgatacgattgtatgccaggaaatgtataaacatttttatttaaaaaataaaacagttctgcctgaatgtttaatataattaaaacatataattattattcaacttaaatttttaaagcataattctatttatttgatattttgttttttagatattcaaattacattaattatattaactaaacatatactatatttattttctgttaaaattaattactttcatattttaatttcgagctgctggcatcgcgcgcttgaccgtttccagccctcgccagctgccatccagtccgccgctgttttacaacactgaacttcgtcataatattgttccacttacaattgctcaattaagcgaccgcagaagcaacagaaacacccataaatcggacgaaatgtgcccattccaaggctagagaacgaacagccaatgaaagtggacttattgcggagcaaccaaaatgcaacatctggcaagagaggcagacgagcgaaggtagaaaacaaacattgacataacacgtcaacgattgggagcaggtgaaccaccggggaaaccatacggcgcggcactttaaacgcagagcatgtgttatggccacgacaagatccgccggaggtgccgccacgtccgttgatactggaccggcagcagggaactcgggtatcagaaagctatcgacggctagcgtcggtggaattgccggaggagtggcgcccagctggcagagctgctactactgcacccgggagcactttaaaagcatcagcgacttcgtcaagtgagtgtcgtccaaatcttcccatataatagaactttgagcagccttacgagtcaataccatttttatcttaactttatatgcatgtatgagttaaaacgataaatgccaggtaaattgcacagacaggtagaaataattaaaattgtatagctgcagtcgaactcacaaacctcgtttagaggtgttttgtacgtaagttatatttgggattgtctaaaagtgattatacggaaaacaatacaacttctatatatgtaattttaaagataatagaatgtgttgcaaattcaattggaatttaatagaatattgattcattaaagttactcagatcttataaagctgttttaataaatgctctcattacgcattacagtcacctgcgaaatcgtcactgtacccgggagggtggctcatttgtgtgccgctatggcttcaatggagtatgtgcctcgcttccactggacggagtctcagatcgcgattacgacgcccatgtcgccaagtaccatgtcaatcagcacacgcgcgaaatgcctcccgaatggggagtctactcggcggcccaaaacctgccagcggtgctcaacgatccctcgcgaggaaagcagagtaatctgtttaccaaaaagtggggcgagcattttgtggaacgaagtcatgtgcccccatcaccccgattgcccgatataacccatgcggattttaccgtgtatctgggcagcatagggaagcgatatcgttggcatgagcggcggcagcaacaactggagcgtgataaaccgctggagaatggagcacaaggagcacctggaccgggaactggtggtcagacaccaacacacttgagttctgtgcccgagatctttctgaaatcacaactgcagcttcatcatccggcaacctttaagcaggtatttcctaattacatgcaaacatcggcttccagtccggaaagtcatcagcaaactggtcgtcagctgcaggaacagctgagtcactacctggacatggtggaagttaaaatagcgcaacaggtatcgcagaaatcggctgcgttctttcacgccatgaccacgcagcacgctattctggctgagatggagcaggcggccgaccaagtacgtcagttgcgggcagcactggccgaactccacagccactcggttgtagacagcttcaaagtgctgcgtttcgcccaaagaagacagcactataacctcacactagacaaactccgactgatggccaccgtacacaagacgcaaccgatgctgcagctcctactgggcacccaggactatgtggcagccttggatttgataggcaccacgcaggaaatactttccgccgaactccttggcattcactgctttaagcatttgcctatgcagcttagcgaaatggagaagcttattgacaaaatgcttaccacggaattcgagcgctatgctgccgccgatctaaatcgaccgttaacggatgccctccgggaaaccgacagcgtttgcgccgaggaggataaactcgtagctattgtgatgggcctgttgcgcaagcagaacttctcctttgtccaggcttaccagcaagaagcaatcgccaccattcgagccatcataaaacagctgctgattgaggttttggcacggagtgacagcgatcaggagatcagtttaacgggccacggagagcaagccttggagctcacccttcccgaatggattgctctgctccagcgctccagccaagctttggtttccattctcgaaagaattaaaactgtagttggtataatgcagcaaacagcggacgcagctgtgggagcccaggacgcagtgaatctgatagattcagaagcctttttgagtccgggacaccatgagcaactaaaaaaccaattgcaacaactgcttcaagccgtctgccactactgccatgagcgttgtgccaacattgtgtcccctcagagcctggaaaggagctcagctagcgagcaagaacttttccaactatctgagattgtggatcactttggcgagacaacaaggagcatttgtggagtggccagtgtgcccctccagctggccctcaaagtccaagcctcccgatatgctcaacgattccattctgaacgaaagcagaagttgtccttactcctggatcaggagcgctggcgccaagtagacattccgcacgaatttcagagaataatcgaacgtatggccgccggggactatgccaaaccggagatgggcaatctgataagcaatggagcaggcaacccagtgctcttggtggaaggcaaacaaccgtacacgttggtcagcgcttcgctaatgctcatccgaatgttgtatgagtacggttgtagtgcacatcggctgccattgttagccagctatcacgccaggaatgtggtggacctgctgcgctgcttcaactcaagaagctgccaactaattatcggagcaggagcaatgcgagttgctgggctaaaaaccataacgagcaccaacctggctctggtttcgcgagcactgcaactagttctatggctactgcccaagctgaaagagcatttccaagcgatgagcggatacgaaactatcgagcgggactaccagggtcacatcaaggagatcgagaataaaatacacggaattgtatccgagagattggcagctcaactggatgcctgggaagccagaccacctataccttctcagacattccgtcacatctcgcgtcacctggtgaaacttcacgaggccatcgccggtgtgctgccggaggcacagatacacgaaatctacggcgttgttcatcgaaactttaaagacaagctgcgggaacaactgctcaagttgaatgtgaacaacaatgggggtccgcagcacggggtggtgacatcagagctgaccttctacatggagacgctgcgcacactgaaagccctgcccgccgagcagctagacaacgggattctggaggagatctggctctactgagcattccgaagtattccatatggttgccgcggaaatcctccgaccgcccagcctagttcgtcttcattgtttgttatccttgttttatttatacaataccgattgtcgcgtccagttcagtctatcttgtttgccgctgtacattgcttgtacttttatgttccgccctatagcaaaaggaaattggaaatgtatctcttttgttgcgcacttttttaacacttaagcttaaagtcgatggaaggcttatgattaaagaatagaaaataatcaacaaatttcaatgcgtacaaatcaatggcggtaaacgattcccttgttcctttagtattattatcgttagctggatttctatttggaatatatatattttttaatgtttaatttaatcagatgacaaccaataaataaaggaaatccaaaattaaagctatcctttatgttcaaatgtatattcaaatttatgcaacttaggggtgaaagtaacggtcagtttgatattgcctagagttgccactcagtcgcagttgctagtagcaaccgttttaaatgcaaaacaaaccgcagtagtttagtttatgcccttttcctgcgatgcgcttgccgctaatctttcatagcctgcaccagcgtcttcaaaaaatgtttgtaaagagaactgagggcggcgaaagtgccacgcccagcattcaggacatcgccggtcgactggcggaggagcagcagcggcttcgccaattggaggccacaacgactcccaaagagcggacaattcttgtcttgggaagcaagtgtgtggtaagcaatggatccaacttataaatccacgtaaaatcatattccaaaaaagttatacactaaaaatctacaaacccctttttaaaaatattatattttttattatttaagggtaagacgacggccattaataagttctttgatcgcgaggaacacgcaacgcggccaactctagcactggagtacagctttggacgacgga

SEQ ID NO: 7244 - DNA, 3072 bp, DROSOPHILA
ctcaattaagcgaccgcagaagcaacagaaacacccataaatcggacgaaatgtgcccattccaaggctagagaacgaacagccaatgaaagtggacttattgcggagcaaccaaaatgcaacatctggcaagagaggcagacgagcgaaggtagaaaacaaacattgacataacacgtcaacgattgggagcaggtgaaccaccggggaaaccatacggcgcggcactttaaacgcagagcatgtgttatggccacgacaagatccgccggaggtgccgccacgtccgttgatactggaccggcagcagggaactcgggtatcagaaagctatcgacggctagcgtcggtggaattgccggaggagtggcgcccagctggcagagctgctactactgcacccgggagcactttaaaagcatcagcgacttcgtcaatcacctgcgaaatcgtcactgtacccgggagggtggctcatttgtgtgccgctatggcttcaatggagtatgtgcctcgcttccactggacggagtctcagatcgcgattacgacgcccatgtcgccaagtaccatgtcaatcagcacacgcgcgaaatgcctcccgaatggggagtctactcggcggcccaaaacctgccagcggtgctcaacgatccctcgcgaggaaagcagagtaatctgtttaccaaaaagtggggcgagcattttgtggaacgaagtcatgtgcccccatcaccccgattgcccgatataacccatgcggattttaccgtgtatctgggcagcatagggaagcgatatcgttggcatgagcggcggcagcaacaactggagcgtgataaaccgctggagaatggagcacaaggagcacctggaccgggaactggtggtcagacaccaacacacttgagttctgtgcccgagatctttctgaaatcacaactgcagcttcatcatccggcaacctttaagcaggtatttcctaattacatgcaaacatcggcttccagtccggaaagtcatcagcaaactggtcgtcagctgcaggaacagctgagtcactacctggacatggtggaagttaaaatagcgcaacaggtatcgcagaaatcggctgcgttctttcacgccatgaccacgcagcacgctattctggctgagatggagcaggcggccgaccaagtacgtcagttgcgggcagcactggccgaactccacagccactcggttgtagacagcttcaaagtgctgcgtttcgcccaaagaagacagcactataacctcacactagacaaactccgactgatggccaccgtacacaagacgcaaccgatgctgcagctcctactgggcacccaggactatgtggcagccttggatttgataggcaccacgcaggaaatactttccgccgaactccttggcattcactgctttaagcatttgcctatgcagcttagcgaaatggagaagcttattgacaaaatgcttaccacggaattcgagcgctatgctgccgccgatctaaatcgaccgttaacggatgccctccgggaaaccgacagcgtttgcgccgaggaggataaactcgtagctattgtgatgggcctgttgcgcaagcagaacttctcctttgtccaggcttaccagcaagaagcaatcgccaccattcgagccatcataaaacagctgctgattgaggttttggcacggagtgacagcgatcaggagatcagtttaacgggccacggagagcaagccttggagctcacccttcccgaatggattgctctgctccagcgctccagccaagctttggtttccattctcgaaagaattaaaactgtagttggtataatgcagcaaacagcggacgcagctgtgggagcccaggacgcagtgaatctgatagattcagaagcctttttgagtccgggacaccatgagcaactaaaaaaccaattgcaacaactgcttcaagccgtctgccactactgccatgagcgttgtgccaacattgtgtcccctcagagcctggaaaggagctcagctagcgagcaagaacttttccaactatctgagattgtggatcactttggcgagacaacaaggagcatttgtggagtggccagtgtgcccctccagctggccctcaaagtccaagcctcccgatatgctcaacgattccattctgaacgaaagcagaagttgtccttactcctggatcaggagcgctggcgccaagtagacattccgcacgaatttcagagaataatcgaacgtatggccgccggggactatgccaaaccggagatgggcaatctgataagcaatggagcaggcaacccagtgctcttggtggaaggcaaacaaccgtacacgttggtcagcgcttcgctaatgctcatccgaatgttgtatgagtacggttgtagtgcacatcggctgccattgttagccagctatcacgccaggaatgtggtggacctgctgcgctgcttcaactcaagaagctgccaactaattatcggagcaggagcaatgcgagttgctgggctaaaaaccataacgagcaccaacctggctctggtttcgcgagcactgcaactagttctatggctactgcccaagctgaaagagcatttccaagcgatgagcggatacgaaactatcgagcgggactaccagggtcacatcaaggagatcgagaataaaatacacggaattgtatccgagagattggcagctcaactggatgcctgggaagccagaccacctataccttctcagacattccgtcacatctcgcgtcacctggtgaaacttcacgaggccatcgccggtgtgctgccggaggcacagatacacgaaatctacggcgttgttcatcgaaactttaaagacaagctgcgggaacaactgctcaagttgaatgtgaacaacaatgggggtccgcagcacggggtggtgacatcagagctgaccttctacatggagacgctgcgcacactgaaagccctgcccgccgagcagctagacaacgggattctggaggagatctggctctactga

SEQ ID NO: 7245 - protein, 940 aa, DROSOPHILA
MATTRSAGGAATSVDTGPAAGNSGIRKLSTASVGGIAGGVAPSWQSCYYCTREHFKSISDFVNHLRNRHCTREGGSFVCRYGFNGVCASLPLDGVSDRDYDAHVAKYHVNQHTREMPPEWGVYSAAQNLPAVLNDPSRGKQSNLFTKKWGEHFVERSHVPPSPRLPDITHADFTVYLGSIGKRYRWHERRQQQLERDKPLENGAQGAPGPGTGGQTPTHLSSVPEIFLKSQLQLHHPATFKQVFPNYMQTSASSPESHQQTGRQLQEQLSHYLDMVEVKIAQQVSQKSAAFFHAMTTQHAILAEMEQAADQVRQLRAALAELHSHSVVDSFKVLRFAQRRQHYNLTLDKLRLMATVHKTQPMLQLLLGTQDYVAALDLIGTTQEILSAELLGIHCFKHLPMQLSEMEKLIDKMLTTEFERYAAADLNRPLTDALRETDSVCAEEDKLVAIVMGLLRKQNFSFVQAYQQEAIATIRAIIKQLLIEVLARSDSDQEISLTGHGEQALELTLPEWIALLQRSSQALVSILERIKTVVGIMQQTADAAVGAQDAVNLIDSEAFLSPGHHEQLKNQLQQLLQAVCHYCHERCANIVSPQSLERSSASEQELFQLSEIVDHFGETTRSICGVASVPLQLALKVQASRYAQRFHSERKQKLSLLLDQERWRQVDIPHEFQRIIERMAAGDYAKPEMGNLISNGAGNPVLLVEGKQPYTLVSASLMLIRMLYEYGCSAHRLPLLASYHARNVVDLLRCFNSRSCQLIIGAGAMRVAGLKTITSTNLALVSRALQLVLWLLPKLKEHFQAMSGYETIERDYQGHIKEIENKIHGIVSERLAAQLDAWEARPPIPSQTFRHISRHLVKLHEAIAGVLPEAQIHEIYGVVHRNFKDKLREQLLKLNVNNNGGPQHGVVTSELTFYMETLRTLKALPAEQLDNGILEEIWLY

SEQ ID NO: 7246 - DNA, 3218 bp, DROSOPHILA
aactatcgagcgggactaccagggtcacatcaaggagatcgagaataaaatacacggaattgtatccgagagattggcagctcaactggatgcctgggaagccagaccacctataccttctcagacattccgtcacatctcgcgtcacctggtgaaacttcacgaggccatcgccggtgtgctgccggaggcacagatacacgaaatctacggcgttgttcatcgaaactttaaagacaagctgcgggaacaactgctcaagttgaatgtgaacaacaatgggggtccgcagcacggggtggtgacatcagagctgaccttctacatggagacgctgcgcacactgaaagccctgcccgccgagcagctagacaacgggattctggaggagatctggctctactgagcattccgaagtattccatatggttgccgcggaaatcctccgaccgcccagcctagttcgtcttcattgtttgttatccttgttttatttatacaataccgattgtcgcgtccagttcagtctatcttgtttgccgctgtacattgcttgtacttttatgttccgccctatagcaaaaggaaattggaaatgtatctcttttgttgcgcacttttttaacacttaagcttaaagtcgatggaaggcttatgattaaagaatagaaaataatcaacaaatttcaatgcgtacaaatcaatggcggtaaacgattcccttgttcctttagtattattatcgttagctggatttctatttggaatatatatattttttaatgtttaatttaatcagatgacaaccaataaataaaggaaatccaaaattaaagctatcctttatgttcaaatgtatattcaaatttatgcaacttaggggtgaaagtaacggtcagtttgatattgcctagagttgccactcagtcgcagttgctagtagcaaccgttttaaatgcaaaacaaaccgcagtagtttagtttatgcccttttcctgcgatgcgcttgccgctaatctttcatagcctgcaccagcgtcttcaaaaaatgtttgtaaagagaactgagggcggcgaaagtgccacgcccagcattcaggacatcgccggtcgactggcggaggagcagcagcggcttcgccaattggaggccacaacgactcccaaagagcggacaattcttgtcttgggaagcaagtgtgtggtaagcaatggatccaacttataaatccacgtaaaatcatattccaaaaaagttatacactaaaaatctacaaacccctttttaaaaatattatattttttattatttaagggtaagacgacggccattaataagttctttgatcgcgaggaacacgcaacgcggccaactctagcactggagtacagctttggacgacggattggcagtggaaagtcaccgcaggtgatgaacgtttgggaactgggctccctggacaatgccgagcaattgctggaagtaccaatgcggacacatggtttgcagcaactagccgtcatccttatgctagatctctcccagccacagcgattttggacggatttggagtgcgcatacaagggactgagggatacggcgcagcagatgatggagaaggtaacaccggagcttagggaaatcctcgaacagcgaacagtggagcgagtgggtcagcagaacaaagattcggaaaaactagaccctctgccctttccagtgataattgtcggtgggaagtacgatgtgttttctggtttcgatcctattatcaggaagcacacctgccgctgcttgcgatcgatggcccacctcataggtggcgcattgctgttctattcccagaagatgcccaagttggccaaggtcctgagggacaccatttgtcacttgggatttggcagtcctgctcatccgttccgctctcatgtcgtggacttcaatgaaccactgtgcatttggtttggaacggacagttggtcgaaaattggtgatactggcgcccaaagtgtggagcgaattggagccacattcggaatggaagtaccgcagctgcagctagagaagcagaagctaaaagaaaccaccgatccggccaaggaccctggtttcaaggagttagtcatcgatgagatccgatcgcagaagaacgaggaactcgcaggattaatgagggatgtcttgctgcgcggaaagttcgaaagtgttcaaacttaataagcggctgggattaagcaaagatgtacctcaaagtattctaaaatatccaaaacaaaactgtcatttgatattgtaagttacatacccctaaattaaatgtttagaaagctgtacttttagtgtctggagttcattttaggtctgaaagttaaaattcgaaaaaaattcagcattaaatttatcaatttattaccacagctagtttgactttagtcaaaaaatatgccccaacctgtcgcttccaaggctcgtgtcataaaaattctcaatcggattggagcccgaggcattctaaccgaagttcgtgtgcagctggtcgatcaacccaagatgcaattcatgcggacggtcaagggacctgtgcgtctgggagatatcgtggatttcgaggacactgagttgacatggcaatcttcgagcaggagcaatagcaattttgaagatatatgctaggtgaatgcagaataaataaaattgagaaaaaatacctaactgcgaaaatcagcctataacgattttaaaatagcaactttgcaattaaccagtaaacttttaattaagggtagcacaattccacagagtggcaacgccatgtcagggatgcaggctggcgaactgtcaatcacatgtcttgaaatgtaccgttataaagggtgaatctgtgctctctctctctatctatctccccagctcgctcgcgcctttgaggagcttgtgctccaagccgttggcgtttcggtttggttcgtttggttttcagttcgctttccagctcagtcgctgtcagtcgctctgcgcgctcttttctcgacggtcgtgtgtgtgcgtgcacgcgcgggtgtgtgtttgcgtgtgtgtgtgtgcgtcgtgggccatttgtttggtgccaatttatttggccgaaactccaatgcgagttgttcggaaaattatgaattgtgctggcccagaaacatgagaagctttgcggccctgaaacactgtaattaaaacctgc

SEQ ID NO: 7247 - DNA, 1101 bp, DROSOPHILA
atgcgcttgccgctaatctttcatagcctgcaccagcgtcttcaaaaaatgtttgtaaagagaactgagggcggcgaaagtgccacgcccagcattcaggacatcgccggtcgactggcggaggagcagcagcggcttcgccaattggaggccacaacgactcccaaagagcggacaattcttgtcttgggaagcaagtgtgtgacgacggccattaataagttctttgatcgcgaggaacacgcaacgcggccaactctagcactggagtacagctttggacgacggattggcagtggaaagtcaccgcaggtgatgaacgtttgggaactgggctccctggacaatgccgagcaattgctggaagtaccaatgcggacacatggtttgcagcaactagccgtcatccttatgctagatctctcccagccacagcgattttggacggatttggagtgcgcatacaagggactgagggatacggcgcagcagatgatggagaaggtaacaccggagcttagggaaatcctcgaacagcgaacagtggagcgagtgggtcagcagaacaaagattcggaaaaactagaccctctgccctttccagtgataattgtcggtgggaagtacgatgtgttttctggtttcgatcctattatcaggaagcacacctgccgctgcttgcgatcgatggcccacctcataggtggcgcattgctgttctattcccagaagatgcccaagttggccaaggtcctgagggacaccatttgtcacttgggatttggcagtcctgctcatccgttccgctctcatgtcgtggacttcaatgaaccactgtgcatttggtttggaacggacagttggtcgaaaattggtgatactggcgcccaaagtgtggagcgaattggagccacattcggaatggaagtaccgcagctgcagctagagaagcagaagctaaaagaaaccaccgatccggccaaggaccctggtttcaaggagttagtcatcgatgagatccgatcgcagaagaacgaggaactcgcaggattaatgagggatgtcttgctgcgcggaaagttcgaaagtgttcaaacttaa

SEQ ID NO: 7248 - protein, 366 aa, DROSOPHILA
MRLPLIFHSLHQRLQKMFVKRTEGGESATPSIQDIAGRLAEEQQRLRQLEATTTPKERTILVLGSKCVTTAINKFFDREEHATRPTLALEYSFGRRIGSGKSPQVMNVWELGSLDNAEQLLEVPMRTHGLQQLAVILMLDLSQPQRFWTDLECAYKGLRDTAQQMMEKVTPELREILEQRTVERVGQQNKDSEKLDPLPFPVIIVGGKYDVFSGFDPIIRKHTCRCLRSMAHLIGGALLFYSQKMPKLAKVLRDTICHLGFGSPAHPFRSHVVDFNEPLCIWFGTDSWSKIGDTGAQSVERIGATFGMEVPQLQLEKQKLKETTDPAKDPGFKELVIDEIRSQKNEELAGLMRDVLLRGKFESVQT

SEQ ID NO: 7249 - DNA, 4543 bp, DROSOPHILA
ttatttaagcacctgaatgttacacagttacaatcgaacagtaatcgatcgaaaagcaaatctgtccttctccttttccctttgcgcgcttttccctttcattcatttccgtgcaattttatctgcttctcaggcagcgttaacttgactctcaacattattaaaatcccaatcgcagcgggctttgttccacaatcgaaacagcgcacagaaaaagttctaaactttaacatgttttaaatgtagaaataactaaataatataataatgataaaaaaaaaatgcatttttaatgatttatactaatatgcctacttacttactggattatctcttttaattccatatatgttttgtaactttttctgtatatatttttctctcagtgtacacgtgcttgtttgtgggggtaagggcaaatcattgaaggtggccggctaatttggttttgcatggcaaagtgcctgaaatcgagcgacatcgcaggagggaggggggggggtggtgaagatgattaattgattacgcgtgtgctccgattcaacggtaaatgctaggcccagtgactttggagaaacggtgaacgaattcgggtagcattatcttcggtttcatcttgatttggccttgtgactgactagctgagttactacacacgatttacgctttcattgagtggaaattcaagttggcattggattttcgaacgcgtctaatggtttctacaaacaaaacaaagcggcgtactgacaattcatataatttataataatcattggaatttcgtagcattaaatacgtatgcatgtatgtttttcagcgaattctgttttggggaaagaacctttcggtcaaccctcgttcccgctgacatcggcggactcacgttgaatgtcaagcgcgcggttatcgctggcttatcagcaccccggacttggctacggattagaacttggactcgtgggagaggaagttcagtaaacaaacgtcgttgtaagtggaagttagctgcgctgcaatgaagccaccactatcatcgatcacccggctggtagtgatcctcggcgtgatgctgctgaagctggcggcagcccaggattgtcagcagcaattggacaacgacactgatgcggaggtgaagccgtgcgagaattttcatcagtatgcctgcggaaattggtattcgaacacttcgcagcgaattctcggtgcccacgatatgcgatccaagtgggtggcaaatctgaagcttcagcttatccgatatctagaggaatcatcatccaccgatagcttcagtgccaatacctccgtcaccacttcaaccgcccagttgggcacattatacagatgctgcttgttgagtggccagtcgataagaacctacaccgatgccctgtcacgaagtggtgccaacttccctctgctggccaaccatactggtggatccttcgattgggttctggccaatgccgccctgcgtacgtacggagctcagggtctttggcgactcttggtcaaggacaattggcagtcggcggatcagaggatcttctacatgctgccacccaagttcgatctactgggccgcgatgatgaattgaatgagtttctgtatcagcgctacctgaagattttgctcttggaattgggcttgcgagtgcgtagagctgctctgctggccgagaaattggttgcattcgagaagagtctgcagaagctattgcccaacgatgcggaacagacgttggtgctgcgaaagccccagagccttaaggatttagagtcgcagctgccgcggctggagttgaaaagatactttgagacgatcctagagggtatcgattgggattcaaagacactgttactggtggcggatttggactatctacagggtctgcagcgattactggcggagcacacttcggatcccatggtcctgtccacttggctgctccttcagttacccgcttatttcgaattgcgattacatgatgacgataaactgggcaaccagcggaatcattgcctggaacagttgaggaaactaatgcccggacaactgggacgtctgcaaatgcaattggtattgggcgaatcgtatcaggatgtctatgacactgccatacagcagatagccgtgctctttcgcgatctaaagcagcaatttgagttggtactaaatgaaacggaggtcttcaacgaggatttggtcacacgaaacttggctcgtgataaactgagggcgatgcgtttgctaacgccacgtctacaggatcccatcaatggtggtcctggcacgcctcaactgggcggcaattgtgatgcgaacctattgcagttgtcacttagccaagccaaattggaatatcgtcaggtttttggtgagcccgtgacttcggtgccagcggatccgttgtctgtgaatgcatactatcgcctcaagttgaatcggattgagttgccgctcggcctgatggccacgccccttatacagcagcaatgctccaaggaggcggacactagggccaaactatccgccggattgggctacattctggcccacgaaatggtgcacgccttcgatttggatggccttaattacgatgccaccggtcagttggccaatggccagtggtcggccagggcgattatccgtttcggtctgagagccggttgctatttgggcgtacggtatagtaatgccacgctaaccgtcaacgagaatatcgcggataccgagggactacgactggccctcgacacatatcgccatcggagtggagctacaaatttgcgtaccttctttgtggcctttgcccaaaattggtgtggcacagtggccagtacgtcgggcttgagccaacatgccggccatgccgagcgggtcaataatgtagtgggcaatatgccggaatttggggacacattcgagtgcaaggcaaccagccagatgaatcccgttaacaagtgtcacatttggtgattgcaacgactgtctcatacggcatttatgttaaaactaatgttttaaactaaactaatcgacgcagaaataaattagactgtagccagaaagtaaatagaaacagaacagaaaaattaatgcgacttttaaacattttttttaatatcaaaagaagaggctggctaacgttctgcagctctcttaccaaattctatagccgcaggtcaatgtaaatttaattatttctatcgttatttgtctgatttttggcttcatcgacttttcggccaacgttttacatttacaaacaagtgtagctatttttttgtttttgtgaaattgcagtttggccacaaacaaataaaatgcaacacgcgtagcagagtttgtttttttttgtgtttgtaaaatgccacgcctacaacacctgtaccgcccacttggaaagtcatacaaataaagaatcatcccaaccatatgcaacgaaatgggggaaaaaaatataattcaaaatatttggcaggtggtcaaatatttgccattaatgctttgaaataaaaacggtttatgaatgtaaatacaatttatgtttgctgtttaatcaacttattacattgatgcaattaagtagtgataaatgcagttgtttaaataattgtaatattattaatatgcctggcagtatgcaagtttgtctaatgatttattcggaacttgttacttttcattattattatgtctttactcaacttcaagcaaatatgatactcgaattgtgagtagctttgcacagattaaatgatactattccaaagtcgtaacataagcgttgtgaaaaacttttttttaattggctaagtaacaatggctgttctaacaaaattgttgtgctttaagtaatccttattacttatgtaactaacataatattgtgtttccctaataggagagcagaccatgccattgttgaatggcattttcgaaactcaagttacttgttactcgaattgcacaatttccaagataattctcatcggtctggcttgttattattgagtgagatagaataacaatatttgcttatttagttgaatattctaggaacaataattacaatacaatacaatacaataaatttatgcacatgccaaccaattctctggtaataatcatgcttactaatcgcaacgacaactgactacgtacgtttggcaaaggccacatcgattccccaaccgcttttccatccgcttttccacccgccttttccgcccacgcattttccgcccgctttaaccaaccactcgcctgatgatggctggcatattgtgtgcatttgccgacaagttttgccatcaaaaactcccaaaagtatccaatagtttatgcacacaaacttgcccaggaaaatgggggaaagtgggcggatagtgtatgtgtgtgtgtgtgtgtgtgtgtggctggggtccggttatgttattcaaaggcgcgactttcccttgattgcgttacttgttcattatgattccctgtcattggtatgatgatgaagttgatgccccagcctcgcgtttt

SEQ ID NO: 7250 - DNA, 2379 bp, DROSOPHILA
gaagttagctgcgctgcaatgaagccaccactatcatcgatcacccggctggtagtgatcctcggcgtgatgctgctgaagctggcggcagcccaggattgtcagcagcaattggacaacgacactgatgcggaggtgaagccgtgcgagaattttcatcagtatgcctgcggaaattggtattcgaacacttcgcagcgaattctcggtgcccacgatatgcgatccaagtgggtggcaaatctgaagcttcagcttatccgatatctagaggaatcatcatccaccgatagcttcagtgccaatacctccgtcaccacttcaaccgcccagttgggcacattatacagatgctgcttgttgagtggccagtcgataagaacctacaccgatgccctgtcacgaagtggtgccaacttccctctgctggccaaccatactggtggatccttcgattgggttctggccaatgccgccctgcgtacgtacggagctcagggtctttggcgactcttggtcaaggacaattggcagtcggcggatcagaggatcttctacatgctgccacccaagttcgatctactgggccgcgatgatgaattgaatgagtttctgtatcagcgctacctgaagattttgctcttggaattgggcttgcgagtgcgtagagctgctctgctggccgagaaattggttgcattcgagaagagtctgcagaagctattgcccaacgatgcggaacagacgttggtgctgcgaaagccccagagccttaaggatttagagtcgcagctgccgcggctggagttgaaaagatactttgagacgatcctagagggtatcgattgggattcaaagacactgttactggtggcggatttggactatctacagggtctgcagcgattactggcggagcacacttcggatcccatggtcctgtccacttggctgctccttcagttacccgcttatttcgaattgcgattacatgatgacgataaactgggcaaccagcggaatcattgcctggaacagttgaggaaactaatgcccggacaactgggacgtctgcaaatgcaattggtattgggcgaatcgtatcaggatgtctatgacactgccatacagcagatagccgtgctctttcgcgatctaaagcagcaatttgagttggtactaaatgaaacggaggtcttcaacgaggatttggtcacacgaaacttggctcgtgataaactgagggcgatgcgtttgctaacgccacgtctacaggatcccatcaatggtggtcctggcacgcctcaactgggcggcaattgtgatgcgaacctattgcagttgtcacttagccaagccaaattggaatatcgtcaggtttttggtgagcccgtgacttcggtgccagcggatccgttgtctgtgaatgcatactatcgcctcaagttgaatcggattgagttgccgctcggcctgatggccacgccccttatacagcagcaatgctccaaggaggcggacactagggccaaactatccgccggattgggctacattctggcccacgaaatggtgcacgccttcgatttggatggccttaattacgatgccaccggtcagttggccaatggccagtggtcggccagggcgattatccgtttcggtctgagagccggttgctatttgggcgtacggtatagtaatgccacgctaaccgtcaacgagaatatcgcggataccgagggactacgactggccctcgacacatatcgccatcggagtggagctacaaatttgcgtaccttctttgtggcctttgcccaaaattggtgtggcacagtggccagtacgtcgggcttgagccaacatgccggccatgccgagcgggtcaataatgtagtgggcaatatgccggaatttggggacacattcgagtgcaaggcaaccagccagatgaatcccgttaacaagtgtcacatttggtgactaacgttctgcagctctcttaccaaattctatagccgcaggtcaatgtaaatttaattatttctatcgttatttgtctgatttttggcttcatcgacttttcggccaacgttttacatttacaaacaagtgtagctatttttttgtttttgtgaaattgcagtttggccacaaacaaataaaatgcaacacgcgtagcagagtttgtttttttttgtgtttgtaaaatgccacgcctacaacacctgtaccgcccacttggaaagtcatacaaataaagaatcatcccaaccatatgcaacgaaatgggggaaaaaaatataattcaaaatatttggcaggtggtcaaatatttgccattaatgctttgaaataaaaacggtttatgaatgt

SEQ ID NO: 7251 - protein, 655 aa, DROSOPHILA
MKPPLSSITRLVVILGVMLLKLAAAQDCQQQLDNDTDAEVKPCENFHQYACGNWYSNTSQRILGAHDMRSKWVANLKLQLIRYLEESSSTDSFSANTSVTTSTAQLGTLYRCCLLSGQSIRTYTDALSRSGANFPLLANHTGGSFDWVLANAALRTYGAQGLWRLLVKDNWQSADQRIFYMLPPKFDLLGRDDELNEFLYQRYLKILLLELGLRVRRAALLAEKLVAFEKSLQKLLPNDAEQTLVLRKPQSLKDLESQLPRLELKRYFETILEGIDWDSKTLLLVADLDYLQGLQRLLAEHTSDPMVLSTWLLLQLPAYFELRLHDDDKLGNQRNHCLEQLRKLMPGQLGRLQMQLVLGESYQDVYDTAIQQIAVLFRDLKQQFELVLNETEVFNEDLVTRNLARDKLRAMRLLTPRLQDPINGGPGTPQLGGNCDANLLQLSLSQAKLEYRQVFGEPVTSVPADPLSVNAYYRLKLNRIELPLGLMATPLIQQQCSKEADTRAKLSAGLGYILAHEMVHAFDLDGLNYDATGQLANGQWSARAIIRFGLRAGCYLGVRYSNATLTVNENIADTEGLRLALDTYRHRSGATNLRTFFVAFAQNWCGTVASTSGLSQHAGHAERVNNVVGNMPEFGDTFECKATSQMNPVNKCHIW

SEQ ID NO: 7252 - DNA, 5378 bp, DROSOPHILA
atttagttggatttataacattctgtttttaatgtctaattttactatctacctagaaccgagtccacacatgattttctttaagtaggattagtttccctggctagaaactgaaaaacttaactctggcgaatttcaatctggttttatctggttttgaatcaaaatgggttaataccttttgtagtggaaagccggttcgcgattcctgcgtctagtttcctgatcgtttttggaccattttgcggtttaccttgagtatcgctttcattgcattgcatcgcggatttaaagagcccaactattgatgccggtggtgctatatagccaacgatgcacgctttatttggcggctaggcatgatggccaattcactttgcgtggctaaataaattgtgaaaggttttcatgacagattggagatgagacagcaaatcgaagatttccagctggggctgtaaagctgacttaccaacttaagctggcaagccgtcataggtcacaccgatcagaaaccagatagaaagcctcaagagaatatcacttactaaacgattttatttaaattcaaaatatatattcttaatttaataatttgttgccttttataattttggaggagacaaatttttttacttcatggggtacggatcattaaaatactatgtacattttttaatattgaattcatttaaaatatttttacagatttttactggtcttcatcgccacccaccacttggtagactcagcgggtcccctttccaatatagccagcgaaagtaaaccaaaatcgttcgaggagattttgccttcggcggttccctttgagacctcacacaaacatccgggtgccggggagtgggtggagggatttcaaacctcccataaaataagcataagggccaccgattccgctgactattcgatgaatctgctgcctactaaagagcgacccgaattgaaccccgttttgagtgcacttatcaacgaagatgttatgaagagcatcgaggccaaaagagccatagaagaagaggagctggccgaggttaggcgtgaaattgagcaggccgccgtgttagagttggcccagaagaggggctttaccactactgagacacctgctcttctgttgacgactttgcccacagctggcaagaagctcgataacttggatgaggacatagtcctggatcctcacgaagattttatcaaccaaaattttgccctggagagtgcgggtagtgagaacagcaagaaatcccgaatagagattaaaaagggacccaatggccaggactacgagtacgagtatgtctattactatgaagaggacgatgactcaagcaaggtggatccatctgcagagcccgacacgcgtggtaagactagatataccaatatcgagaggagcacgacggccactccgagtggaaatagcctacagagtgacaaggccaaaggaagatcatctgatacctctgaagatatagaggctgaacggcttccgatgatcactcggtttcccagtcgtggcaagaacattgaagtgccaccaacagcagctcttgattctttggaaatcgctgccgagcgcaagaagattagtgttaagcgccccagtttggagttggtggatagtgctaccttcaacacggatgagaaacagaccaaggcagctcgcaagggtgaaaatgaattaaaaccagtaattgctatcgaacaggaggaggcagccagaaagaaaatgcaacaggttaaggaggagcaggcaaggaaagagaaggagaccgaaatgtcaatcgatcaggaggattttgagcagaccacgccgtccatggagaaggccgctctagatctttatgccatattgaccaatgaaaacctcaataacgaacaaactactgtaattccggataccgtaggttcagagggtttcaccactttggcaacagaaactgcaagtactgatgaggatgaggccggtgtcatgaccacgctgattaatgagatttcatcgagtaccagcaccactacgacggcagcaacaaccaccacgactacaacaacaacggaaccacctacaacaacctccaccactacaacaaccacggctgctccctctctttttggtggaaggagagccggcttgagtggtttgggcggacgtaatcgctttaagttaaccagggctgaaggtggcagcaccaccactagcaccactgaggcatcggtggctgcagaaacaaacaagactggtagaagtaagttttaacaatttaagacgttttacaaattttttgttcgtattaactatttgcaatttatatgttatatgtatatgtatatatataatttaagtagtttacttcatagggaatttgttaaaaatcatggaactgaagggctatattctttacttgtaaattatatactcgtccaagataattttaaaagtaacatgttgaagaaagcatttttgaccccattaagatcatatattcttgatcaggatcgctagcctggccatctgtcggtacgagtacttgcaattataatagctagaaagttgacatttgtaaaatttaaaaacaaaaaaactaaattaaaatatcgaaaatattttcttttgctagatcgtttttcgcgcccctcgataggagggcgttctcgacccggagctcgtaccaccacagcaccagatgccacatcagtagctgcccctgacgccgaggagggtatagtggttgccaaggaagtcaagcctgtcagtacgtccttcgcacgaggaagacgtaagtatttattttctgaaactttgttttaacttaacttaaatgtataaaaattaatactttgtcaatactttcagtatttaaatatttacaaaagattagcatgtatgtatgtcaagcacgctttaacctctttaaaaagacaacctcttaaaaaatacaagatccggtataaatcagataaagtatcttaataactggtttttgggttttaccttggtcagtgactttgtaaagtgcttcaattgcaaattacttaagctaaacgagaattattaggttttttaaataagaaattttttttgtgacttcgttacagtcacattaaataagacaaataccgttttaatatatattaaagttgggcacaacatttaaaaagcaatactaaaacgataaaatttttagctcgcaaccgcttcagcttgcgcgtctcaaccacgactgcgcgacccagcgaggaatctccagctgaagatgacgcccccgccgaatcttcatcaacgactacaagaagcacattgaggggtcgtcccggacttggattacgtggacgcagtcgtacaaccactacaaaggcacccgctagttcagagggtgccgaagcggtagagcctaatgccactgctagttccgaagacgtcaagtccgggttgatttcgccttctaccggggaatcagggcgtccgtcccgttttaacattcaccgcgctggtagcaatcgtctgttatcccgcggaaaactgggaagatcgggagtaagcacggaagcacccaaggaaagtcaaactgccgaggattccgccgccgaaagcagtagtcacctcaacgacgtcaaagaggagcagatgtccgctggcgagtttagcgaaaagacgaacgaagcaggtgattccgctgccgtcgttccagcggctcctgtatccgggttaaatcgtcttagaactcgaccacgtctcaacgccctaacgcataagactgatgcggttaagcctaaggcatccgcagcccccgcccccgcgccaaggaagattaatcctctgttggcaaagcgacgactccaactgggagccacttccaccacaggtaacggcgtacgataggaaactagggcaaattaaaaaatttatagatttccgaatgctgacatcccagtttaaaacgtaagctattggaacacatttttcatatatttcttcttacagagtcccccgctgaggaggagcatttagcgctggactcctccgcggagcagtccgacaaagaggagtcgtttgccggaggaagcaacgagacgggcggagaaggccccggaaagccggagcatgaaactacggaagcgacggaggcaacaactaagcagcagccccgcggtcttggacttttaggacagcgtcgtcgtctgccgctccgcaaacccggaacgatcctgtaaaacaacaaattgccatctacccgtttgaatcctgtaataataacttgcccagatttgctgcagcatactcctagagttgggctgggtggcccacacaagcgataataacatttaacaattgtttgatatatgtacttttttttaagtttttttctcctcgtacttgccttccaaaaactcgttagctttgtacacatacgcctttaattaaaatactgatagatgcgtaccacttacgtcattagaaaaagtcaccaaaaggaaaaatatggacgacacaagaacgaggagatctaagccactcgtagaccactaagcacaaaatacccgaaaaatataactgatatgattgccaactaccctgcgactatgtaaacccaaccttcccccctcctttaccctcttattcaaatcgacgcgtgtgtagaagatacacttattatattttttttctgagatccaattataaacacaaaaacgacttttaactatatattaaataaaaacaaaaggaaaaacataataatttaattaaacacttttttgacttgattcggtagggtgcattatttgaataatatttttattgatctatcctaaagacgttttttcttgaaaatgaacaccagcgtgaaatacttcattgtttgtcccaagcttagccttgattactccaattaaagttatctacatgtctttttacatcaacttattttgtatatggtagccaaatatttatctggcattacgttatttgttgaggccatttaaacaaaatgatgtcaagagtaatgaatgcagtcaataaatatgtacccaatatgcttatatgttcgttagctttttatgtagactataaatatgtagggaattgactaagaacacgttagagtaactgcagcaacatgtcgagccgggtgcctatttttgttttggttatcctattgattatactcttgtcggaaataagaagtgaacagcaaggcgccgaaactcatttggaggacgccagtcaagagcttcaatctattttggagagcataagtcaacacgagcgtcagagagtacaagaaattaatgataactcgaaattggataacagaaaacagcgacccaatagcaagagattaagatggaatcgaaaa

SEQ ID NO: 7253 - DNA, 2479 bp, DROSOPHILA
atgaagagcatcgaggccaaaagagccatagaagaagaggagctggccgaggttaggcgtgaaattgagcaggccgccgtgttagagttggcccagaagaggggctttaccactactgagacacctgctcttctgttgacgactttgcccacagctggcaagaagctcgataacttggatgaggacatagtcctggatcctcacgaagattttatcaaccaaaattttgccctggagagtgcgggtagtgagaacagcaagaaatcccgaatagagattaaaaagggacccaatggccaggactacgagtacgagtatgtctattactatgaagaggacgatgactcaagcaaggtggatccatctgcagagcccgacacgcgtggtaagactagatataccaatatcgagaggagcacgacggccactccgagtggaaatagcctacagagtgacaaggccaaaggaagatcatctgatacctctgaagatatagaggctgaacggcttccgatgatcactcggtttcccagtcgtggcaagaacattgaagtgccaccaacagcagctcttgattctttggaaatcgctgccgagcgcaagaagattagtgttaagcgccccagtttggagttggtggatagtgctaccttcaacacggatgagaaacagaccaaggcagctcgcaagggtgaaaatgaattaaaaccagtaattgctatcgaacaggaggaggcagccagaaagaaaatgcaacaggttaaggaggagcaggcaaggaaagagaaggagaccgaaatgtcaatcgatcaggaggattttgagcagaccacgccgtccatggagaaggccgctctagatctttatgccatattgaccaatgaaaacctcaataacgaacaaactactgtaattccggataccgtaggttcagagggtttcaccactttggcaacagaaactgcaagtactgatgaggatgaggccggtgtcatgaccacgctgattaatgagatttcatcgagtaccagcaccactacgacggcagcaacaaccaccacgactacaacaacaacggaaccacctacaacaacctccaccactacaacaaccacggctgctccctctctttttggtggaaggagagccggcttgagtggtttgggcggacgtaatcgctttaagttaaccagggctgaaggtggcagcaccaccactagcaccactgaggcatcggtggctgcagaaacaaacaagactggtagaaatcgtttttcgcgcccctcgataggagggcgttctcgacccggagctcgtaccaccacagcaccagatgccacatcagtagctgcccctgacgccgaggagggtatagtggttgccaaggaagtcaagcctgtcagtacgtccttcgcacgaggaagacctcgcaaccgcttcagcttgcgcgtctcaaccacgactgcgcgacccagcgaggaatctccagctgaagatgacgcccccgccgaatcttcatcaacgactacaagaagcacattgaggggtcgtcccggacttggattacgtggacgcagtcgtacaaccactacaaaggcacccgctagttcagagggtgccgaagcggtagagcctaatgccactgctagttccgaagacgtcaagtccgggttgatttcgccttctaccggggaatcagggcgtccgtcccgttttaacattcaccgcgctggtagcaatcgtctgttatcccgcggaaaactgggaagatcgggagtaagcacggaagcacccaaggaaagtcaaactgccgaggattccgccgccgaaagcagtagtcacctcaacgacgtcaaagaggagcagatgtccgctggcgagtttagcgaaaagacgaacgaagcaggtgattccgctgccgtcgttccagcggctcctgtatccgggttaaatcgtcttagaactcgaccacgtctcaacgccctaacgcataagactgatgcggttaagcctaaggcatccgcagcccccgcccccgcgccaaggaagattaatcctctgttggcaaagcgacgactccaactgggagccacttccaccacagagtcccccgctgaggaggagcatttagcgctggactcctccgcggagcagtccgacaaagaggagtcgtttgccggaggaagcaacgagacgggcggagaaggccccggaaagccggagcatgaaactacggaagcgacggaggcaacaactaagcagcagccccgcggtcttggacttttaggacagcgtcgtcgtctgccgctccgcaaacccggaacgatcctgtaaaacaacaaattgccatctacccgtttgaatcctgtaataataacttgcccagatttgctgcagcatactcctagagttgggctgggtggcccacacaagcgataataacatttaacaattgtttgatatatgtacttttttttaa

SEQ ID NO: 7254 - protein, 777 aa, DROSOPHILA
MKSIEAKRAIEEEELAEVRREIEQAAVLELAQKRGFTTTETPALLLTTLPTAGKKLDNLDEDIVLDPHEDFINQNFALESAGSENSKKSRIEIKKGPNGQDYEYEYVYYYEEDDDSSKVDPSAEPDTRGKTRYTNIERSTTATPSGNSLQSDKAKGRSSDTSEDIEAERLPMITRFPSRGKNIEVPPTAALDSLEIAAERKKISVKRPSLELVDSATFNTDEKQTKAARKGENELKPVIAIEQEEAARKKMQQVKEEQARKEKETEMSIDQEDFEQTTPSMEKAALDLYAILTNENLNNEQTTVIPDTVGSEGFTTLATETASTDEDEAGVMTTLINEISSSTSTTTTAATTTTTTTTTEPPTTTSTTTTTTAAPSLFGGRRAGLSGLGGRNRFKLTRAEGGSTTTSTTEASVAAETNKTGRNRFSRPSIGGRSRPGARTTTAPDATSVAAPDAEEGIVVAKEVKPVSTSFARGRPRNRFSLRVSTTTARPSEESPAEDDAPAESSSTTTRSTLRGRPGLGLRGRSRTTTTKAPASSEGAEAVEPNATASSEDVKSGLISPSTGESGRPSRFNIHRAGSNRLLSRGKLGRSGVSTEAPKESQTAEDSAAESSSHLNDVKEEQMSAGEFSEKTNEAGDSAAVVPAAPVSGLNRLRTRPRLNALTHKTDAVKPKASAAPAPAPRKINPLLAKRRLQLGATSTTESPAEEEHLALDSSAEQSDKEESFAGGSNETGGEGPGKPEHETTEATEATTKQQPRGLGLLGQRRRLPLRKPGTIL

SEQ ID NO: 7255 - DNA, 4230 bp, DROSOPHILA
cgaacgaggactgcgtgcttgcacggcgcatgcgttaccaatcgagtgttcccggaccagcgaagttccctggcatccagccgtcagaggtcctggcatccctgcattccgacgctgctctgttgtgtgtgtttacctggtgccggggcaatcgagtaattttcttggcggttgagcgcatgtggctatcgaatggctccaatcgattactgggcggaaggcctttaaaaacaggtgacgaaacacatgcttgtcctgcgccggcttgtttatccgggagtagccaggattccagcggatgtctgggcccgcagccacgccctggtggagtttcccggccagtggcctcgctgtgagcagcaccagtttgaatcggacatgcgggtcatcagggacttcatcactgcgaaggaggagcaactactgatgcgggaaatcgagcctcacatcagccgcttgccgtacgagttgagccactgtgatgacgtgggtgggtatatatagagactatatagtatcggatttctggctaaacttcttaaacttcgcaggcagataccgcgaagttgaacgccgaaagtggactccccaaaaccaggccacgctggatcacgtctcgtgagtttccttcggtgagcaggtcatgcccttcgtgcacatcctggacttggctgactctggcgcgatcaagccgcacgtggacaacactcgagtgagtttggccacagaagatgcaactcgatttcattttcatttacgattgtattcgacagttttgcggcaacaccactgcgggcattagcatgctcagcgactgaagcgcgtgaccaaggatcccatgactttgtcagccactctgaggatctgctcctgccgcaactctcgctctatattaagagtgccctagcgcgatacgagttcacccacgaaatcctggccagagatcagtcgtggttcaaggagcgcttggtcgaaacgaaccttgatggcatacgcatagtttccttttctcacagctggtgtacatgtatatatatatatatatacaatgaaaatttattccggtttggtgatcagctaatgtaatacagacggcggactgcgacggattacacgacgtgattcagccatgtaatatatgatacactaaatcaaatgtacatatacatagtatatcttaagctagctacttgtactttataaatattgggctcacctttctcactcgcttcaaattttctactccctcttataatcttttgaaatttgtgttttttgctcaacaatgtatatgggttgatgcttttctactttcatttgtacgttgtcgtctcgtttcatttaaagcttaaaatatgagaatgacagagacagggagattaatgggcaactgagtgagatggagagaaggtgcttgggaaaggggaaggatacaaaaatcgaccggacaaggactagtcctggattcaaggataactgggaaatagtgatgtgttgtcgctaaacctacgttcatatttgcacttctagccactgctagttaaagtctatgccgtgcttccggctcggggaatgatattatggcgatggggactcggttctggcgggtcatcggtcatcagtcatccagctcatcccagttttcggcgccgcggcagctgcagcggcaaggcaacaacggaagcagacgaggtcggatttgctgccatcaccggaagggcaagagccactggagctgcgagtccgccgccgacgtactgcagatgctgcaccaccgagagctgtggctgctgctgcttgagcagcttggcggcagcgtgtgcctccgccgcagccaccacgacggggtgcaccggttcggtgccgactcctccgttgacatgtggaccggtgctttcgcaatcgtcttcgtctgagatcagtgatatgctgaggtcgctggacagttttagggagattgggcgtgggcggcgagggagccaccaagggcgccactttggcgcgcaatgccggtgacagtttctgcagctgctccggcatcaggtcgttcgtgtattccggcactccactaaaagccaggccttcgcgtagtttgctcagcgagagttcgtaaatacggtttgcgatgaccgtgtgaacggtcgtctcgtccggcagcgtggctgtgatgcctccgcccacgtccacctccagaaaacagcccgtttcattgccgccctctccgccttcggcggtggcgaatccattgctggccgccgtcgacgctcgacacggcttggggtgacctgacacccgcgtcaggcagttggcagtggtggaggtgcgcggcaccaacgaaacagttacctcttcgatggtctccgactgtgtgagcggtgcgagcggtggcggtgagcgcatggagagctgggagcgcactcttgccgtgctgctgggttcctgctcgttgtgctcgtcatcgctggttatcaggatgctgtcggtcactgggtatgagtgggtggcagctctgcgcggcgcctgccttctgcccgttctatgtgctcggtgccctggggcaggaatcaggaggcgattgtggccagctgcagcgggctgtccggccgatggggtctcatcgtcatccgacagcaggtcgatggtcacgtccggctgcaaagtggaggcgacatggcgccgctgcagatgggacagctgccggtcagtcttggaggcgagagccacttggtcgcgcatccgggccatgcagatccgctggtgctcaagcaggcgttccatccaccgacagcggcgccgcttgagacgacggttgtcgaacagccggggcgatatgtagaatggttcggaatgtttctggttcatgtctataggcggcaggagaagagttagtctgtgacgcctggtcggccactggtgggcacctatttaccgagtgtgtggactcgtcttctagcggtggcggtgcctgccacgggttgtcaagggtcatgggctcgggcccgtggggctcctcctcctcctcctcttgctgttccactggcggcgagtacagttagatccactgctgcaacttgcataattgcgtggcggcgcagggggatttccttgagaggagcggaggcgcgggactaggcgctgcgcctcccgccgctggacatgccgagatgcgagcggggccgagatggttgttttttcgcgcggcagctgcttaatttgtgcttttgttgtactttagagttctgtttataaaactgcatcgataagcgaccacacatcgataacgcttctctcgatagtccacgctgcgtgcaaccgtgcacgtcgactggccaaacagtatctgtcggtagttatcgataatgcattcgccacttgggcgcgctatttaaaatcagctagagaaaataatgaagcttcgaagcaaaggacagaaggatacaagtgctttggatcaccagcaaatccagcgacttggacaccaggtagccccgataaaattcctattaagtaaaacactcttatctcaagacaaagcactcaagctaattttggcaccacccacaattttgagaagcactcaatcggcgccggcgctctgttttcagaagctttcactcacatctgggagagctttcactccacatccgtacgaggaccggaacgatagggaagacaccgactccagctggagtcagttggcagatcgtcgcctccggatgcggatgtagatatagcaaccgcccttgggcttttcatgccttcgattaattttcgcagacttaggatgcctggaaattaaccacaaaaatcgtgaagccccaaaacttccgttcaaattactacagggttgaaaggaacataaggccttacaagcggagtcttgcgatcagaagtggagcactagttttgggtgggatatttcaaaatgaaaataactgttagaaggcatttagtacaaaaataagaaatttttttgttaataagtagccttatgtatgccctttcacccatttctctagagacaagcgaaaagctagcaatctgataaataaaagtaatcaacgttcaggcgtaggggcctagagtagtaccattggaaacatattactgatactcgatactccactccacaacttgatctacagtcttgatctcatatttccaaatattcatatatctgggtatacatatagcttaagatcaaagttatgttgactagctgtatgaaca

SEQ ID NO: 7256 - DNA, 2165 bp, DROSOPHILA
gtacaacaaaagcacaaattaagcagctgccgcgcgaaaaaacaaccatctcggccccgctcgcatctcggcatgtccagcggcgggaggcgcagcgcctagtcccgcgcctccgctcctctcaaggaaatccccctgcgccgccacgcaattatgcaagttgcagcagtggatctaactgtactcgccgccagtggaacagcaagaggaggaggaggaggagccccacgggcccgagcccatgacccttgacaacccgtggcaggcaccgccaccgctagaagacgagtccacacactcgacatgaaccagaaacattccgaaccattctacatatcgccccggctgttcgacaaccgtcgtctcaagcggcgccgctgtcggtggatggaacgcctgcttgagcaccagcggatctgcatggcccggatgcgcgaccaagtggctctcgcctccaagactgaccggcagctgtcccatctgcagcggcgccatgtcgcctccactttgcagccggacgtgaccatcgacctgctgtcggatgacgatgagaccccatcggccggacagcccgctgcagctggccacaatcgcctcctgattcctgccccagggcaccgagcacatagaacgggcagaaggcaggcgccgcgcagagctgccacccactcatacccagtgaccgacagcatcctgataaccagcgatgacgagcacaacgagcaggaacccagcagcacggcaagagtgcgctcccagctctccatgcgctcaccgccaccgctcgcaccgctcacacagtcggagaccatcgaagaggtaactgtttcgttggtgccgcgcacctccaccactgccaactgcctgacgcgggtgtcaggtcaccccaagccgtgtcgagcgtcgacggcggccagcaatggattcgccaccgccgaaggcggagagggcggcaatgaaacgggctgttttctggaggtggacgtgggcggaggcatcacagccacgctgccggacgagacgaccgttcacacggtcatcgcaaaccgtatttacgaactctcgctgagcaaactacgcgaaggcctggcttttagtggagtgccggaatacacgaacgacctgatgccggagcagctgcagaaactgtcaccggcattgcgcgccaaagtggcgcccttggtggctccctcgccgcccacgcccaatctccctaaaactgtccagcgacctcagcatatcactgatctcagacgaagacgattgcgaaagcaccggtccacatgtcaacggaggagtcggcaccgaaccggtgcaccccgtcgtggtggctgcggcggaggcacacgctgccgccaagctgctcaagcagcagcagccacagctctcggtggtgcagcatctgcagtacgtcggcggcggactcgcagctccagtggctcttgcccttccggtgatggcagcaaatccgacctcgtctgcttccgttgttgccttgccgctgcagctgccgcggcgccgaaaactgggatgagctggatgactgatgaccgatgacccgccagaaccgagtccccatcgccataatatcattccccgagccggaagcacggcatagactttaactagcagtggctagaagtgcaaatatgaacgtaggtttagcgacaacacatcactatttcccagttatccttgaatccaggactagtccttgtccggtcgatttttgtatccttcccctttcccaagcaccttctctccatctcactcagttgcccattaatctccctgtctctgtcattctcatattttaagctttaaatgaaacgagacgacaacgtacaaatgaaagtagaaaagcatcaacccatatacattgttgagcaaaaaacacaaatttcaaaagattataagagggagtagaaaatttgaagcgagtgagaaaggtgagcccaatatttataaagtacaagtagctagcttaagatatactatgtatatgtacatttgatttagtgtatcatatattacatggctgaatcacgtcgtgtaatccgtcgcagtccgccgtctgtattacattagctgatcaccaaaccggaataaattttcattgtatatatatatatatatacatgtacaccagctgtgagaaaaggaaa

SEQ ID NO: 7257 - protein, 417 aa, DROSOPHILA
MNQKHSEPFYISPRLFDNRRLKRRRCRWMERLLEHQRICMARMRDQVALASKTDRQLSHLQRRHVASTLQPDVTIDLLSDDDETPSAGQPAAAGHNRLLIPAPGHRAHRTGRRQAPRRAATHSYPVTDSILITSDDEHNEQEPSSTARVRSQLSMRSPPPLAPLTQSETIEEVTVSLVPRTSTTANCLTRVSGHPKPCRASTAASNGFATAEGGEGGNETGCFLEVDVGGGITATLPDETTVHTVIANRIYELSLSKLREGLAFSGVPEYTNDLMPEQLQKLSPALRAKVAPLVAPSPPTPNLPKTVQRPQHITDLRRRRLRKHRSTCQRRSRHRTGAPRRGGCGGGTRCRQAAQAAAATALGGAASAVRRRRTRSSSGSCPSGDGSKSDLVCFRCCLAAAAAAAPKTGMSWMTDDR

SEQ ID NO: 7258 - DNA, 3330 bp, DROSOPHILA
ccggacgccatcagccagacatcgacgggcagcgtggaacgcaagtcaggtatcggacaactgttcaagaatatcaaagctaatgtgctgcgtaacaaagctaatcccagccagcagcagcccgaggatgagcagctggcggccaaagagacacagatttgaagtaagcccagccgcaagcccgttttcgaagctctcatcatccccgtgttatgtttcgctcaccgccgggcgatttctgctccgcctttaacttccatggcccccaatatggcattatctttctgtacagttgcgttactaacccccagatttaaggatttgcagcatgttgttttagaggctccaattgaagtacatactctcatccttcatctactttcttgacttattgcaggacaaatccatgtctgctagctgcaccaccttgccccgctcgagcagccggaaatcggagagatcccagggtggaactgccactggccagatgaaaacgcgcaacaagtcggagaagtagtggagcatcggtttaaggctgcccatctttgtcagtatgttgatttagatggtgacggtgggcagacagtggaatccatagaaccagaacctcatgttttagtttaaattgtaactttatacggatatcgatacagattatgataatattagctatatatgcgcatgcactgtgtactttgtttgtgattctattagagctccgggcgcagttcgtcctggttgccactggtactcatttcgtgactagtttagcgttaagcgagtctcctagcctctatccaaaggttctgcaacagatgtactaaccaaaaatgaaacccgaagaaacctatcaattgtgtagcataaattcctaatattgtaattgaacattaaataaaagaatctataccattgatccattgaactgaacaaccagagatgtctttaatgatctttgaactagcaattcagaaccgtttacttagatacgaaggacttcttactcggcttcttctacaggcgccttttgggtgtccccgcccccagctgctcctgcctcggcctcgtcctccggttgctccgactcatcgtcatcgtcgttatggtaaagaaccttgcgtatatagcgggccaccagctcctgtggtctcttctcccatttggacaaaacatcatgtggcgttttgatcttagtatgattttagttggtagataacattataataatggactgtaatgaactcacttgatccccatttaggcgattcaggatggccacacagacgaccgcgcccctgatgttggccctactggtgagggcggcaaaggccaagctctccatctcgatattcttcacctgctggctctgcagcgtctccaagtaggatttcttcatttcgggcgtgtactcgcagaaggctccatcgaggcgcgactggccttcgtagaagtcatgggcacacagagtccggccgatgacagcttcatatttgtccttgcagggatcgtggcacatcttgatttcatcggccagactctcatcgagctggctggcatgctggacactgacgccgtgcacaaggatctcgtggacgggattcaagcgaccatcaatcgcctcggaggaaatgatcacggtgccgggttcaacgccaatgccgccgctggtgccaattctgatgaagacggggtccttgcacttggcgtggtacatcatcttgatgagttcgtgcagcagtatggagatcgacggacaacccattccgtggctggcgcagagcacgggacccaccttgaacaaggagaatcgctggccggcctccgatatgttccgtagcttggtagccgcgtttatcttcagaccgatctcctgcatcacgtagtaggcaaagttttccatccgacccggagtacctcccatgcatacaaactttgtgcaaagaagatacgcttagcatacttatagttactagatacttgagtataatggttgagactaaccctcacatcaccaaaaaccttgggaaagtccgtggtctccgtattcaggcccaggtggtagagtatgtcaggctgcaggcacttcaggcagggattcaggccgcacaatgtggattccttggcctcctcgtcctttttgcagccttccttcatctgacggaccagcttggcgagcgtcctgctctgggcattcacgatggctatgggatgcggtctgtgttatgagggatctcaggaaactcctgtctaaactgaaagtagtcaccctttagctggcccacctcgttggccaaacggcatgtgcagtcactgcagttgcttttggacatttttgtttttttaatttttaagttacttccagcaattttgtcttacttccggaatgagtgtctatttaaagtttgaatttataattgaaatatagaaagttgtcagacattgcgactactataattcgtaatataaggtattttcattgttacctttattacaaaagtggacttaaaggacataagtttccaaaatcatttagtatgcctaaatttgagttacatttgtatcttcacccgtacatatggtcaccaaacatttgcagatgagtgtaagctgcgcagtactttaatagcgcccctcgtaggcctaactaaatgcggcgattacttggacgacccgcgatcgcaccgcacttaagtatggagaagcgcaaaaagtgaccaaaccggcttgccaaccgctctctgcttcttgcccatccgcatgcggctccagaaactcggagcgcagctttcgcgaagccaccgtcgcgtcacggccgccgtcgtggtcgtcacacatgcgcagcagctgatgcgcgagcgctgaccttgaccctcaattggagtcgcagtcgcttgcagacttgttgccaagtgcagccggcaaagttgaagttgccaccccaccccgggaccgctctctcttcctcttgctctctgcctgctttttcgcacagccagttttcaccattagcggcgactgtacctcgcagcacgctgtacgtccatacatacgtatgtatgcattcacttagcgcgcgcgtatgtacgcatgcatgtgtgtgtgtgttgtgtgtgctggtacgcgaactgcacacagaaaagaacagggcaggagagcaaagaaagcggcgtgagcacatagcgaaaagagagcccccagccccatattccatccagccatcgccatcagctgcctgcgccatgtgttcccgcagctgcagttgtgaaaatcgccggtaaactggttgcgcgagcgagatggagagagtgcgaaagcgggcgatcgctctct

SEQ ID NO: 7259 - DNA, 1151 bp, DROSOPHILA
atgtccaaaagcaactgcagtgactgcacatgccgtttggccaacgaggtgggccagctaaaggaccgcatcccatagccatcgtgaatgcccagagcaggacgctcgccaagctggtccgtcagatgaaggaaggctgcaaaaaggacgaggaggccaaggaatccacattgtgcggcctgaatccctgcctgaagtgcctgcagcctgacatactctaccacctgggcctgaatacggagaccacggactttcccaaggtttttggtgatgtgaggtttgtatgcatgggaggtactccgggtcggatggaaaactttgcctactacgtgatgcaggagatcggtctgaagataaacgcggctaccaagctacggaacatatcggaggccggccagcgattctccttgttcaaggtgggtcccgtgctctgcgccagccacggaatgggttgtccgtcgatctccatactgctgcacgaactcatcaagatgatgtaccacgccaagtgcaaggaccccgtcttcatcagaattggcaccagcggcggcattggcgttgaacccggcaccgtgatcatttcctccgaggcgattgatggtcgcttgaatcccgtccacgagatccttgtgcacggcgtcagtgtccagcatgccagccagctcgatgagagtctggccgatgaaatcaagatgtgccacgatccctgcaaggacaaatatgaagctgtcatcggccggactctgtgtgcccatgacttctacgaaggccagtcgcgcctcgatggagccttctgcgagtacacgcccgaaatgaagaaatcctacttggagacgctgcagagccagcaggtgaagaatatcgagatggagagcttggcctttgccgccctcaccagtagggccaacatcaggggcgcggtcgtctgtgtggccatcctgaatcgcctaaatggggatcaaatcaaaacgccacatgatgttttgtccaaatgggagaagagaccacaggagctggtggcccgctatatacgcaaggttctttaccataacgacgatgacgatgagtcggagcaaccggaggacgaggccgaggcaggagcagctgggggcggggacacccaaaaggcgcctgtagaagaagccgagtaa

SEQ ID NO: 7260 - protein, 373 aa, DROSOPHILA
MPFGQRGGPAKGPHPIAIVNAQSRTLAKLVRQMKEGCKKDEEAKESTLCGLNPCLKCLQPDILYHLGLNTETTDFPKVFGDVRFVCMGGTPGRMENFAYYVMQEIGLKINAATKLRNISEAGQRFSLFKVGPVLCASHGMGCPSISILLHELIKMMYHAKCKDPVFIRIGTSGGIGVEPGTVIISSEAIDGRLNPVHEILVHGVSVQHASQLDESLADEIKMCHDPCKDKYEAVIGRTLCAHDFYEGQSRLDGAFCEYTPEMKKSYLETLQSQQVKNIEMESLAFAALTSRANIRGAVVCVAILNRLNGDQIKTPHDVLSKWEKRPQELVARYIRKVLYHNDDDDESEQPEDEAEAGAAGGGDTQKAPVEEAE

SEQ ID NO: 7261 - DNA, 9715 bp, DROSOPHILA
gaaagcaatgtattcgacatgcgtaagctttgatcgcgggttcgtgtccgcgctaaacgtcaccatccacaattagcatccacagctgtaaaatgtcagcgcttcaaaccaataattatcaactgtttaattagaccaagttgaggccacttattcattttgcctttgatgtttatgcataattggctgtgctccactcaaaactttgccccaagcggcgtctgagctcctcgaaggcaaatgccaaatgtgaagcggaacccgaatcgttaacgagtcaagcagctaacagagcggataattaagccacctttttacaaatgagagtgagagtggaaaaaaaaaggcgacaggttccacaataactacacactgctaaaaattttgatttatcccaaaatgagtaaaactataaaaagaaacaagcaatgtccgtaccagcgttgctttatacacaaaaaaatattaacatgtcggatacgtaatatttttgaaatttatttcccaatccacaattagctatgtaagcaactacttagaaagcaatctgaagacatataaccattaaaaaatgttatcaaaaaaagtaatatgttccaattagcgaaaaatttaatgattatcgtggctaatatatttaaaatatattgcctattaatggtagtaaaagcaaaagttaaaatctttaaaatccatttatattgcccataaaaatagcagtcgcgtttaaacgaattcctaaacaatcgacaacatatgtaactcattatttctcttcagatccccgtaaagattatcctttcaaaataccattagtaatatgaggtacataacatctccaagagtccacttcgtttcgcgcagtgcacaatgcccataaagtggacgcagagtgcagttactgctgctcagtaagtgggaatgggatggggatgttggggcagcagtgtggcgctgctgctctccactggcagctgggcctctcattcgtgccaacgcgctcaactgcgacggtccgctgaacaaaacggtgtgcggaataaaaacgcgaaagaattcgtgtaataaatgtgaataccagtgggataataattaatgatgctgctctaatgtcaaccagtgacaataaaaccatcaaataaatcaattgatgtcgtgaagtgcacattttaggaaagctctcagagactaagggaaaattacagagagaaagagagagaaaagagcttagtgcatttttgcactacaagttttttgttgtaatatttgtgtgtgtgagtgtgcgtgtgtgtggtgttgctgcttttggagacgtcacgaactgaaaccgactgttgtgctcgcccttacaccaccccctccccgatcaaccataaaaacattattttgttgtttttctggccattatatgttgctgcctttgctggcgatgacgaaattgttttagcgaaaacgaaaaccagtctagaaatataaaactcaagcccagccagcgcaagcaaccttgaagaagtcttaaagaaacacaaagcgaaacatggggaaaatatacggggagatagccgttcggcaaactcaattggccaaaggaatcgcaattcacaaaacacggcgatgacttttgcattaaaagacgtgtcataatgagtccaactattgcaaaaaggcggtgtgcaatgtgcaatgcgaactagagtgcgaatttaagctcgcaaaccagtgaacatgatcgtgtacagaggcaaaaaccaaagcaagatcaaagtttccttgaagttttcaatttttcacgaaaaatatgtacaaaactaggtcgcagtttcacatcactgtttaagattaaatggatcatagtaagatatgtccaagatgttcaatactcaaaacaaatgcttaacatatgtattaatcatattcgtattaaggaatttattaggaatttatgcttatatctctttgttagcaacgtttttgtgctattcaaaacttgcgccaaaatttcctcagtgttgcacataattccacaaaaaaggctttgcgtaaaaatgcgataatctctctaagcgctccccctgtggtggttcagcgaacgcagctccacttggcaattggaaaatatctggtaattgtttcatgtttcatgggtgaaaccgaaacccacaaaccggcagtgcttaggcccaagctcaactccgctaaatggaaattctcagcttaacttttaacttttacccgaggcacgttcaactttggctcgttactgctgacacgcaacgcccgcagcgaaagtgtcgtggaaattccgaaccaaagtcacagtcgcttgaggctcataaaaaaatgtgtacatataaatttatgagcttgccgcatgcaggaaaatgcatcccaagtgaagatttccgaatgaatgtaccccttcaattggatgacttgtcgttgtagcagtaacaggaatttaacaagaatgattaggctcttaggacgtataattacactgaggaaatgtaaatgcatgttgtgcctatttcgttttaatttaaatgattaggtgagagtgcattttcatcacttgaaatataaaaaatttaactgaaatcaactaggctctctccaaaaaaaagaaaatacatactgcaatgtgtgtgaaaattcctatttcggaatttgcttgaaagtgaattttaaaatttttataattatctatttaaaataatgtaataaactacattgctaaatagaaaatacagctataaaaataatgaccaaaaaagcagtaaaatgatgtggaaatctttaaaaactaactagatcttgaagaaggaatggccacttaaatggagtcatttacggcatgaagcaatcccaaatatatctgtaaaaacgattttccgactctgatcgtcgttcctatcagccattttccgtttcctacgtgaccaagagccgagtggaagacaatgacatcgatcggcacttaataatcttaaccttaatgcgtcaggcgatcaatcaaccgttcgatccgttgatcaactggatttttgccagttgcatagcagtgttaattgttaattgttaattgtttatgcgtgaagagcggatagaaacaacagcagcaagagatcgtcaaactgccggccttgcacttgctgcattccaataaacaaaagatcatcttcgtctgcatcgaatgtgcatatatgtatagtatgtacatatgtggcaaagactgtgcaatcgtacatatgtatcgcatggccagaccatctttttctccggtttctttgtttgagtctcacgctaaggcgatgaggcgactaatgaaataaaccatttccgtattggcattgttgcggtacgaaatgaacattcactttacacgcaccaacaaaagcctaaattcgcagaatttcaccagggcatacacacttgaatccgtgagccaaagccataactcgaaaccggtaactgcggcatcatggtggccagaatctcggcacagctccttgttttgcgggccagaaccccatatttccatctgcccacgcgcaacaagtgtcgccgccaacagtatctcgttttgttcaagatatggtcacgtaaatgaacacagctgcggccaaagttattatataatattttatttcttaaaaatataccaaagcaaataaattccgatgcttgaaattgttgtaaaatatattcaaattattcaaaaagaaagtatttatatgtattttatgtatgcatttcaagtcttatatttctctttgattactgtaagtaaaaggcttgaaaaactattatgccaggaatgccatctaatttttatgaaccaactaacttttggtgctatcttgctgaccgcgtttgctcgcaagccgcatatctgtataaactcatatccatgctcggatcgctgcctggttttactgacgctctcgaaccggttagcattcgctgcgcttgcctgcccctttgtctacgtatgtactaaactacgtatacgtaatatgcgagcagatagcatctggtctaagcactttgtgctcgaaaccagctagaattttctaacttcacacatgggttaactgcaaagtcggtgtgtagccgcgtgaaaaagtgctttaaattcgtttgaaaattggcaaattcgttagtttttagagtatttgaggtacggcacctgccacatcatggtgtttgatttttcagctatgtctgtttatcactcgacattgtatcgccagcgactgtctgcattcaaccatgattccattgtaatttgcgctattttgcatgccctggctttggctttgggtgtctgcttttattttagttcgctttagtttagtatagacctcgctacataatagtttgcataccattggctccatatggccagcagctggattgttgtgacacttgaaaagtcggtttaattagacagtgggctgaattggtcaatcaaaaagggcagacaattgctgaacagctttaattgctttcaattgagtgcaacttgctaagaatacagttcagaaaaccagagttgaagctccacactcaacaaaaaggagatcaaacttcattttataggttctaaaaaaattttaccacacaaatacaacatttaaattcaaacgaagaaaggttgatcataatttagagcagctgaagtactaatcagacgatttccccgaagtatttgtaaggttgttacaaaataatgatgatatataagatagaaattttcgttcggtggaaatcgtctgaagtcgtagaaaatcaatagttcttgagtgcagcagtttattcaattaagcaaatcactgaatccgttgacaggcttctgaccccaaagatgtgacaagatgtcggcgttgaatcgcagcaatggccagcgcctcagctgctccggcagtctgagcagcagcggccatcccgccgatccggtgaccttgccccggaaacggcgacctcgggctcgtggcgaggtcggggtcacctgtcagggaagcagcaccgtctatctcaacggacccgtgtccgccgaacccattcgacccgctcccgaacccatttaccaaaacgaagcggcagccattagccagcgctgcagttacagccaccaacgagcccaactactgacctccatgcgagtgacagtagcggagggagccgaaaatgacgcaaaggtcaccatggaagtgagcacattcgtaggttcgtcctggtttcataaatagattataggaaaatagattaagaatttggtaataggtgaaaatcaagcagaatctttcagcaaattcatccctgaaacagaactaactgctgtccattctgtaacttttcagatgactcagaccactactacgagaccctgtcgccactcggaaacaaacgccattcaacacagctggtgcggcagagccaggatggaaatcggagcggaggggtgcgctcctcgcaccgccggagcaaaaaccactcggcatccgcccacacattgggcgagcacgtggtcatttcggatgattacgactcctttgagacagacagcgatgatcacggcgatggggaacccgacctgcggcaaagaaacgtaagtagctaagatatgcttgatagattcaccatgctaactctgcggaaatcctattccagtacaatgacagcggcgtggacatgcgcaaccatcgcctgccaaagccacctcctccgcagaaccaagtatacgagtttgtgcgcaaattcaaggactttatatctagcaagaaatctcccaagggaagtcagcaaaagctgtacgagaataccccggcatccacgctattctacgtggagtgcagcaaacgaacggaggacgtttacgaaaacactgatttcggaccagagcggattccagctcccgaaaccaagggcccagtgcaccaggagcaggctccggttttgagggccaaacagaagaacggcaagagccttcgctcccgtcttcgtaaaagtcttgtcggctccagcttcgataccaagcagctctcctcgctggcacctacacggagcaccttctacgtagaggaccccgagggatcactgccagctctgccattggagccggagattcacggttccggagaactggactctggtttctcggacaagaactgcacgcccttgccagagactccgaaattctcaacggtggctcgcaaggccaagaaggaggcgaaagccaacagacgtcgcaccaccattggtctgcgaccgaacgatccgccgccgcctccaccgccaatgaccggcaacaaatctcccttggatccggagcgtgaactggatgctgagcagactacttcctggtacgccgagtgcggcgtctttaagcaggccaccaatggtgctgtgtccccgaggggcgatgaaccggtcacacccacgcctagtggtcacggaggcgttagctcgtggtacgcggaatcgggtctctaccaaaccagcggcatatcagtggccagctccagcggcagctccggcgtgtccaccggcaatgaggctggcctcggcgacgagttgtcctcggagccacatagtctgttctccaatgaacctctataccagatgtacagcgccgccaagctggaggtaagtgaatcctccccattacctactttaattcacttacgataatttttaaccattttagtcgatcacccgcgacctggaggcgcatggatcgtcagatggctacgaggagattggcctacaagctaaggcgaagcccgagccactggttaagccaagacccactgcactgcagttggtggagcccaagaacggtccttctcgtaccctgtggagcgaaattcccgaagtcatacactcttgcatactgcgtaagtaaataattttattcggcgtaggtaaatacatttatctcattcctctacgaattcgttacagccactttgaccagtcgggagcgcagtctgcaggaggctaagttcgagatcatcacctcagaggccagttatctaaagtcgcttaacctgctgcgccgtcacttcatgaatcacaacgccttcttggactcatccgtgctgagtgccaaggaccggaaagcactgttttcttacattgtgcccgtgcacgaatgctcagagcgattgctcacggaactggaggcctgctggcaggacaacatcatgctgctgggactgagtcgctgcatctacgagatcgccgagcggcacttccatgtttacgtggccttctgtgagcatcagggcagaatggatagaactctgcgccgtctcaaagaatccaaagagtccctggcctttcagcagcacctggagcggctggaggcgagccccagctgctgcggtctcaatctgcactcattcctgatgctgcccatgcaaaggatcactcggctgccgctcctgatcgatgcagtgttcagcaaggagtcgccgctgaatcgcgaggaatacgagagctggaagttgacgctcgctctcgtccagaaggtagtgggtcagtgcaatgaggcagccaaccgttgggagcaggcatttgagctggaacggattgcgcgccagctggagttcccctcccatgtgcgagcgctggccatagcgccggtgggagtgccgagggcgggagccaagccgcgtttcctggtcaaacgaggcgaactgacgcatctgctgtggcgtggcgaggatgccaaattaacgttcggcaagcgcctgacgaagatcagcatatacgccttcctcttttcggatcttctgttgctgtgcaaacgtcgtggtgaatcctgcttcagtgtgttcgactattgccccaggagcatgctcacactcgccgccggcgattcgctgccccaacttccaaccaaggaccttaaggaccaagccggcaagaacctcatcttgatgacgctgctagagaactgcgaccgcaagaccgtcgagctggtgggttatcttactctttaaaccccattttctttgtctaagatgagtgctgactatgtgttccctgcaggtgttgtcttgcccctcggtgtccgaccagcagcgctggctgcaggccatgagaccgcccgaggcggagacgcccggcgagaagctctacgagtcctgggactgtcctcaggtggtggctaagcacagctatgagtccgacgagccagatgttcttcaacttgaactgggcgacgtagtcaatgtttcccgcaaactgcccgacggtgagtgacctcagagttgtggtaaaaagaaaaacaaacctaatactttttatcctccatataggctggtaccagggcgaaaggatacgagatggagccgtaggttggttccctggaagctacactgaggaactgaattcagcccatgtgcgagcgcggaatctgaagcagcggcaccgtctgctcacctttacggccacctacctggagtcgcaaaagagcaagtgacttccggctgctcttggaaaacggggataatattaactagcaacgccaactccatagtccgcaaccaatagccgtacactttaggaaatgtgataattatttaaatcgatgttagtattgattaatcgaaagtcttaaaataattttccctaccaagtaagcaatagagagtacttgaatataattataaccgtttagtgatgatacttaagcgaaatctaaataaacaagcgaaatttatgaaaacaagaaacagaatcaatctcctcgtctattataaattctttactcaactaaagcgactgttgacttgattccctgaccttatatcaattaaatcaataaataataataattgattaaaaattttcaatttgctgctaattgtcctaaatttcgtaaattgtgcaaatattcttcatcactagccatttccaaccgtccgctagtgggatagtccttacaaaattcgagattatgggaacttaaagagctagaaagctggaaggtagttaatggaacttgtttcataattttgtagctagcagtgaaataaaacatacaggtagttagttcattttaaaattgtatattctccttcaaaaatatatatacatattttgatttgattttgtttgttgttttagttgttttctagtatgcattatacatacgtatatcattttagtagctgcatccctagcgtattctaaacttattcaattaatgttacgattatattattgctgtcataaattattaaatctaaatcatgcactacaaaagtgtgggggcggagcaagatatgttctggcgatcgatcgatccgatagcagcccgtttcgagtgctgctaagccggagtcgtcataatcatcgtcacactatcgccaacacaatctggcccggctaattctaacccagatgatttacaatacttcttcatgtgaccgcgatgagtggatgtggtaaatttcgatgaaggacccatttacactgggcgattacaatagtcagaaaccaatcgttgaagttcagtttggattggtttcgttcgagggctacggctaagctacggctcataaacgtatcctgcatttaggcgctagattcctacacatatataaatatatcacaaaatcagtgaaattaaaattcgctggagtatttgcttgtttcgctttggatgatgcatgagaagagctctttgaaacgttgagtgata

SEQ ID NO: 7262 - DNA, 3761 bp, DROSOPHILA
ctcaactgcgacggtccgctgaacaaaacggtgtgcggaataaaaacgcgaaagaattcgtgtaataaatgtgaataccagtgggataataattaatgatgctgctctaatgtcaaccagtgacaataaaaccatcaaataaatcaattgatgtcgtgaagtgcacattttaggaaagctctcagagactaagggaaaattacagagagaaagagagagaaaagagcttagtgcatttttgcactacaagttttttgttgtaatatttgtgtgtatcgtctgaagtcgtagaaaatcaatagttcttgagtgcagcagtttattcaattaagcaaatcactgaatccgttgacaggcttctgaccccaaagatgtgacaagatgtcggcgttgaatcgcagcaatggccagcgcctcagctgctccggcagtctgagcagcagcggccatcccgccgatccggtgaccttgccccggaaacggcgacctcgggctcgtggcgaggtcggggtcacctgtcagggaagcagcaccgtctatctcaacggacccgtgtccgccgaacccattcgacccgctcccgaacccatttaccaaaacgaagcggcagccattagccagcgctgcagttacagccaccaacgagcccaactactgacctccatgcgagtgacagtagcggagggagccgaaaatgacgcaaaggtcaccatggaagtgagcacattcgtagatgactcagaccactactacgagaccctgtcgccactcggaaacaaacgccattcaacacagctggtgcggcagagccaggatggaaatcggagcggaggggtgcgctcctcgcaccgccggagcaaaaaccactcggcatccgcccacacattgggcgagcacgtggtcatttcggatgattacgactcctttgagacagacagcgatgatcacggcgatggggaacccgacctgcggcaaagaaactacaatgacagcggcgtggacatgcgcaaccatcgcctgccaaagccacctcctccgcagaaccaagtatacgagtttgtgcgcaaattcaaggactttatatctagcaagaaatctcccaagggaagtcagcaaaagctgtacgagaataccccggcatccacgctattctacgtggagtgcagcaaacgaacggaggacgtttacgaaaacactgatttcggaccagagcggattccagctcccgaaaccaagggcccagtgcaccaggagcaggctccggttttgagggccaaacagaagaacggcaagagccttcgctcccgtcttcgtaaaagtcttgtcggctccagcttcgataccaagcagctctcctcgctggcacctacacggagcaccttctacgtagaggaccccgagggatcactgccagctctgccattggagccggagattcacggttccggagaactggactctggtttctcggacaagaactgcacgcccttgccagagactccgaaattctcaacggtggctcgcaaggccaagaaggaggcgaaagccaacagacgtcgcaccaccattggtctgcgaccgaacgatccgccgccgcctccaccgccaatgaccggcaacaaatctcccttggatccggagcgtgaactggatgctgagcagactacttcctggtacgccgagtgcggcgtctttaagcaggccaccaatggtgctgtgtccccgaggggcgatgaaccggtcacacccacgcctagtggtcacggaggcgttagctcgtggtacgcggaatcgggtctctaccaaaccagcggcatatcagtggccagctccagcggcagctccggcgtgtccaccggcaatgaggctggcctcggcgacgagttgtcctcggagccacatagtctgttctccaatgaacctctataccagatgtacagcgccgccaagctggagtcgatcacccgcgacctggaggcgcatggatcgtcagatggctacgaggagattggcctacaagctaaggcgaagcccgagccactggttaagccaagacccactgcactgcagttggtggagcccaagaacggtccttctcgtaccctgtggagcgaaattcccgaagtcatacactcttgcatactgcccactttgaccagtcgggagcgcagtctgcaggaggctaagttcgagatcatcacctcagaggccagttatctaaagtcgcttaacctgctgcgccgtcacttcatgaatcacaacgccttcttggactcatccgtgctgagtgccaaggaccggaaagcactgttttcttacattgtgcccgtgcacgaatgctcagagcgattgctcacggaactggaggcctgctggcaggacaacatcatgctgctgggactgagtcgctgcatctacgagatcgccgagcggcacttccatgtttacgtggccttctgtgagcatcagggcagaatggatagaactctgcgccgtctcaaagaatccaaagagtccctggcctttcagcagcacctggagcggctggaggcgagccccagctgctgcggtctcaatctgcactcattcctgatgctgcccatgcaaaggatcactcggctgccgctcctgatcgatgcagtgttcagcaaggagtcgccgctgaatcgcgaggaatacgagagctggaagttgacgctcgctctcgtccagaaggtagtgggtcagtgcaatgaggcagccaaccgttgggagcaggcatttgagctggaacggattgcgcgccagctggagttcccctcccatgtgcgagcgctggccatagcgccggtgggagtgccgagggcgggagccaagccgcgtttcctggtcaaacgaggcgaactgacgcatctgctgtggcgtggcgaggatgccaaattaacgttcggcaagcgcctgacgaagatcagcatatacgccttcctcttttcggatcttctgttgctgtgcaaacgtcgtggtgaatcctgcttcagtgtgttcgactattgccccaggagcatgctcacactcgccgccggcgattcgctgccccaacttccaaccaaggaccttaaggaccaagccggcaagaacctcatcttgatgacgctgctagagaactgcgaccgcaagaccgtcgagctggtgttgtcttgcccctcggtgtccgaccagcagcgctggctgcaggccatgagaccgcccgaggcggagacgcccggcgagaagctctacgagtcctgggactgtcctcaggtggtggctaagcacagctatgagtccgacgagccagatgttcttcaacttgaactgggcgacgtagtcaatgtttcccgcaaactgcccgacggctggtaccagggcgaaaggatacgagatggagccgtaggttggttccctggaagctacactgaggaactgaattcagcccatgtgcgagcgcggaatctgaagcagcggcaccgtctgctcacctttacggccacctacctggagtcgcaaaagagcaagtgacttccggctgctcttggaaaacggggataatattaactagcaacgccaactccatagtccgcaaccaatagccgtacactttaggaaatgtgataattatttaaatcgatgttagtattgattaatcgaaagtcttaaaataattttccctaccaagtaagcaatagagagtacttgaatataattataaccgtttagtgatgatacttaagcgaaatctaaat

SEQ ID NO: 7263 - protein, 1051 aa, DROSOPHILA
MSALNRSNGQRLSCSGSLSSSGHPADPVTLPRKRRPRARGEVGVTCQGSSTVYLNGPVSAEPIRPAPEPIYQNEAAAISQRCSYSHQRAQLLTSMRVTVAEGAENDAKVTMEVSTFVDDSDHYYETLSPLGNKRHSTQLVRQSQDGNRSGGVRSSHRRSKNHSASAHTLGEHVVISDDYDSFETDSDDHGDGEPDLRQRNYNDSGVDMRNHRLPKPPPPQNQVYEFVRKFKDFISSKKSPKGSQQKLYENTPASTLFYVECSKRTEDVYENTDFGPERIPAPETKGPVHQEQAPVLRAKQKNGKSLRSRLRKSLVGSSFDTKQLSSLAPTRSTFYVEDPEGSLPALPLEPEIHGSGELDSGFSDKNCTPLPETPKFSTVARKAKKEAKANRRRTTIGLRPNDPPPPPPPMTGNKSPLDPERELDAEQTTSWYAECGVFKQATNGAVSPRGDEPVTPTPSGHGGVSSWYAESGLYQTSGISVASSSGSSGVSTGNEAGLGDELSSEPHSLFSNEPLYQMYSAAKLESITRDLEAHGSSDGYEEIGLQAKAKPEPLVKPRPTALQLVEPKNGPSRTLWSEIPEVIHSCILPTLTSRERSLQEAKFEIITSEASYLKSLNLLRRHFMNHNAFLDSSVLSAKDRKALFSYIVPVHECSERLLTELEACWQDNIMLLGLSRCIYEIAERHFHVYVAFCEHQGRMDRTLRRLKESKESLAFQQHLERLEASPSCCGLNLHSFLMLPMQRITRLPLLIDAVFSKESPLNREEYESWKLTLALVQKVVGQCNEAANRWEQAFELERIARQLEFPSHVRALAIAPVGVPRAGAKPRFLVKRGELTHLLWRGEDAKLTFGKRLTKISIYAFLFSDLLLLCKRRGESCFSVFDYCPRSMLTLAAGDSLPQLPTKDLKDQAGKNLILMTLLENCDRKTVELVLSCPSVSDQQRWLQAMRPPEAETPGEKLYESWDCPQVVAKHSYESDEPDVLQLELGDVVNVSRKLPDGWYQGERIRDGAVGWFPGSYTEELNSAHVRARNLKQRHRLLTFTATYLESQKSK

SEQ ID NO: 7264 - DNA, 15464 bp, DROSOPHILA
aaaaattttcgggattagtaatttttattacgcaagtttttaaagataacatccttaaaacttgtaatttttacacccgtgcaaaattcataatttattttacaaagtttccaagaatttgagcgctgctaaagaaagacgactaaagacaattccgaactttaaatccaaggcgtatgggttagcgataaatctgagagccagagatattacaaaacaataagaggacctttttgaactacccggctttgtaattatcttagcactggcccatttgggaaattcccagagttaaataataaaattgagctcgtgttttccaagaattttctcaacttatcccaaccgcaaatcttttaagccacggtcaccaaatcgcgatctctaaatgcagcgcatctgagattatacctggccgagataccttaaacgccactctcgctcgctcaacttctgctatctcactcccactcttgaaaacctacaagctgcagaaacgcgtcgcagttttatcattatcacaacaaatacaaacgcagcagagcggaggtgagatggaagaagcaaaacgacgtcgtcgttggtagtaaataaacacaatggaactgagcaaatccacaaacgtactggtgcactgaaaaaatcactttaaagttttaagaggacttaacaacttgtaatataataaataaaataaaacactatgataataatggcttaataggttgtattaaaagcgcgtaatagaataaggcaataccctttgatgacgaccttttccaaatcgatagaaaagtagtaagatcactcttccctcaaagtgatcttaacaccacatttagttgaaatcagggccaatttgttcgatttttctcagtgcacacacacacaggccgaaacaccctgtaacagctgtcgctctcttccgctctttgcacgctcgcactctttcctctcgactcaaacagcgctgagcgtgcggccagagtcagccagtacagtagagcaatttgagccgccgcatcgagctaaccgcttaccgcttgccggacaaacgcgttccgttttccctccgcttccattcgctttcggcccactgtcgtcgtcggttgtccaaatgtccgcgtagggatagtgtaacctttttccaatttccgggggggtcatagtaaaaaagttaacacctaagtagtccaggccttttgggccaagccgatcccagccatccatttaccgggcaccgggctcttaacacggggatcgttttaatcggtgtcgcgttgtcgttatttcggtttttcgcgattttccccacattccgtgtgctgtgtgctgtgcgaggtgttcttggaattaataaatagttaaaaccgaaacgttggcaaaaatccactgaatgagcaagaaagttatataaggcccgaaccggatttatttattaattatacatacgaatgtgatcaaaacaaaaacagactgacaacaaaactcggctttttggaatataccaaaaaaagcaactcaaatacaaaccgatcccgatatatatatggtaaatgtttaaaaccaaaaaaaaaaaaaaaacagtaacaacagccaaagttgagcttaacttgagcttcggatttaaagccaagtcaaaacgagtttattgtggtgcaaaatcagatttgcatatacatatgcaattcttttacagctttacgctagttgttgctgctttgacatttgtaaaaacataatattcatttttgtaataattccagtttttgacgtcttcaatatgcattggtatagaaaactaaaaacagctgttcaaactatgtaacactatactagactttgcttcgcaataagctaaagtattcaaaatacgttttggggcattaattttaataatcagggggagtatatccattaaggttatagcgataccagtaatttagaatgaattacccagctaaaaaactcaataaatctttgcagtttgcacttgaacatagcaattgttgagagagggttaacaaatgaaatatataaacacaattagcaattagctgattttggctggatcacatgaacgcacatacatacatacgcacatacgtacatatatatctaaaaagttacgattgactggattctactggtctccagtctctcacgtttccgaagatgaatcatttggcatgactacaactcttcgaatcgatcgtatataaagactatttagactatttcaaatatagtcccacatttcagtttaaaatccaatgaatttctgccgaagcatgcacatattcttaccacaaactcttctcccagctcttttgtaaagttaatttattttaatgtatactgtgtgccaaattatttgactgtcaactgcataaattactgcgataacaaacaaaacgaagaaaaaaaagaaaagtggcaaaggcaaaatggaaaatggggaaaatttcccattgaaatgagtaatgaattggtttggggcggctgagaacgaaaccaaccgagagtgggtgaaaatatattataataacagtgtaattaaatgccaacttggcccccgctttcgccagaagagagttttttgcagccgcaaactatgggatacttttgctttgcataattatgctgttcaacttgatttactcggaatgttcttcaagatcttgagtttccaccaaaagggctccctgatttatgctgcacttttttcttttttttttggtagcaatgctttgcagcctggtcagattataaatctcagcagttcataaaaacttcaggcaaaaagctccagcaaaaaccattcagaaacattccaagaaaagccagaaacacgaacgaaaaaaaaaactggtaacaagccgaggaaaaaagtaagaacataatgctacctgggtgcagttggacttgagttaagccaactctgggatggtggagccgcgtcgaatggaaccggtttggtggctggctggcagccagccgactccaacttttctcacatgcctttcgattatgccaagtcgactgcattcttcgagacgcggctttcgctaaacgtttggctaagaccgagctctcagctctcagctccaagctccagcgccccatcctcgagctccatcccatcgctctgcaagttcaacactcagtcgaggagttagacctcaacttcaacttcaacttgatcgctgcctcggctgtggctgcataaaactttaatttcatggaatttcctttctatttttatgctgcaacgccgatgattaacaacagcagcagcagccagccagccaactgccaacaaagagagacgttggacaagtcaagaacacgggaacaagtccaagaccaagtctaactccaagtcatggctgccagctagaacttcaacttctgggccattaacttagctctggagacgggacacagcgggcatgtggcacctggcattctacatctaaggcaggaaattaaaaatgcaaaaaattggataattatgcatgtaaacgttttgtcattaagttgatacttaaatgctgcgtcgattaacaggcagattttaatagaaaataacgctattaaatcggcctagaagacacggggattcctttaggtgtccccacttgtatttcttttataaaaaccacttgcaattgctttgaaagtctgcaaaaaattacaattatgaaccttaaagggtattagagagtttgtaactttttgtttatacttggcatttttcttgcctgccaatagctaactagccgtaaagctgaacagcaaacatttcgcattaatgccaaaaacttttctcgcctctcgaagacccgactaagtcgacacgccaacttggtaataacttggccttggcttggctaagttggccaaagccgcagcgccttaagaatgtcaaagggcatgcttggatatgattacgagaatttccgttcctagctccttttttattgcctttaatgagccagttcaatttccggtctgtcagctggttgtgcgctgataaaggattaatcttatatagaaactatagtttgtcaaattgtgtatgtaattactttagctctgatataaaattctattgaaatagaacgtttatttacctatgccaaattcttatatgtaacccaaataccgtgacacacctgttcgcctggcttattaggcaaataggggactatttgcgccagtattactgcgcccccacaaaaaacactaggatggcttcttttggcaagtatatgggttgtttgtttagtttcctatcgattattttcattgggtatttgcactgcctacttttgggcgcctggcacccggaaattgctaaaccaattggccaacagctgttttgtgtgatgtctatttgcctggcgtcgacagaagacgagcgttgacaattggaacagagaaaactaacgtggttacacttttgtgcgccataaaattgatttgactctcctcctccttcccccttttgacgacgaaactatgacaatcagagcagagaatgccactggaaaatagcgggagacaaccgtttggaaaatcgtcaggcttggctgactttccatcgcctcgaattttggaccactttgcctccgcgacgacctttgccgccataaatcggttggataatcgtctaaacttagcagttatctaaacatagttgctggtgatgtcacgtaactttccacaaaacttgtaagcaaacaaattctcctgttgttttgcttatcgcaaagtcacattttgaaaaatccctttcccattttaaaactgtcagataaaaaagagctctttagccagttttacgtttgcttctgtctgggaaagaaaaatattacatcttgtgtactttgattacacgacgtttgctggagatcaacatttggataaatacttaggaaattaaactactagtgcctttaaaaatcttgttttgtaatctaatatatttttctgtcacatcgaagcatttgtatcaagtttccagggtcattacaaattcagtataaggattgaataaattcaaataagctttggtttggctattgtcttaggaatttgttttcaacgcattatacattcttgtgcatattaaattagttcttagtattccccagtgattttcctctacgattttccctcgctttatgagttatgaatgcgtaatggtaaatgtgccttggatgaatgattggttgttgaaaatttctctgtgtttctcacctttggtcttcatttcttcattgaattgcatattttaatggctataacgtgtcgcacggctcggaaacaggttccccgaaaaattcggttaacttttgttaagtttgccacagcgcgttgagtcattgaaatatttatttgcataatgagtgtaaacagaaagcttgtaagcgtggttcgcagaaacaaaatcgtacgctcacaaaagtggctaaagtcgaatgtaattaccgtcgcatctgccggctggcgagcaaacaaaggataacaaggatcttcgatcgtcctgttgagacacgaaccaaacgattccgtttacctggaaattcggaaatcgtagcaaatcgaagtcactatgctgagaacagacggcggcatgtgcgcgagtccgagtacccacttaaccagagaatccttcgagaatccttcgccacgtgcaccgagccatatggcaggatcctggtaaaaggtgcgaaagagacagaaagccgaacaacaactgccggcaggggctgcattcgtttcaaacgacagatgcaaactatttcgaagttgttcgaattgtgacccgcttgcatgtctcgtgttcgccaggacagaacacttcttataaggtatattatgtatggatgtatggatggtacatatactacctacctccactccacaaactcacatgtgtatagctcgcaggcgtgcctattgtttttattttttctgtgcctgcatttctacttccgttcgtcgggtttttgaggtttctctcaagtgtttttgtgctggaaatgctcgtattggagtttgttttgttaaaggatgtggtggaacagttaggattgtatgtatacatattccacatatcgatttcccaatttcatgtactctgataaggataaacttgtacataaatgcacttttagagatgcatttctgtctttcttttttattaacaataataatagaatttgtaccagacagtcgcatttattttctaatatttgcatcctgccagcatccctagtcacctttttttttctcacacttaccttttcccacaccccccgccaatttttcgataattcccatatagaaccatatatggcagacacataatggtcagatcaacgcccaattgacagctaataattatgcgcagcataccctagtattttgctcaatggcaggaacccctgcgcccgacgacgccgctgtgcaattagaaccctgcctgcctgcataggacatgggtgcataggaattccctccccccaatcttctagtgctttaacattttaggggtgcatttgggtcagcgtgtgaaatacctttgcatccgtgcgtaaagtaacccaagctagcgatcgagatcgaagaatccttcatgcgaaatcccacggagttcaagaaactcttttattctagcaattatttcttaccctttcttggcttctatacccattgtcattgtttttggatttatgtacgagaagatgttgctgagtttgaacagctaaattgcgtcaccggaaaaaaaaaatcgcatgcttcccttaagaatccacaagtattcgccagatgctgtgcgatcttttgttgctgtctcattatttccgtttaaaccatttttcggctttttggctgcgaattctttgcgcacttcctttaaagtaaccaaacaaaccgggcaaaaagcaatgctagctgttttctctaaagatttattatccggtgaactttttaggttgcccagatgtttggctgccttaatacttctccacttttccccagcggtgctgcttgctgggggcttcagatactatttagaaaagctcattggaattaacttatatgactccataggggctaacctgcaatttatgtgggctaagtaagatgcgacaaattttattgctggccaaagtttagcgcttgggttcaaattagaaaaataaagatggattttgatatttgcagtatttaaaatagtaattagatagtatgatagtgtatgttcatatatttcatttattaatttatcattattaatgttaatcacaaacataaatattcacaaaatcctttggaaatctacctggacaaatttgatacgcaatttccgctcacaaaatccttgaagtcatgcctcattgcaccttattgtggtggctaattgaagtcattatcgttcagctcccgctacccataaaaaatgtaaaatacacgaacgcttaatttctcctttaaatattcacacaaaacgttggctgatatatttcaaatttatttcacaaaaaaaaaacgaagagttcccacgaccaccgacacaaggaagagcattaaaaattataaattcctgcagttgagggcaaccctcgaaggacgaggatgcggatggaggaccaaggggcagaggaactcgatggtggttgataagacccctagccaagccaaacaaaaaaaaaagaaggactgcagacagacagaagcgtatggcgggaataattataattttatatcaagtactagcaaaaaaaaaaaaaacaagaaaggaagccattaaacatgtatccttttttgaccatcacttcggcgtgtgaaattttcaaaacgcatcacacaatgttagtttttacactgacgttctcaactaagggaaaccattgaagtgatgataatagatggtaaaaactttaaaacttagctattaaagaaagctgtacttcaaaatgtggatggttttgattcctactaagaaaacgctatcagagttaaaaaagcccacttcacagtaactttactccactttactttgtacagaactaaaaaatccaattataattttaattccggcacgtatgtatcttgcctgcatttcgatttattccctccttataatgatgacatcaaacatccgagtgccatcagacatatcctgaaagatccataactgtgatgaatgcaagttaagcctatgtacatttcggcacagatagatggcactgtcgatgatgggaaatgggctgtccagttgcctgaaaggactaaacttttgttaaaggattaccgaggtgtcatactccaaaaggctagactgttggaaaagtcattggcactctgagcgaaatgcaacaagtgtcgatgcccttttgagggcagattgaattaaaattgaatttcatttaccgatctcccactctagatcgagacttgattgtggttatgcaatacaaattactatatgagctccgagcacacagatacagttcatatattcaccgatatacaaaagtgtcattgactgcgctggtttttgtcatgccagggttaattgtttaatgctaaattaaaaacaaactggaaaaaatcgccatgttctagctcggcatttcgtcaccaagttaataaagacaaccagccagccatgtggcgaatgatttacaatgctatctgctgtccacggggcatggctttcatgaaagaaagagtttaatgaattaattacgctgggtgtcatcgcaggcacaaccctgaagaatggtcaaaggtcaacgaagtggcagacaaaaattaacttgtgctgggtataattattcaccaactagccaccaactaaagagtaaagtcagttacatttcaaaggagttattattcattaactccattcgttcgagctaacttcttttccgcaaataataattgtttactgtagccatggaaaataccccgtctagttcaccatattaattaccatatcacaaagagaaaataaatatgttcgtatcgagcaaacattgataacgaacaaatatatctccccatactttatattattttttttcatttttatcaaagcaaactgcagtcggatctgattctctggcaaacacgtacacagattttacggctggaacctgtttcgtgcctcgattattggttgaatgaaccctttccggatggtgccccacaccccggtgtccaaatcgttgtacaaaatgctatagccagtcgattgttgtcatttctgaaatcatgtttacttttagtgcgtgatttggattttatttttgtcgttttctgcccatctcgccataagatggcttacgcatttcatgaatcatagatgatactaaactttcggtcaagtttacttcggcttttatgggattttaaagtggttagtttgagagaattgacgaaatttataggtcaattttttttcattttacgaatatttaccattgccaatttgccaattttatgaaaacaaattcaactaaatgttcagttcggcagccaaaatgtcgcctactggccaatgaatttattcagttttattgttattgggtttgccctcagaacttttaagccaaatgtcaagagcatttgtaaatcattttcttctacccaccacaacatcatattttcttaaaagcctctgacccacttaaaaaatgctttaaatgctttttatgttcacaattcgattagcgtcgatgggaaaaatgcagtcaaacagcatcccagcggaaaagtcaacgcccttcttcaaaagtcttctaatgaagccggaaaagcaaaagccatatcacaaaccaaagcccaagcaaagctacaaattgtgggatcatgatggtgtggtcaccaagtaaccaagaaccgaacttctggccttcgggagtaaataaaatgttcaaactggtttcgtaacatttaccgttaacggctttaagtggccaagaagaaagtcaagttgcaacggaattccgaattgtactttaaatgttctgctcaaattttatcactcgacaatcgtcgaatcacaaataagttggacaaataagaccaattagcctgagtaacctgacactgtgcaagttggtcaattaacatgaccaggctaatggtcgaagaacgtgagatgtctggctgaaacgtggaaaaccattgggaaaatgctgtggtgggtaggaattgtggttgaattcattttatatgacaactctggccttcgggttctcagagatctaaatatgcaaacgaaatgtggacagcgtacagattataccattatttagttcacacaaatattggataataatttaaagagttaacaaaaatacgttgggtaacgttatttgtgtggtcttatcaagcgcccacttcaaagcgtttattaaaaaagaaaaaatatcgctgctagacaaccataaatattgctcgtaaaatctacatttttgatattcctcgaaggaactcaagtcggacgcattatttcttgtgaaaagcaaagcaaaatatacacagttttgttatgattttgcgataattgcagacgcttagtttatcaacagtttaccgcaatacgaggcatgtgataaagtcacaaaaatgtcagcccgtgtcaccgcagcgctgggaaaacaaaagcctcgggcgaagtcaaagcaaataaattctaaaagtcagcaaaaaacaaaaaaaaaaaagaaagaaatatgaaaaattaaatatgtgtgtaaacaattacgtgagacacccgactggccacgcccaccgcccacagctgcccacacgatgcgataagcgattggaggccgttggcattaattgctcctcccgacttcagttctagttcgggccaagctgtggaggttggctggcattatctgtacgtggtcgccaaaaaaaagctcttaatggatcgtatttattggtggggggaaaatacaaattatgtactattcggagggcactcttgatctcgactcaatgacaatatcgagggggcgttgtatcaaaaacctgaaaagccgataaaccaaagtgctttcatgtgtcgattgcgataaggaggggtgtgaatcatgcatattgaagacgtcagcactgataacgctacgtagccccccacacaagaaactataacatcaacactctttacacattttccagatcgcgcccatcaatttaatttaatcaaaagcagttactcaaattcaatgaacaaataaatttgcgcagcccaacaagccaataaacggatcaataaaccgaaatacaatacacgatttccgctaacatctggcaacgctgtccgttggcagcttgtaacggttattcacgacaatttactcacgccccgaacgagtgcagcgaaaccagcgagtgcgagcgagagggctagcgaacaggcatgggaaactcctcgtcacacacgcacgaaccactcgagcgcggcttcacacgcggaaaattcggtgatgttaaaaatggggtaggttttagatacgatccgcagttccacagagggttgaattgcaacaaaccgcacttgtttcgatctctctctctctctttctcgtttaatatgttacataactaatgactgataatgtatccttatcccatagaaatccgcttccttccggtttagcaagaaatcgccgaagaaaatggatcgtctgcgtcgctcctttcgcgattcctttaggcgtcgcaaggatcgcgttcccgaatcctcgaagccgcatcaatggcaggcggacgaggaggccgtgcgatcggccacctgctccttttccgtcaagtatctgggatgtgtcgaggtctttgaatcgcgcggcatgcaggtctgcgaggaggcactcaaggtcttgagggtaagtgcttaaaagcatatattaaggatgaacttgaggcttaagaagatgaagaactgactctaaagaaataatatttaatacatatgttgttagttacttatcttttatttcctcgcgtccttcgttatccttcatctagattaaaccaattactaatttattgttttttttttatatttagcaatcccgtcgtcgtcctgtccgcggattacttcatgtcagcggagacggcctgcgagtggtggacgacgagaccaagggcctgatagtggaccagaccatcgagaaggtcagcttctgtgcaccggatcgcaatcacgaacgcggcttcagctacatatgccgggatggaaccactcgtcgctggatgtgtcacggcttcctggcgtgcaaggactccggcgagcgattgtcccatgccgttggctgtgcttttgccgtttgtctggagcgaaagcagcgacgcgacaaggagtgcggcgtgacaatgaccttcgacacgaagaactcgaccttcacgcggaccggatccttccgtcagcagacgttgacggagcgtctggcaatggccacagtgggcacaaatgagcggagcgtagatgggccgggatcagcaatgccgggtcctccggcggccaccgtcaagcctttcaatcccttcgccatcgaacggccccatgccacgcccaacatgctggagcgtcagagttcgttccgtttgagcacgattggcagtcagtcgccgttcaagcgccagatgtcactgcgcatcaacgatcttccgtccaatgccgatcgtcagagggccttcctgaccgccgccgctggcaatccaatgcagacgccactgcgaagtgtttctcccattgccgaggtctcgccggccaagtctgctggagcggatccgttgtcagctgccgctgtagccgccgattctgtgagccaactgtgtcaggagctcagccagggtctctcgctcttgacccagacagacgccctattagccgccggcgaggatctaaacttcaacaacaatcgcagcattaatcagaacatcattgccgccgagaagcaggtgcaacatgtacactcatatgccccgccgacggcacaagtgacgcctcgagtggccagcaccacgcccacatatcagacgctccattcgcagtcgccctcgcgatcggagcagagcatcgaaacctcgacggaactgcccaatgccgagcaatggctgggtcatgtggtgcgcagtacgtctccggcagcaccgaagcggcccacttatttggccaacgttggccgagctcagacactggccagtggcactggcgctgcagttggaggcggtggcccagacgatccatttgacgccgagtgggtggccaatgtggcagcggccaagcaattgtcgccagacttgccaatcccgagcactgcgcgctcgcctctggccaggcacagcaccaatccgttcatctcaccgcccaaggcgccggcgcagtcattccaggtgcagctctaggcagcgattgcggggtcaccagggggacaaagtgtggttcgcttgaaaaaaacgtaacttagtttaaagttcaggggcaggatcgggccaaacagagaatcgaacaaagatggttagatggatggctggatcggatggaggttatcagagatacttaacgcaaacataactaatgttgaatatgcatatatagaaaacataaactacagttactcacacgcaaaacgcatcaagtacagtaaataaatccatcaatggcgcttagcactaggccaaaacttaaattgcttcgagtaaaataaatcatcagttcgtaagagatcttataccgaatttcagtcttataagcggttttgagtatgcaactaggaattaaagttctacgacatgtaatttttaaaagacttgagtcatacttcgatcattcttcccatactaaaagaccgtttccattgactagactgatactggggaagatcccttagtcactcaacaattgaccaagctaccaagttacccacgaaagtccaccataaagtaaacaacaaaacaaaaacaaatggcaccctctaagcttaaatgcaaactctgtattatactttggtaatgcccttccactacttgttgattgatcccactaagaataatgattagatacataaatatgtatgttgatatataggaagctctatgtcatagagccgattattattttatcagtgtcagttttgcggtacaccgtttttatatcaaatcttttattatttaacttaatttttaaatctgtacaaaatgtattatacttaaattataaatataatttaaaaataaacaaaacggaaacgtaaaaacttcaagttatttaaacatagaaatcaagcagctaaacgcaatgcaactaagacgatatagaaatattgaaataaataaagttatatagaaacatattgcatatattataaaagacgaagccaaattcggcaaacagaaatacattcgatttgtgcgcttctgacatgtatttgttttatttttgcggaatattttttaacacatcccaatatattctaaaggaatacaaaatcacgtaaccaatgcaccaaatgttacctaatgtttataggctgattatttaaaccctagatagtatcaactagaaaaaaaaatccattcattgttcctaagaagaattaggagtcaagtgaatcgcactcatcagtatttaaataaagcgtagctacatatatcaacagatcgacttaactcaaacctatgcaaaggttttgtatatatgtataaaaagcgagtcgctctgaatgatttatcaattgatttgccttgcaaactgtcacctggcttttttggaaatctaactaagttttatctacaaaatcagaaattttctatgaatttacacgagcactaatgtaacataaggacgacttaaaaacaaatatcaatttgaaaggatcttattttgtctcaatattacataaattggtatggaagaaaaataatatatatatatattagttacttatatatatatatatacatatagtaaatcattatattcctttgaatagtttcccacctcgatcatttttaaacattcatgatgcattttttggggttttcacataattatttgtattaaggcactaatataaatcctgacatttgaaaatagtcgtagtaggagaaggccttatgacgaggagacaaaaatctaaataaagccacacaaataattgtcacataaacaccttatatagtaaaaaacatatcgtttcgtttgacgtttagtaaaattgacatgcaaagagaatgttatatatatatatgccacatattatctgagatattatgcttatttatttacaaaaatgtcggttgaatggtagctattggaaattcaaatattgtgaagcattgatcattcatttgaaagttaaataaacggtatgaaaatacataaatagtcaatgcaagtaattgttgcagccaacttgttt

SEQ ID NO: 7265 - DNA, 3479 bp, DROSOPHILA
gtagagcaatttgagccgccgcatcgagctaaccgcttaccgcttgccggacaaacgcgttccgttttccctccgcttccattcgctttcggcccactgtcgtcgtcggttgtccaaatgtccgcgtagggatagtgtaacctttttccaatttccgggggggtcatagtaaaaaagttaacacctaagtagtccaggccttttgggccaagccgatcccagccatccatttaccgggcaccgggctcttaacacggggatcgttttaatcggtgtcgcgttgtcgttatttcggtttttcgcgattttccccacattccgtgtgctgtgtgctgtgcgaggtgttcttggaattaataaatagttaaaaccgaaacgttggcaaaaatccactgaatgagcaagaaagttatataaggcccgaaccggatttatttattaattatacatacgaatgtgatcaaaacaaaaacagactgacaacaaaactcggctttttggaatataccaaaaaaagcaactcaaatacaaaccgatcccgatatatatatgatcgcgcccatcaatttaatttaatcaaaagcagttactcaaattcaatgaacaaataaatttgcgcagcccaacaagccaataaacggatcaataaaccgaaatacaatacacgatttccgctaacatctggcaacgctgtccgttggcagcttgtaacggttattcacgacaatttactcacgccccgaacgagtgcagcgaaaccagcgagtgcgagcgagagggctagcgaacaggcatgggaaactcctcgtcacacacgcacgaaccactcgagcgcggcttcacacgcggaaaattcggtgatgttaaaaatgggaaatccgcttccttccggtttagcaagaaatcgccgaagaaaatggatcgtctgcgtcgctcctttcgcgattcctttaggcgtcgcaaggatcgcgttcccgaatcctcgaagccgcatcaatggcaggcggacgaggaggccgtgcgatcggccacctgctccttttccgtcaagtatctgggatgtgtcgaggtctttgaatcgcgcggcatgcaggtctgcgaggaggcactcaaggtcttgaggcaatcccgtcgtcgtcctgtccgcggattacttcatgtcagcggagacggcctgcgagtggtggacgacgagaccaagggcctgatagtggaccagaccatcgagaaggtcagcttctgtgcaccggatcgcaatcacgaacgcggcttcagctacatatgccgggatggaaccactcgtcgctggatgtgtcacggcttcctggcgtgcaaggactccggcgagcgattgtcccatgccgttggctgtgcttttgccgtttgtctggagcgaaagcagcgacgcgacaaggagtgcggcgtgacaatgaccttcgacacgaagaactcgaccttcacgcggaccggatccttccgtcagcagacgttgacggagcgtctggcaatggccacagtgggcacaaatgagcggagcgtagatgggccgggatcagcaatgccgggtcctccggcggccaccgtcaagcctttcaatcccttcgccatcgaacggccccatgccacgcccaacatgctggagcgtcagagttcgttccgtttgagcacgattggcagtcagtcgccgttcaagcgccagatgtcactgcgcatcaacgatcttccgtccaatgccgatcgtcagagggccttcctgaccgccgccgctggcaatccaatgcagacgccactgcgaagtgtttctcccattgccgaggtctcgccggccaagtctgctggagcggatccgttgtcagctgccgctgtagccgccgattctgtgagccaactgtgtcaggagctcagccagggtctctcgctcttgacccagacagacgccctattagccgccggcgaggatctaaacttcaacaacaatcgcagcattaatcagaacatcattgccgccgagaagcaggtgcaacatgtacactcatatgccccgccgacggcacaagtgacgcctcgagtggccagcaccacgcccacatatcagacgctccattcgcagtcgccctcgcgatcggagcagagcatcgaaacctcgacggaactgcccaatgccgagcaatggctgggtcatgtggtgcgcagtacgtctccggcagcaccgaagcggcccacttatttggccaacgttggccgagctcagacactggccagtggcactggcgctgcagttggaggcggtggcccagacgatccatttgacgccgagtgggtggccaatgtggcagcggccaagcaattgtcgccagacttgccaatcccgagcactgcgcgctcgcctctggccaggcacagcaccaatccgttcatctcaccgcccaaggcgccggcgcagtcattccaggtgcagctctaggcagcgattgcggggtcaccagggggacaaagtgtggttcgcttgaaaaaaacgtaacttagtttaaagttcaggggcaggatcgggccaaacagagaatcgaacaaagatggttagatggatggctggatcggatggaggttatcagagatacttaacgcaaacataactaatgttgaatatgcatatatagaaaacataaactacagttactcacacgcaaaacgcatcaagtacagtaaataaatccatcaatggcgcttagcactaggccaaaacttaaattgcttcgagtaaaataaatcatcagttcgtaagagatcttataccgaatttcagtcttataagcggttttgagtatgcaactaggaattaaagttctacgacatgtaatttttaaaagacttgagtcatacttcgatcattcttcccatactaaaagaccgtttccattgactagactgatactggggaagatcccttagtcactcaacaattgaccaagctaccaagttacccacgaaagtccaccataaagtaaacaacaaaacaaaaacaaatggcaccctctaagcttaaatgcaaactctgtattatactttggtaatgcccttccactacttgttgattgatcccactaagaataatgattagatacataaatatgtatgttgatatataggaagctctatgtcatagagccgattattattttatcagtgtcagttttgcggtacaccgtttttatatcaaatcttttattatttaacttaatttttaaatctgtacaaaatgtattatacttaaattataaatataatttaaaaataaacaaaacggaaacgtaaaaacttcaagttatttaaacatagaaatcaagcagctaaacgcaatgcaactaagacgatatagaaatattgaaataaataaagttatatagaaacatattgcatatattataaaagacgaagccaaattcggcaaacagaaatacattcgatttgtgcgcttctga

SEQ ID NO: 7266 - protein, 556 aa, DROSOPHILA
MGNSSSHTHEPLERGFTRGKFGDVKNGKSASFRFSKKSPKKMDRLRRSFRDSFRRRKDRVPESSKPHQWQADEEAVRSATCSFSVKYLGCVEVFESRGMQVCEEALKVLRQSRRRPVRGLLHVSGDGLRVVDDETKGLIVDQTIEKVSFCAPDRNHERGFSYICRDGTTRRWMCHGFLACKDSGERLSHAVGCAFAVCLERKQRRDKECGVTMTFDTKNSTFTRTGSFRQQTLTERLAMATVGTNERSVDGPGSAMPGPPAATVKPFNPFAIERPHATPNMLERQSSFRLSTIGSQSPFKRQMSLRINDLPSNADRQRAFLTAAAGNPMQTPLRSVSPIAEVSPAKSAGADPLSAAAVAADSVSQLCQELSQGLSLLTQTDALLAAGEDLNFNNNRSINQNIIAAEKQVQHVHSYAPPTAQVTPRVASTTPTYQTLHSQSPSRSEQSIETSTELPNAEQWLGHVVRSTSPAAPKRPTYLANVGRAQTLASGTGAAVGGGGPDDPFDAEWVANVAAAKQLSPDLPIPSTARSPLARHSTNPFISPPKAPAQSFQVQL

SEQ ID NO: 7267 - DNA, 3059 bp, DROSOPHILA
taagcacggtgccaaggacaaggatgagcagtaagatcgccagcagtcgattcactagccagctgcctctccaatcagcctgtccaaactatccatcatgagtttcgttttgataatttaatatatacaagtataaatattttttttttttggtttcgcgccttctgttctttgattcctgataatcctgtacttatccgtgcatttgaattaaacaaaaagtagccaacaccagcgattgttatgtacgacagtgtagtgtgtgagatgttggtgccagataacacgatttcccgaaaaactcctttcataagtattaactcattgaatatacatatatattacctatatacaaatacatacttatacaagaatgtggcaataaacctttgtttttcttacactcgagaacgtgcgcacgtccaaccaaacagatgtctgcagaaatccttcagccaaaagcaactgatcaaacaagggaaactttggaatatgtaccccccatggctaattaagcatgatcactagcacgatgtgataagtgtatgtagcttcaaatgtggcgggaaattgaaagagatttcggaaattagtcaaaattttcttggaatcttcgacaagctgactaatgagttcatgtccaaaagactcgaacttgcaaactcatatcttatctcacattatttttgattcgaagatatttcagcttctgcaaatatatgtttttcaagaatttatttaaaaaaaaatcaattaaatagatggcttaatgttcgaaacactcaacgttgtatattacacactttttggacaactattaatttaaaagaaaacacgaacatttgaaaatctagaaagacacggacacaagaattacaaaccagacaaagaggcgtctaaacactaggcaaattctatgtacaaacaaggcgctacgactacaaattaatggttaatggttaatggcctctgcagcaggaaccatcacagcccgcgaagattactccaccttcttggccagcggagcggtgtcgaagtgggtcttccggctcgacctggcccgataggcgtccctcacctggttgatcacattggcgaagagtattgtgccgaagaataccaggatggtgcctacccaatggtttagggtgaatggattccggaaataaatgatcgagaacagcagcgagacgaacttgcgcagggtgaccaccagcgttacggttagcgatgcacattcggtggtcagaacgtagacggcactgatgcatacatactgggtgaccacgttgcacagcagatagaacaacatcagcgggaatttccactccagtccaatggctcccagcagtggcacggccactggttccgatgaccatgcgataccaaagtgttggactatattgccggccatgatcagaaaaccgggcaaaggtaacatgtgcgtaaagaataaggcctcgctgggatgcttgccgtatttcttgtatatcacctcctggtagatgcccatgtaggcggtgaccagcagggcgattgtcagcaagccaatacccaccgtccaccagaagaaatcggagtaggatgtatccaccttgaggctgtgatgtgtattatccttgacatcgccactggagaccagagtgcacaatataatgccagccgtgatcatggccacggagctgtactgtcgcagattgtagcgcttcttcagcagcacaatgcccatgatcatgttggccatcagtgatccgctacggaagatcatgtgcagcggcatgggtatgttaaagttgaaggcatagttattgcaaacgttcgccccaaagaacagggccaccaggatgacgtagtccttcagcgcaatcttcggtcgcaccgtaaagaacttggaggtgaagaccagaccctccagcgcgatgaacaggaattgggcgaaggtgatcaggttacccgctcccggatcgatttgaatgatcagctccagaaagaccacgttgctgcagcagccgatgaacacgaacagcatgcccagcagggccttcaggttcagagccatatctgaaagataaatatgtatatgtttagaaattttaaaaatatgaatggttataggctattaaaatccagcatcttgacaatcgatgttagagtacgtgttcaattttaaattttttttaaactttttgtcaagtgtgttttttttttcattttgttttctagcatgtaaaacattccgtgctatctgttatcttaaaggggtaataagtaggtacgtatgtacacacatgcacgtaaattgttttatacattcgcaaaacattgccatgattacgaagcaatttgatttccactaaattttgctctgattatgctaaaaaagagtttagcactattaataaatcaatctgttttgaatatattactactaactgatgaaattatttatttaaattattgttaatttgcaattcagcaattcagagctattaaatttcagtcgtacgtcgtatgtgcaaagcacacggggataccgaagaaaaacatacattagcataaattattatacttattctttgcgcattgtgaatgcatatgaagctaatcatttggctccgagatttattaatcacgatagctaacagttataggagatataaaatttgcataaaatgcttaccaaaaatagaactgatcgtaaacaaagctattttaaagtggtcttttttggtgaaattaatgacagttttattcacttttttactaagcttatgcggtactaatttttattgaaatattaagattctttatcgatggctggtagcagatcgattttttcgatatatataatcgaattctggtttttactggaagggtatttccaaggtcggtgggtgagtgtagatcgcagcccgctcagcgttagtcggcaatttggacaattgtcacgttgccgataagaactatgcgaattgtttaatttaaactgaacaaaaacgacaatcgttatcggcgttacttaccttcgcaatgggatatattctaatccgcgggatgtg

SEQ ID NO: 7268 - DNA, 1059 bp, DROSOPHILA
atggctctgaacctgaaggccctgctgggcatgctgttcgtgttcatcggctgctgcagcaacgtggtctttctggagctgatcattcaaatcgatccgggagcgggtaacctgatcaccttcgcccaattcctgttcatcgcgctggagggtctggtcttcacctccaagttctttacggtgcgaccgaagattgcgctgaaggactacgtcatcctggtggccctgttctttggggcgaacgtttgcaataactatgccttcaactttaacatacccatgccgctgcacatgatcttccgtagcggatcactgatggccaacatgatcatgggcattgtgctgctgaagaagcgctacaatctgcgacagtacagctccgtggccatgatcacggctggcattatattgtgcactctggtctccagtggcgatgtcaaggataatacacatcacagcctcaaggtggatacatcctactccgatttcttctggtggacggtgggtattggcttgctgacaatcgccctgctggtcaccgcctacatgggcatctaccaggaggtgatatacaagaaatacggcaagcatcccagcgaggccttattctttacgcacatgttacctttgcccggttttctgatcatggccggcaatatagtccaacactttggtatcgcatggtcatcggaaccagtggccgtgccactgctgggagccattggactggagtggaaattcccgctgatgttgttctatctgctgtgcaacgtggtcacccagtatgtatgcatcagtgccgtctacgttctgaccaccgaatgtgcatcgctaaccgtaacgctggtggtcaccctgcgcaagttcgtctcgctgctgttctcgatcatttatttccggaatccattcaccctaaaccattgggtaggcaccatcctggtattcttcggcacaatactcttcgccaatgtgatcaaccaggtgagggacgcctatcgggccaggtcgagccggaagacccacttcgacaccgctccgctggccaagaaggtggagtaa

SEQ ID NO: 7269 - protein, 352 aa, DROSOPHILA
MALNLKALLGMLFVFIGCCSNVVFLELIIQIDPGAGNLITFAQFLFIALEGLVFTSKFFTVRPKIALKDYVILVALFFGANVCNNYAFNFNIPMPLHMIFRSGSLMANMIMGIVLLKKRYNLRQYSSVAMITAGIILCTLVSSGDVKDNTHHSLKVDTSYSDFFWWTVGIGLLTIALLVTAYMGIYQEVIYKKYGKHPSEALFFTHMLPLPGFLIMAGNIVQHFGIAWSSEPVAVPLLGAIGLEWKFPLMLFYLLCNVVTQYVCISAVYVLTTECASLTVTLVVTLRKFVSLLFSIIYFRNPFTLNHWVGTILVFFGTILFANVINQVRDAYRARSSRKTHFDTAPLAKKVE

SEQ ID NO: 7270 - DNA, 7443 bp, DROSOPHILA
tgttggcattttgcagaggctacatctgccacaaaagcttccaactcaattagaagccttagcgtcgttttcatgttgtttacccacagttgggatgcggcgcatactgaaaacgaaactgaaatgcgagttcaatgttttgattttgaaatgggctctgaaaatccttgaaaagtgtcatcggccggccacagcagattaatttacaaaatagtcgaaattcttccgcaataaaatgtgaagaaaaacaaaagcctgcggtatggagatgatctatttatgaggcgaaatccactgcccgagacgtgtctccttgcggcaaagagtcaacgcacttcgcagctcatgaattttactacaattgccgctttacgcacttttatctgaatatctgttgcctgaaattctgttttcctccttttctttgtgcattttaatctaatttattattgccggcgaggcggaatttttctttgcgtaagttttggaccgattttaatgctcaaggggaaaatgcttgacgtgttaagtctgaaaacttgtggtttctaatatgtaatggaatataaaacattattttttttagcttatctcccacttaaatgatacattgttgaaccctcgtatcatatataaatttatatattttcattaaattgctgtcaaataatttaagttgaacccctatgtgactaaaatagaaaccattttagtttaaataaatttctttgaaaatctaattaatacaaaaatctacttctcttttgcgacatctggcgctcagaaagtatactaaacagcactgtggcttgaactgcttgcatggtggaggtattcgctaggagctggcagtactaaaagcagagaacacaaccggaagcgttattccacaaaatgtggccttttaaattatatgtgaaaatacgataagtaccttaaaataccgaaggcgcgcagttttcagtataacagctggccgagtaactggccacaccattccaattagaaagaaacctatttaagcaaaacgcatcgatctctccgtaattttttgtccgctgagtaatcggaaatcggcaacggaataatgggcaatttcgacggcgattctggaacggttttcgagcagagctatgcgacgaccaacggaaacggaaaggtgccgaatggcaatggggcggcagatctcagtgccccggaaaaacaggaacttctccggaagttctcggcacccgcgtacactgaaattcgcacgcgacgctgccagccgaagcccgcaaacgacgcccaggtgagccaggcattttcgctcagtgtgcggggtgaaacgcgagttaaacacttggacgaaacgaaaataacgagctaaaaggccataaaaattggccaaaaatgtggttccatagctggttccattcaccctctcgctcgctcttccagccggcgaattattgattttgtgtgagagcgagggagcgcgcataagagagagggagagagagtgagagtgaaggcgtgcgtcagctggagaatttcggcccaatttttgctgccctttttggcgattttcctccgcttttcccgcttctgggtcatcgggcagccacagctgttttccctccactgcagtgttttcctcgcgtgttttccttttcgccgcgagtgctgaccatttggcgtattttggctacttccggatgatagaaactattagaactctgcggaaatatcctatcatcatatacgatcagagagttatttcataaattgtgatcatgaaaggcaatttgtagtgttggaaattaaagtattgggcaatattatttcactttcattattataattttaagtagtctatacattcctctgagatagctatcttacaattgactaagccctaagataagaacatcagcatgttaaagtaacttagatttcagaaatttcataatacctattttagatgtgcgttaaactgtttggtacgctagtccattttaccacatgcactctctaatctagccattgtctcttcttcggcactcctgcactcattcgaaattttcctagtgactggagtacgaccccaaagcaaacacacacataagtacgtagtttgggtgcacaatgtgtgtggggagagcggcacaatgctggtctggtcataatattgtcatgccacgccatgcccggctcgccttatcaggcccattccaccagtcttttacgtaaagcctcgcagaatgcgattcgctggtgaatcacaatgctccgcaatctccgaaggcagcggttttgggtgggcgttgatttgtcggtgataagagttttgttttaaaattcatggactctccctgcgtctgggctgccaaagaataactgttggcgggtatacttaaccgattatcatattttttattattcataactttttaaaaagataagataaacatattataacattacattcattgggtaattccgatacaattcgatctttggggagtgagcaattgttagttttcttttaagtacctaaagatttcattattggtagctttgtatttctttttttcggaaagtaatacaatggtttacataaaatttatttaatgaaatagttccgtaccatggcgacaacttattgaaatcattcagcttgatttaatggcaactaaagaccttttcaaatttttaatcacacgaaaataatgttagcgcgtgcaagtctcatatctccaatatcaacggatagaaaacttttatcagctcggcaagattacagtatgcatgatttcaaaggtaaaggcttaaataaaaaagaaatacttaagaatatgaaattgccaaagcaattatctactgactcacagctaatacttcttggaatccccacaaaatcggttagaacttggcgtgcgctggtcgattgtcagtcgttatcttggactccatggatccccaacatatggaagtcattatctggatcccacaccatgctccctacttagctgtccttctgtacgcgacccatagcgtaattagtattacactttttctatttatttatttatgtcggtttcgattttgatctttctacggtagcttcgagctcgtctatataccctaacactgggactccattaaataactaggcatcgcgtaacccacttgacttttcgctccccgcactccgtctcatcgtatttagtaaacaagcccggtggcaaatgataataaacacgaaatattattgtcgccgactcgttattgttatacgattaagctgacgttcaactatatatatttttcggaatatatatctgcagtttgtgttgctcagttaatgagatatatatatgtctcgtatcggatcctttggccagcaaaatcaataagcaaatgatatatacacttaaataagtacgttaattataacgctctatttgttagctggtgaggttgaagtgtgccaagttgggcacacaaatactatatacatttatggcttcccctgtatgatttttgtgtctgtctctttttgtgtgacttcatgtcgaactcggctcatgtgagcggtggagcaaattgttcagcagttatcgtgtgattgtatttatatatgtacatacgtaccttgcatatatggatcttttagttaaatgttaattgactgatgaattgactgaacgcatagaaagggcaagcaagtgagaatgtagaatttttcatttttttataaaagcgtttacgcatgagaactataagttttgatatacatactcgtataaatgggtattactgtgctgatccctttgaagcgaacatgtttacaatctgtcttacaatttcccatctagcccgtctaacaatattgattatttgctctttgatgagtgattttcaatggaaattatgaagattcacagtgataccaatgatagcgataaccagccaataatcgttcctctcccctcttacagagtcccagctcgatcaactaccatccggaaaagaagtcgatccccaatgggcatgcctccattctggatcaggagtccaagcccaaccaggcagagggcaaactttcgccggagctggagcacttccagaaaacctcctttgaggaggtgcctttgcacacggcctgccttacgtatttgggattctatctactgatgatcctgggctacatcaaccagttgctcttcgtgcccaaagtggccaccgagaagggtcgggatggctatgtagccctctacgatgccttcgaaagcttctactcgaggtacgtttacaggagaatcaaggattgctggaaccgacccatctgcagtgttccgggagacgaactcactctaaaggatcgcgtaaccgatgattatggatggagtttcaagttcactggaacggagacacgttgcttaaatctgggatcctacaattacctgggatttgccgccgctactggacagtgtgctgatgattcagaggaaagtgctcggagctctggactggcatactgcagctcccgttgtgagcttggtgacaacgagcagctgcaagagctggaggctctaactgccagatactttggcgtggaggatgccattgtctttggaatgggtttcgccacaaatgcgttgaaccttccctcactgctgggacccaacagtcttgtgattagtgacgaaaagaatcacgcctccatcattttgggactgcgtttgtccggggccaccaccaaggtctttaagcacaacaacatgcgcgatctggagcgcgtcctccgtcagggtgtgtgctatggaaatcccaaaaaaggtggtcagccatgggacaaggttatgatcttggtcgagggcatcttcagcatggaggggtccatagtccgtttgcccgaggttattgctctgaaaaagaaatacaaagcatacttgtatttggatgaagctcacagcgtgggagccatgggttcccgtggacgaggagttacagattattttaatgtggatccgaaggaggtggacattctgatgggcaccttcaccaaaagttttggcagtgctggaggctatctcgctggatccaaggtatgcttgagtggctacactttcgcatattcctcacttatcaataatcttttatcctccccagaaactgattgactttctccgcaccaacagccacgcccattgttatgctgcttcgatctcgccacccatcgcacagcaaatccttacctccatgaagaccattatgggtgaagatggcactgacattggacgcaagaagatccaccagctggccaggaacacacgttacttccgccgacgtctggctcagctgggagtgatcacatacggtcacgaggactccccagtcgtgcccatgctggtgtacctgttttccaagattgggtaagaatggggtcataaaaccaaaataacttttgtcattagattgtgcgtggaggagcatttcattttttaaaagatcaaacgggaaaaaacttcaattatcctgtggagtctctttttactaaactgcattttctctttgtagcgctgtggttcgcaccttgacgactcgccacattgccgcggtgggagctggattcccggccacacccatcatggaaggacgcatccgattctgcctttcagccgcccacaccaaggagcagctggactttgccctggaggcgatagacgagattgccgatgatctgggcctaaagtattctcgcaagccacgcgatccgaatcccgtcatttactagaatcacacgcacacacatagaagttaagcttggggaaatggtaacctccccgattggtaaaccaaaactacaacacagtccagatagtgctaaatcaatcacgaacggtggcttacattgaccaagtttcagttgcactgggcttctatttatgactaattctctggttatatgccttaaaagggaagatcactacagcaacagaaacaaaacactacagcacatagcttaaatgataaaatattattaattatttagcatttacctctacgtagttgttattgtatatgtaaaatccaatcgtcttctttggtcggctgctgcattttaagtatttatagaagagaaaatgacagcgcaatgtattgggcaaatcagggtttggttacttttatagctaagctaagggaagcccctttttcgtgggaaagcctcgagcacctcgcttctaccaattaagcatactaagctgagccaaatgtaacgtctaaagagtcagcgatacaattgtaaatcactatttgggtaagtcttcgggggacccaaaaattgggtcaactttagggcattgtcaggaaatatatatgtataataattatgtattattgatcttatttttccaccaaaaaaataaagaaattgttgctttatctaataaactatattggaatagcttactgtaaaagtattcactgtacgggattcttaagtctactagtgtaaatatttatttaaaatatataaaacttggcgggcagatgaatcttaaagtcgaaaaatgttttgccttgtattttacataaattttgacacaacttatgcgacctctacagttaatttacagaagttggatactcgacgcaaatataaaacacatatgtagagaatccgctaagtctagggccttagttcttatttttgagaaaataagaagtacagtggccattaattaaataaagctacttcttgaaccatttttaattaagtaaatgcctgacttttaagcgataattagagattagcgatatcaattaaatcgatattgataatatgttattttagacgatttggaagtaaaataaataaaatttgtttcagtatcattttggttgcactgcctcctttctttaatttaaaatacataaactccatttgcaaggggtcaagttaatttaagtttatgtaataggaatagcaatcaattgacagttcgactttcaaatcgttcctacccaacacgatttcacacttaaagcgtcgaagccgaactaccaatcctttgaataacaattttctaattaacagtaactcatgacatctctacatcgctccctgttttccttttccggtgctgaccacaatggcaaataaattccaattgtaattgtctctgccttttaagaaattaagacaaaaggcgaacaacgctcagatcgaaggacaagaaggagtttcgagagcgggtggcttgtaaagagccgtgttggtttatgggcttaggcaatactttcaattttatattctggacaatatttattgagtggttcttgttgaatctgtggggagtacatgtaaactgaatttaaatattttgcatgaaagagaacattcgctcgttaaaagtgcatttgaattgtttttaaagcaacacgttacacagg

SEQ ID NO: 7271 - DNA, 2542 bp, DROSOPHILA
aattagaaagaaacctatttaagcaaaacgcatcgatctctccgtaattttttgtccgctgagtaatcggaaatcggcaacggaataatgggcaatttcgacggcgattctggaacggttttcgagcagagctatgcgacgaccaacggaaacggaaaggtgccgaatggcaatggggcggcagatctcagtgccccggaaaaacaggaacttctccggaagttctcggcacccgcgtacactgaaattcgcacgcgacgctgccagccgaagcccgcaaacgacgcccagagtcccagctcgatcaactaccatccggaaaagaagtcgatccccaatgggcatgcctccattctggatcaggagtccaagcccaaccaggcagagggcaaactttcgccggagctggagcacttccagaaaacctcctttgaggaggtgcctttgcacacggcctgccttacgtatttgggattctatctactgatgatcctgggctacatcaaccagttgctcttcgtgcccaaagtggccaccgagaagggtcgggatggctatgtagccctctacgatgccttcgaaagcttctactcgaggtacgtttacaggagaatcaaggattgctggaaccgacccatctgcagtgttccgggagacgaactcactctaaaggatcgcgtaaccgatgattatggatggagtttcaagttcactggaacggagacacgttgcttaaatctgggatcctacaattacctgggatttgccgccgctactggacagtgtgctgatgattcagaggaaagtgctcggagctctggactggcatactgcagctcccgttgtgagcttggtgacaacgagcagctgcaagagctggaggctctaactgccagatactttggcgtggaggatgccattgtctttggaatgggtttcgccacaaatgcgttgaaccttccctcactgctgggacccaacagtcttgtgattagtgacgaaaagaatcacgcctccatcattttgggactgcgtttgtccggggccaccaccaaggtctttaagcacaacaacatgcgcgatctggagcgcgtcctccgtcagggtgtgtgctatggaaatcccaaaaaaggtggtcagccatgggacaaggttatgatcttggtcgagggcatcttcagcatggaggggtccatagtccgtttgcccgaggttattgctctgaaaaagaaatacaaagcatacttgtatttggatgaagctcacagcgtgggagccatgggttcccgtggacgaggagttacagattattttaatgtggatccgaaggaggtggacattctgatgggcaccttcaccaaaagttttggcagtgctggaggctatctcgctggatccaagaaactgattgactttctccgcaccaacagccacgcccattgttatgctgcttcgatctcgccacccatcgcacagcaaatccttacctccatgaagaccattatgggtgaagatggcactgacattggacgcaagaagatccaccagctggccaggaacacacgttacttccgccgacgtctggctcagctgggagtgatcacatacggtcacgaggactccccagtcgtgcccatgctggtgtacctgttttccaagattggcgctgtggttcgcaccttgacgactcgccacattgccgcggtgggagctggattcccggccacacccatcatggaaggacgcatccgattctgcctttcagccgcccacaccaaggagcagctggactttgccctggaggcgatagacgagattgccgatgatctgggcctaaagtattctcgcaagccacgcgatccgaatcccgtcatttactagaatcacacgcacacacatagaagttaagcttggggaaatggtaacctccccgattggtaaaccaaaactacaacacagtccagatagtgctaaatcaatcacgaacggtggcttacattgaccaagtttcagttgcactgggcttctatttatgactaattctctggttatatgccttaaaagggaagatcactacagcaacagaaacaaaacactacagcacatagcttaaatgataaaatattattaattatttagcatttacctctacgtagttgttattgtatatgtaaaatccaatcgtcttctttggtcggctgctgcattttaagtatttatagaagagaaaatgacagcgcaatgtattgggcaaatcagggtttggttacttttatagctaagctaagggaagcccctttttcgtgggaaagcctcgagcacctcgcttctaccaattaagcatactaagctgagccaaatgtaacgtctaaagagtcagcgatacaattgtaaatcactatttgggtaagtcttcgggggacccaaaaattgggtcaactttagggcattgtcaggaaatatatatgtataataattatgtattattgatcttatttttccaccaaaaaaataaagaaattgttgctttatctaataaact

SEQ ID NO: 7272 - protein, 597 aa, DROSOPHILA
MGNFDGDSGTVFEQSYATTNGNGKVPNGNGAADLSAPEKQELLRKFSAPAYTEIRTRRCQPKPANDAQSPSSINYHPEKKSIPNGHASILDQESKPNQAEGKLSPELEHFQKTSFEEVPLHTACLTYLGFYLLMILGYINQLLFVPKVATEKGRDGYVALYDAFESFYSRYVYRRIKDCWNRPICSVPGDELTLKDRVTDDYGWSFKFTGTETRCLNLGSYNYLGFAAATGQCADDSEESARSSGLAYCSSRCELGDNEQLQELEALTARYFGVEDAIVFGMGFATNALNLPSLLGPNSLVISDEKNHASIILGLRLSGATTKVFKHNNMRDLERVLRQGVCYGNPKKGGQPWDKVMILVEGIFSMEGSIVRLPEVIALKKKYKAYLYLDEAHSVGAMGSRGRGVTDYFNVDPKEVDILMGTFTKSFGSAGGYLAGSKKLIDFLRTNSHAHCYAASISPPIAQQILTSMKTIMGEDGTDIGRKKIHQLARNTRYFRRRLAQLGVITYGHEDSPVVPMLVYLFSKIGAVVRTLTTRHIAAVGAGFPATPIMEGRIRFCLSAAHTKEQLDFALEAIDEIADDLGLKYSRKPRDPNPVIY

SEQ ID NO: 7273 - DNA, 3070 bp, DROSOPHILA
tgtacaggtcgtggtacaggtgcctgtcaatcttcttgctgtcgcggtacttcttcaacaggcggcgcagaacgcgctggcgctgcatccacagcagcttggtaggcatgcgggcgttcgcagtacccttacgctttccgaatccgcagtgacgtcccttgcggcgggcctcggtgtttttgcgcacacggtaacgggagtggaccacgacgggcttcttgatgatcagaccatccttgataagcttgcgaatgttctgacctggaatgggttaacaacacagttagctgggctgtctattcgaccatttagaccatttctactcacgcgagtttgtgttagcgatctcgttgatttcattgggatccaaccagaccttcttcttgccgcatcgcagcacggaggctgcgagcctcttctggagctttagagaactgcaaaggagggtaacttgttagtccatcatttcgaaagtagcgtgctgggatgcgcctatcagcttgtgtgtgtgtgtgcatgagcgtcgcatgttcggttatttcacaactgccgggaaacagaatggcacttgtccgcccggcagctgcatcatacggcacgcgctcgcccggcacactttgcaaacatttagaccccgcgagcgcaacttttcgctcatatttgcgaactcaaatctacctcatgctgtcgacctcgtcgtggctaggaaagaaagaaaaatttgacagccggaagtcagcaccattttctgaagggtgctatcgatacatcgataacgtactcgggggtctggcaacgcctcggggatgtactagtttaagcggagtggcaagatttatttaaaaaaaatatttaataacaactactttgtgcggtttccagcagcttggatgtgcaagatccggccatatttatattgttcgaattaagttagagcaattaagtaacgaagcttggtatattttatttatctacttgcggtcacactaaattggctaagaaaaacaaaaacaactttttagcccagttgcagctgttcagagtgcaatttctgcaatgcagcacacgcttatacgctgcttgggcatggcccggatatccctgatgcgtttgcagcccagacccacagtggcagcctccgggggacaggaagctgggtccatctcgaagccaacacaaccggtcagtcggtctttcgcctcgctgccgcaggagcaagacaagaaggagcagaatgccagagagagccttaaccgcctgcctcgcctaatggactttccagagatcgtgtggccatcggcgcttaactcgttaaaaaattggatcaccatacagttcataattcgaccctacttcgacagcgagtttcaactcaaggacttcatatacggcgccaagcaagcgctgcaggtgcgtcatggtttgtctatcatgaagtgtaatgatattaattccctcataggtagtatcctcaaaactgatgggcggcgacttagactccctggacaatcttgtctcgcccgaggcgatcgcagagcttagaccggtaatccaaaaactgtcaatgacgcaacggaggcagctagaaatcaaggagagcgacatatacctcagctttccctatcaggtaggtattatgtttgacgatgcaaacgacaagctgcagaagcgtttcgtagagatcaccatggtgtttcacgtaatgcgtggtctatccgagatgcgggaacgcggcgaggaaataccctggaacatggggtaagtttggactgtcactgcccgaaagctgagctcctcatacccatttgttgcaggacccttcccgagtaccaggataaggttttcatctgcaactaccgttttgtaaaggagttcaccgctggacaccaatcggactggaccgtaaatgtggccaaccagtttagggccatcgaccttattaacgagaccatataacatcggcccatggctaccatcatccgcgctgttcgccgactcatagcatatattggcgtaagccaccgccttcgttggaataaaagtttcgttttccgcatttaggtataaaaaactaaaatctttactgtggatctctggtttaaattaggttcatgtgaaattagtgcatttggtggacaagcaaagcgctcagtgtccctcgtgctttgctctgtagatgccttggggatcgtacttgttcaggaggagcttccattcgccggctttgttggcgcgaaggtagttgattaccttttgtgagtttttgcgttggacttccgtgcactttgagcagtcggaatgaagggcgtcgggtaaaaggcgcttaagttcacgaccctctgctgtgcatgggcccttgtccatcaggcacttgagataattacccaacactcggttgttgcccagaacttcatccacgttgacactgtcgtacttgttggtgtaggttttttcaggagcagctgccgcaagaccgacacaaacacagaacactagagctagcgaggctttcatcttggaggattatctggaaaggcaggtgggaaattcaaattattaaaggtaagccacgaaacacatttcctaaaatgagggatttttggttgccgggtaagcggataataagaaggcgtcaggcagtctcggcttttctgtgttttcgacgcatgtcaaagaatcatccaaagcggttagtggtctgcccaccagctcatgcattatttatggcccttggcatatatatcgcatatgcatactaattggcaatcgtttggatttaatatttttgaaaagatttcacaatttcaccgacaccacgtagttttagcagctttcgacttatttgcgtccaatatccgaatccatgctagcccgtggccagctgtttggttttcgcaatccttgatgggtgctgcacctcaattcctcgggtgctcggcctaaccagggcaaacgaaccacggcttgaacaatggcttactcacttctcttccggtgattttcggtggcccgggtgcagttgtggtacgatcaaaggcgcaactcaaattgcgagctgttagctcgctgg

SEQ ID NO: 7274 - DNA, 962 bp, DROSOPHILA
aaaaacaaaaacaactttttagcccagttgcagctgttcagagtgcaatttctgcaatgcagcacacgcttatacgctgcttgggcatggcccggatatccctgatgcgtttgcagcccagacccacagtggcagcctccgggggacaggaagctgggtccatctcgaagccaacacaaccggtcagtcggtctttcgcctcgctgccgcaggagcaagacaagaaggagcagaatgccagagagagccttaaccgcctgcctcgcctaatggactttccagagatcgtgtggccatcggcgcttaactcgttaaaaaattggatcaccatacagttcataattcgaccctacttcgacagcgagtttcaactcaaggacttcatatacggcgccaagcaagcgctgcaggtagtatcctcaaaactgatgggcggcgacttagactccctggacaatcttgtctcgcccgaggcgatcgcagagcttagaccggtaatccaaaaactgtcaatgacgcaacggaggcagctagaaatcaaggagagcgacatatacctcagctttccctatcaggtaggtattatgtttgacgatgcaaacgacaagctgcagaagcgtttcgtagagatcaccatggtgtttcacgtaatgcgtggtctatccgagatgcgggaacgcggcgaggaaataccctggaacatggggacccttcccgagtaccaggataaggttttcatctgcaactaccgttttgtaaaggagttcaccgctggacaccaatcggactggaccgtaaatgtggccaaccagtttagggccatcgaccttattaacgagaccatataacatcggcccatggctaccatcatccgcgctgttcgccgactcatagcatatattggcgtaagccaccgccttcgttggaataaaagtttcgttttccgcatttaggtataaaaa

SEQ ID NO: 7275 - protein, 263 aa, DROSOPHILA
MQHTLIRCLGMARISLMRLQPRPTVAASGGQEAGSISKPTQPVSRSFASLPQEQDKKEQNARESLNRLPRLMDFPEIVWPSALNSLKNWITIQFIIRPYFDSEFQLKDFIYGAKQALQVVSSKLMGGDLDSLDNLVSPEAIAELRPVIQKLSMTQRRQLEIKESDIYLSFPYQVGIMFDDANDKLQKRFVEITMVFHVMRGLSEMRERGEEIPWNMGTLPEYQDKVFICNYRFVKEFTAGHQSDWTVNVANQFRAIDLINETI

SEQ ID NO: 7276 - DNA, 6074 bp, DROSOPHILA
ctcgtctcttttatttttaaagaatttgggttcgaccaaatttaacattcgcattttaaaacaacaaattgtaatttctttacgtataatgtgttttattgttcctttttcccattttttaaattttacttataaacattaaatttcaaatttatatagcttaagtcgcactgcactagaaggagcagcaggtgccttgggaccaaagcgaccaagataggaactcggcaggcatgcggcttgggcttgaaaaattaacgcggaaatgccaaaatgttgtgcatacgccccgttgcctgcatgcaaatttcatgtattaagcctggcaagaggcagcgtcgcgcaggggggtaaagccgggaacttgttgtgtttggcttgcatggtcgacggccataattgcaacatgccgcatgcacacatacacacgcgcatcacagtgggcgatttgagactctagccaagtcaaacaaaccacggggcataaccaaaaataaaaaatcggaaaaaaaacagaaaaccgaaattctagctatgctaaagtttggcatggtagaaggggaattagagctctgttgtggaactcctggctgggtgtttttatgacttaatgtggccaagacaaggggtttcaggaaagagcactggcagaaaaaatattaggttactaacgaaatatatatttcgaaatgaaatttttggtcaggattatttaaaataataataaagcaaataattaaagtaaataaagtctatagggtaaattacggtataattatcaaaacgttttaaaaactagtgtcgttcttagcttgctttaccctctgtggttcatccacagaactatatacggactcttcctgcagttcattaaactgagtttatgacagctgcactaaccacatacccatattttccgactctttgtagacctgtggcggtacaccagcgggataggaatcggaacactcatccggaatcattctagtccgagtatgcgatggcagcgggaagagcagccgctacgctggaggctccgggaccgcccagcggtcaggacatagccagcgacaacagcgcccagcgccgcacgctggcgacgaaggtgcgtcgaaaagggccacgcccccaacggcgcctgcacccgcccctgcgccctcgcctgccgctccatttgcacctgctactctggctgctgtgctgctgttctcagctgggccagctgagggccgagtgtccagcggtgtgcgagtgcaagtggaagagtggcaaggagtccgtcttgtgccttaacgccaacctaacccacatcccgcagccgctggacgcgggaactcagttgctggaccttagcggcaatgagatccaactaatacccgacgatagcttcgcaaccgcccagttgctcaacctacagaaggtgtacctggccaggtgtcacctccggcttatcgaacgccatgccttccgtaagctgatcaatctagtggaactggatctaagccagaacctgctctcggcaataccctcattggcgctctaccatgtctcagagctaagggagctccgactgagtggcaatcccatactgagagtgccagacgatgcatttggtcatgtcccacaattggtgaagctggagctgagcgactgccgcctttcgcacatcgctgtgcgagcatttgccgggctggagagcagtctggagtggctaaaactggatgggaatcggctgagcgaggtcaggagtggcacgatcacctcgctggcttcactgcatggtctggagttggcgcgcaatacctggaattgcagctgctccttgcgtcctttgagggcctggatgctgcagcagaatataccgagtggcataccgccaacatgtgagtctcctcctagattgtccgggagggcttgggataagctcgatgtagatgactttgcgtgcgttccacaaattgtggccacggacaccacagcgcatggagtggagggcaggaacataaccatgagctgctacgtggaaggagtaccccaaccggctgtcaagtggctgcttaaaaaccgactgatagccaatctcagtgctggcggggatggtgactccgattcggagcccaggacagcggcagcaactcagggtaggaagacctatgtggtcaacatgctgagaaatgcctcgaacctgaccattctcacggctgacatgcaggatgccgggatctatacgtgtgcggcggaaaataaggctggaaaagtggaggccagtgtgactctggcagtatcccgtagacccccggaagctccgtggggcgtaagaattattctgctgggggcggtagccgctctgctcctcgtcggtggatcctcctttgcggccatttgcttgtgttccctacaaaggcgaagaaagctgcgtctctggaactctgtacctcctgtgaggagaagcgagagctacgaaaagatcgagatgacggccagaacgagaccggatctgggaggaggggctagttgcggaggcggcagtgccacgggcgccggactctttcacgatgccgaggagcagggctatctgcgggcagctcatacgccactaaatgacaacgatgccgggcaggcggcggccatcgtaaatccgagtgcaggaagtgcacagcgaagaaatggagactacctgcacgtgtccacccactgcgatgatgaggaggaggaccaacagctgcatcaccacccacaacagcagcccgcgagccagcaccacccacatcccaatcagcagcagcatcagcaaaggaagggctcccagggccatgttgtctccgcatccggggcgaataattcagcaccgctggaggaaacggatctgcacataccgcgcctcatcgacatcggcgggtaagttttccaacaccgggcaaaaagtgtgagggaaattcttgaaattaaaaacatgtaaaaattttttgggcttatttatatcttgaatttcgtttgtaggttttgaatatatctttagattttatttaaagcttaaaatgtacatcttatattagctcattaccattaccatgatttcttcactcagtgtatgcctcgggtgccctttgtttctgcggttctcgttacttcgagtggcaattgtcccccgaccgggcgtccgtgtccctgtcaaagagctgtcatgctcgagtgcggaacgcgcccggatctccgtattgcgtccgtattatgggcaacacttgacacttccactcttggctcgagccttctttttgaaaaaccccacgcccattgcccaccagccatccgcctccatctccggcgactatgagaacgcgcgtgctaatgacgcgcgaaatatgcgagcacatccacattcaacgtcctgccccccgcacccaaccttcagcatccaagaccacatccacatcctcatacacgcgatccggagaagtggtttatttcgggcacactaagaactcactctgcctgattggcgcttgtcatgtaaaaggaatcctgccgcggatgcgagtacgagtgcgggttaatggatctgcggtgccggttatcttcatggacgatgacactgccgaataacgacaatccgaaaagtcaagcacttaagcaatataggatgcaggcaattactagggctgtgaaaacaaagggggacagctcattcaactgggcaggaataaaaaatgtttaatttctttttttttttaaatcaaaaatcgtaagcattcaaatgtagccaaaatgtatacttgggtatttccttgtatttttttattagcagtttatagagttttattttacttttttttaaaatatttttttcctttttcttgagtcccacaaaaattaaaatggtatcttttcttcttttcctttcaccagcaccgattccgcatcgagttcaatctccagccaggtggacgctgctgcccgcttagcgggctatgccggacacacctggaagaccacacccattgccaccaccaagatcaattccccgcacagcaaaccagtgacctcggcggcaccatcgtctctgaatacacaggccacgccatacgcgcactatggaaaccatccggcggacgagatggccacctcggtgttctgcagcgaggggcaggagagcgacttgtttgatagcaactatccggatctgctggatatagccaagtatgcagtggcccaggcgcaacaggaaggtcggggtcagggttatgcccaagccacgaccactccaaatgggggcttgtgcacgctcccccgcaaactaaagaccagtggaaagtacttccgcaactcctcggatagccaatcacccctgctggcggataactccagtaaatatggtagtagcaccttgggcgatggaagcttccttaacgaagcgatgggtctgggcaggagatattctgcggaatcgagttatgcaaactattcaagcacggccacctacacgggcggtggccagcgggccaatagtttccttaacctcgtgcaaagtggcgcccaccaagggaaactgctgccgagtcatctgggccagaagcccagcctgccctcaagtccggtccagcatcagcgatctctgtcgagtgcggccacgccccttctggacttctcagccctggcatcgagggccgccggagctgccaacacatcggtggccgcttatgattatcatgccgcgcagctggagaggtttctggaagagtaccgcaacctgcaggatcagctgtgcaagatgaaggagacctgcgatacgatccgtaaaaaggagactcctttgcgagtggccattggacagtcggctgcgcagttggcggatcccgtaatgtacagtgcagcctcgcacagtccaaaaccgccggcgaccagcaatctgaagacaaagaccctactcccaggacaaccacccgatccaccaccatactggttgcaccggaacgccatgttgaagcggttaaatggtgatggaagtgctggtactaatggttcaggtggatctcccgcctctccacagcccagacaggatattttcaagagctaatcgcaatcgtgtacagccggaggattaagtgatggggcaggaggaaaatcgatagactttggtccgccaaagaaggcatgagcttgcaggaatcaacatagtctctaatcaaaattcaaaagtttataatttatgacatatcactctttttcatattattatacaaacccgaagtaaagaatttgtatggtaatttcttgcacttctgggaactaatacattttgatttattttcacatcttttacatgagtcgataatatgaatgttaccattatcttataattgggtttgtaaattattacttttacaacaacgaaatacacattttccctgcaagctcctccgtgtcgacttaaatgcatttgtctgcatagttagttagctagatagctggaggacattcaactggttcgatacccagcccctctgttgtattatagaaacacttttccactctttatactcgctactatgcaatattaaatacgattcggtgaagccgtaggtcgaagaacataagatattgtaagtgtatagacagcaatcccatagaagaaaaaaaaaatactttcacgaaaacacctatttggaacctaatcctagaatccccaataaaactctcgtgttagtctaactacaagtgtttttgtactttaagcgatctcaatataaacaaggataatatagatgaatctaattatcataagtatgagttggcacagactgcagatcgatagattgacatattgtttgattgttagatgtttgtttttcagttccgcagttcaggtcacaaattgtacgccaattagatccaaactctaaattgtaatttaaagcgataaaaacaaaaaccgaaaacgtattttagggtgtcactaaactaaaactcgaaaacatttcacccaaacaacaagagaaagcaaaaataaaattagttgagaattgaagaaaaaaaaaaataaaacaaaaaagcaaaacgagtttcactgtatcgaa

SEQ ID NO: 7277 - DNA, 3066 bp, DROSOPHILA
atggcagcgggaagagcagccgctacgctggaggctccgggaccgcccagcggtcaggacatagccagcgacaacagcgcccagcgccgcacgctggcgacgaaggtgcgtcgaaaagggccacgcccccaacggcgcctgcacccgcccctgcgccctcgcctgccgctccatttgcacctgctactctggctgctgtgctgctgttctcagctgggccagctgagggccgagtgtccagcggtgtgcgagtgcaagtggaagagtggcaaggagtccgtcttgtgccttaacgccaacctaacccacatcccgcagccgctggacgcgggaactcagttgctggaccttagcggcaatgagatccaactaatacccgacgatagcttcgcaaccgcccagttgctcaacctacagaaggtgtacctggccaggtgtcacctccggcttatcgaacgccatgccttccgtaagctgatcaatctagtggaactggatctaagccagaacctgctctcggcaataccctcattggcgctctaccatgtctcagagctaagggagctccgactgagtggcaatcccatactgagagtgccagacgatgcatttggtcatgtcccacaattggtgaagctggagctgagcgactgccgcctttcgcacatcgctgtgcgagcatttgccgggctggagagcagtctggagtggctaaaactggatgggaatcggctgagcgaggtcaggagtggcacgatcacctcgctggcttcactgcatggtctggagttggcgcgcaatacctggaattgcagctgctccttgcgtcctttgagggcctggatgctgcagcagaatataccgagtggcataccgccaacatgtgagtctcctcctagattgtccgggagggcttgggataagctcgatgtagatgactttgcgtgcgttccacaaattgtggccacggacaccacagcgcatggagtggagggcaggaacataaccatgagctgctacgtggaaggagtaccccaaccggctgtcaagtggctgcttaaaaaccgactgatagccaatctcagtgctggcggggatggtgactccgattcggagcccaggacagcggcagcaactcagggtaggaagacctatgtggtcaacatgctgagaaatgcctcgaacctgaccattctcacggctgacatgcaggatgccgggatctatacgtgtgcggcggaaaataaggctggaaaagtggaggccagtgtgactctggcagtatcccgtagacccccggaagctccgtggggcgtaagaattattctgctgggggcggtagccgctctgctcctcgtcggtggatcctcctttgcggccatttgcttgtgttccctacaaaggcgaagaaagctgcgtctctggaactctgtacctcctgtgaggagaagcgagagctacgaaaagatcgagatgacggccagaacgagaccggatctgggaggaggggctagttgcggaggcggcagtgccacgggcgccggactctttcacgatgccgaggagcagggctatctgcgggcagctcatacgccactaaatgacaacgatgccgggcaggcggcggccatcgtaaatccgagtgcaggaagtgcacagcgaagaaatggagactacctgcacgtgtccacccactgcgatgatgaggaggaggaccaacagctgcatcaccacccacaacagcagcccgcgagccagcaccacccacatcccaatcagcagcagcatcagcaaaggaagggctcccagggccatgttgtctccgcatccggggcgaataattcagcaccgctggaggaaacggatctgcacataccgcgcctcatcgacatcggcggcaccgattccgcatcgagttcaatctccagccaggtggacgctgctgcccgcttagcgggctatgccggacacacctggaagaccacacccattgccaccaccaagatcaattccccgcacagcaaaccagtgacctcggcggcaccatcgtctctgaatacacaggccacgccatacgcgcactatggaaaccatccggcggacgagatggccacctcggtgttctgcagcgaggggcaggagagcgacttgtttgatagcaactatccggatctgctggatatagccaagtatgcagtggcccaggcgcaacaggaaggtcggggtcagggttatgcccaagccacgaccactccaaatgggggcttgtgcacgctcccccgcaaactaaagaccagtggaaagtacttccgcaactcctcggatagccaatcacccctgctggcggataactccagtaaatatggtagtagcaccttgggcgatggaagcttccttaacgaagcgatgggtctgggcaggagatattctgcggaatcgagttatgcaaactattcaagcacggccacctacacgggcggtggccagcgggccaatagtttccttaacctcgtgcaaagtggcgcccaccaagggaaactgctgccgagtcatctgggccagaagcccagcctgccctcaagtccggtccagcatcagcgatctctgtcgagtgcggccacgccccttctggacttctcagccctggcatcgagggccgccggagctgccaacacatcggtggccgcttatgattatcatgccgcgcagctggagaggtttctggaagagtaccgcaacctgcaggatcagctgtgcaagatgaaggagacctgcgatacgatccgtaaaaaggagactcctttgcgagtggccattggacagtcggctgcgcagttggcggatcccgtaatgtacagtgcagcctcgcacagtccaaaaccgccggcgaccagcaatctgaagacaaagaccctactcccaggacaaccacccgatccaccaccatactggttgcaccggaacgccatgttgaagcggttaaatggtgatggaagtgctggtactaatggttcaggtggatctcccgcctctccacagcccagacaggatattttcaagagctaa

SEQ ID NO: 7278 - protein, 1021 aa, DROSOPHILA
MAAGRAAATLEAPGPPSGQDIASDNSAQRRTLATKVRRKGPRPQRRLHPPLRPRLPLHLHLLLWLLCCCSQLGQLRAECPAVCECKWKSGKESVLCLNANLTHIPQPLDAGTQLLDLSGNEIQLIPDDSFATAQLLNLQKVYLARCHLRLIERHAFRKLINLVELDLSQNLLSAIPSLALYHVSELRELRLSGNPILRVPDDAFGHVPQLVKLELSDCRLSHIAVRAFAGLESSLEWLKLDGNRLSEVRSGTITSLASLHGLELARNTWNCSCSLRPLRAWMLQQNIPSGIPPTCESPPRLSGRAWDKLDVDDFACVPQIVATDTTAHGVEGRNITMSCYVEGVPQPAVKWLLKNRLIANLSAGGDGDSDSEPRTAAATQGRKTYVVNMLRNASNLTILTADMQDAGIYTCAAENKAGKVEASVTLAVSRRPPEAPWGVRIILLGAVAALLLVGGSSFAAICLCSLQRRRKLRLWNSVPPVRRSESYEKIEMTARTRPDLGGGASCGGGSATGAGLFHDAEEQGYLRAAHTPLNDNDAGQAAAIVNPSAGSAQRRNGDYLHVSTHCDDEEEDQQLHHHPQQQPASQHHPHPNQQQHQQRKGSQGHVVSASGANNSAPLEETDLHIPRLIDIGGTDSASSSISSQVDAAARLAGYAGHTWKTTPIATTKINSPHSKPVTSAAPSSLNTQATPYAHYGNHPADEMATSVFCSEGQESDLFDSNYPDLLDIAKYAVAQAQQEGRGQGYAQATTTPNGGLCTLPRKLKTSGKYFRNSSDSQSPLLADNSSKYGSSTLGDGSFLNEAMGLGRRYSAESSYANYSSTATYTGGGQRANSFLNLVQSGAHQGKLLPSHLGQKPSLPSSPVQHQRSLSSAATPLLDFSALASRAAGAANTSVAAYDYHAAQLERFLEEYRNLQDQLCKMKETCDTIRKKETPLRVAIGQSAAQLADPVMYSAASHSPKPPATSNLKTKTLLPGQPPDPPPYWLHRNAMLKRLNGDGSAGTNGSGGSPASPQPRQDIFKS

SEQ ID NO: 7279 - DNA, 3223 bp, DROSOPHILA
gttgttatcgaatttttgcacagcgccagccagcaaacacgaaaagttctctatctcatcatttgcatttgattttttaattgaccaccaagtgtggcaaaaaaaaacgatataaaattcaacacacattcacacacaccgcacacacgcacaccacacacacgcaaatatgtaaataaaaacattaaagacgtgctccgatcggttcttgttggaatgacgacgatggtgatgatgatgccccgtttccaattggaaacggttcaaccttttgaaccaagtgtgcgtgggggggttggggggcgtgtccggctggttgggccgataatggtgcacattccgccaccgattttcacccaattcgatccggattcggattgggatggctctgtgcttactgtaaatggtattccttccacggagccaatggcgaagcaccggtcgcctgcattgcaagcgccgctcaaaatctgatgacaattcataatttacacacagttgattatcacatcacagcgcacggatattggggtcttggttctttggtttctagcacgaattttccttgcttcttgtaacaaacgacaacaaagtgacattacataaaaattagagttgggttcttggccagcgcggccaatcgaactatcgatattagggatggcacggcatgggaggcgaaatatcgcctgagtaatttaaatacggttactccaattaaccgaaaaactgtttatcatttaattaaaatattattattaaaatatttcattttattttcaaaaaatagaggtgaatattttaacctattgaaattatatttaattattctgcttcgtctatatttagtattttttctaatatccgttcgatttgattcgatttcgatatcaatttcgattgccaataaaaacgaaatcgtggaatatatatcgattcatggtatcgataggctgtttcgatattcagggttgtgttgcgagcatttttgcatgttgaaaacgccgaaaattagtttttggttttgtttataaaaatagctccgaaatggcggcaggtccaattgctgaacgcaaccaaggtgggtttgacctccactccacatttgcaccacttgggagacgctttaacccgccttttccgttccttccacagatgccaccatctatgccggcggtcttgacgacaaggtgtcggaaacgctgctttgggagctgtttgtccaggcaggaccagtgggtaagtcccggacacacatgtatagtgcctagcagctccctaatcgtcatgcttgcagtgaacgtacacatgcccaaggatcgtgtcacccaaatgcaccagggctatggattcgtcgagttcctcagcgaggaagacgccgactatggaataaagatcatgaacatgatcaagctttacggcaagcccattcgcgtgaacaaggcgtcggcgcatcagaagaacctggacgtcggcgccaacatcttcattggcaacctagacgtggaagtggacgagaagctgctgtacgatacgttctccgccttcggcgttatactgcagacgccgaagatcatgcgagacccagagacgggcaagtctaagagctttgcgttcatcaactttgccagcttcgaggccagcgatgcggccatggacgccatgaacggccagtacctgtgcaaccgtcccatttccgtgtcctatgccttcaagaaggatcacaagggcgagcgtcacggttcggctgcggagcgcctgttggccgcccagaatccatcgacccatgcagaccggccgcatcaattgttcgccgatgcaccggtgcaaaccatgatgccccagatgccgggccagatcccggcccagatgccgggccagatgatgccgccacccatgatggcgccgccgccgccggtggtgcccgtttcgaataacaatatgggcatgctagcaccgccgccgcccgttccccagcctgcaccgttcccagctacgataccgccgcctccgttgccaccgatgaccggcggacagccgccgctgccgccagcaatgggcattccgccgccgcctcgcatgatgcaaccaaatgcatgggcaccgcccggcatgcctgctcctccgcccagaccaccgcccaccaactggcgtccgccgcccgtgcccttcccacccacgccctacgcacggccctatcaacccgacggctaccagtactaagtctagcgtgtagtgtataccaatttggacgagacgagaaataaacatcaataggattcatcaatgaagcctgctctgggatatgttaagatttccattcttctttctaatatgcatttaacaaccgggaaaccactgggagacatttagatcatcattgtatttccatttagtagtcgcaatacaatcttcgaattcttacaagacgaaattaaataactttgaatagaattttgaaatgaacgaaatgatttgatataaattgactctcgattcttgatttttttttaaacggaactattttcaataaacataaaacgtttacattaacaagtctgtaagtttaatttgaatggaacatacgaagaaagcgataatttttttttgtaatttaactaagtatttttaaagggctccctctaatttaatgtccaatcctttgaagttatgtatagaaactagcttgtagttcaaaataaactgaggaatgattttccatttattgaaatgaaactaggattcttttttagcattcccaaaatgatgccgtcccgctttttttcgaaacacgtttgttttttggtcttgtaatttgtttagcataaatttattaatatgggaaacatacaagtacagtatttacaatagttttgactactattcattttttactcttcgtctattgaattcttgcctaagcgattttggtttagtcccactgtgctaacttccatttcgtttggtaaaataacttaactttagctttacgtttaaatggttatatttaacgttattttctccttcgtctctttgcttttgcttttgttttttttttttttggttaagcaagacaaacaacaacaaaaaaaaaactgtgaggcatatagtaatagtaatagtaatagtaatagttttaatcaataacgatgtacaagcgaatcgttacgcatcaattttctcgcatttatttaaatttcttttggttttcgatttgtttctt

SEQ ID NO: 7280 - DNA, 1091 bp, DROSOPHILA
aacgccgaaaattagtttttggttttgtttataaaaatagctccgaaatggcggcaggtccaattgctgaacgcaaccaagatgccaccatctatgccggcggtcttgacgacaaggtgtcggaaacgctgctttgggagctgtttgtccaggcaggaccagtggtgaacgtacacatgcccaaggatcgtgtcacccaaatgcaccagggctatggattcgtcgagttcctcagcgaggaagacgccgactatggaataaagatcatgaacatgatcaagctttacggcaagcccattcgcgtgaacaaggcgtcggcgcatcagaagaacctggacgtcggcgccaacatcttcattggcaacctagacgtggaagtggacgagaagctgctgtacgatacgttctccgccttcggcgttatactgcagacgccgaagatcatgcgagacccagagacgggcaagtctaagagctttgcgttcatcaactttgccagcttcgaggccagcgatgcggccatggacgccatgaacggccagtacctgtgcaaccgtcccatttccgtgtcctatgccttcaagaaggatcacaagggcgagcgtcacggttcggctgcggagcgcctgttggccgcccagaatccatcgacccatgcagaccggccgcatcaattgttcgccgatgcaccggtgcaaaccatgatgccccagatgccgggccagatcccggcccagatgccgggccagatgatgccgccacccatgatggcgccgccgccgccggtggtgcccgtttcgaataacaatatgggcatgctagcaccgccgccgcccgttccccagcctgcaccgttcccagctacgataccgccgcctccgttgccaccgatgaccggcggacagccgccgctgccgccagcaatgggcattccgccgccgcctcgcatgatgcaaccaaatgcatgggcaccgcccggcatgcctgctcctccgcccagaccaccgcccaccaactggcgtccgccgcccgtgcccttcccacccacgccctacgcacggccctatcaacccgacggctaccagtactaa

SEQ ID NO: 7281 - protein, 347 aa, DROSOPHILA
MAAGPIAERNQDATIYAGGLDDKVSETLLWELFVQAGPVVNVHMPKDRVTQMHQGYGFVEFLSEEDADYGIKIMNMIKLYGKPIRVNKASAHQKNLDVGANIFIGNLDVEVDEKLLYDTFSAFGVILQTPKIMRDPETGKSKSFAFINFASFEASDAAMDAMNGQYLCNRPISVSYAFKKDHKGERHGSAAERLLAAQNPSTHADRPHQLFADAPVQTMMPQMPGQIPAQMPGQMMPPPMMAPPPPVVPVSNNNMGMLAPPPPVPQPAPFPATIPPPPLPPMTGGQPPLPPAMGIPPPPRMMQPNAWAPPGMPAPPPRPPPTNWRPPPVPFPPTPYARPYQPDGYQY

SEQ ID NO: 7282 - DNA, 5069 bp, DROSOPHILA
ttcacacttgcagctggaaaggaaccacgcgaggtgcaaatctgggtcgcaaatgcgcagaattccagtttcctttcgatggccataaaaggtcagcaaatgtacaggtaagtctagacgcaaccatccatcgatcaatccggcgtcaatccgtcgaatctttatcgtttttctgctcaagattgaactacccgttgaaaatgcgccagtggcatcacatgtgcagctcgtggaatggcaagacgggcgagtggcaggcctggctgaaggcagaacgcattgggcgtggtttccacaactcggtgagtttgactccatttgactccaattacgcatattgcaaaatgccttgttcgcgttttcactttcggcgtgcgaatgtcagctgctataatctcaaatctccgtctccacttaattcttaattgcttcagttggtgggacataaaatcccagcgaatggcaagctgcgctccggcggcagttcggtcaccggcgaggtgagccacggcctccacttcgagatgacgctcgtccaggtctatcgggtggcgctcagtgcaggcaaggcgcatcgcgaccacaagcaccaccatgtccaccactttgatcacgagggccaggaggtctccagcaccactcgtgccccaccctcggtaagttcgtaaccagtgcccacggagacaatataacacgccagacctccattcagattaatcgtcctcaacccatgcacacgctgctcgccagtggccagatcccgacccgggtgcgcatcaacttggccaatccgccgccgactgcaagtggtgctcccgctcctggcgcggccggagctccgaccgattccgcccagcaggccatcaccatcaacacaaattttgtgaacggacagataaacgcgggatcgcgactggtggcccagcaactccttggcctctcgccgccgagcggattgcagcctagtggcggtggcaaacgcttccaaatgctaagtaactcagccaacgtgcagttcatcgacgaaacggagacccacatccagttcaagaggaacaccgacgccactaagaaggttcagaagcgcggcctggtgctgctggacgatggatctgtggtggacgacggtgtcggttccggaacggatgggagcttgatttacaacggtctcgccgactttggcggacagcaatttaagcaggatcttacgctcaagatgagcctggaggaggagatcagcacgcacgaccgagagcccgccgaggaggaggtaagggccgtgatggccatctgtagcagctgccacacggagcctttccagggtgccatcgtgttttcgtggaaggatgtgcgcgagcacatgaacaacgccctcaagggcctcagtgtgggtccatgtggtaacttctagttgttcccaaagttcggataacattctagtgtcctaggaccccagcttaagctttcccagccccaccccattatttccatatcttttttttttctatatatgtacgaataagtattcgattggttgggcatcttgtgccacaattgtccatgtgggagtcaacgctttactgttgccacccatttggccaccaaacaatccttgactcgctcatggacaccaatccatcctgcttccctaagccctacatcctcaccctagcaattacgcggtgatattgaataaaggactatttaactgataccatctagcagcacttacctttgatttgtggatatgctggtgcttgtagtccgagtcgaactccggctcgctgaagtagctctgatcctgatcccaattggcctgcgcctgcggcaggggttggggtattccagggccgccgggcagaatctggggcggggctgccacctcagtggactcaaagagacgcagcacggagcgatccctgatctcgcgcagatgcgagcgcacgtcctccagctcgtagaacatatccttgctggcatcgtgaatgtaaatcttcacattgggcccctccagatatgacatggtcaactggcgcggaaacgagcgtacgaacagggcgcgcaccgtatcaatcgaagtgatctcgttgggcagcagggcgcgcttcgtctccgagcggtactgcagaaagaccaggcccagcggtcgttccagagttttcgagggcgtgcgtaccacggggagcgaggagcgctgcttgccgcccctccggaatccggtgctggccgtttccacctccgacatgatgccgggatcgtcgtcgaacagcggtccctggttaacaggcgcataaccgcgcatcggctggttctttttgttcttctgcgcgcgcgtactcatctaagaagggacaagaatcagaaactgatggtagaaacgagttgagatgggagatggagctcacctccagatccatggcccgctgttgctggggcgccatctgatgggcgtgtggatgctgcgagccgtagaccagcatatcgccgccgagcgtatgtcgtcgtggatcgtcgcgtcgcatggctcgtcgtctttcgtcgccacctggggaaacacatagacactgaggatggggctacagatccgtggacgtctttggtccttaacataccctgttcattcgacggaagccgtcccgactttgcctcattctgccagtcttcttctgaaagagagggagctggagttaggctcatttcatttcgcttccttccgatttatggattccgattacttaccgccctctctacccttgcgcttcttcttcgacgaggagctgctgctgccgccgacgctctggttggaggaggcgctcttgtccttactcttccaacggatcaacatcctgcagccgtttgagatgtgcggagctcagtggctatgttgcagctgcagaaaatgagagacaacggggcgtatgggtaacgtgaaaatgtccttatttttttggtctttgtttacgtttggtaccggcaacaacacgctaaaccgcacacacacaacatgcaactttggtgtagataaaccatgtatcctcgcacattctttaacagggtgtggtggaatggagtggagcctcgcagtggcagtgccagtgctcaatgcaaaaagtatgcaacggagtgcgcaaactctgctctgcaacacggaatggagcaagaaagcaggacagagcggaaggcgtgactggagctggatctggaactgcatgcggatctggatcgggaccccagaaatgcggctggcagaacagacaatagtgttggccgaatacaattgttcatcgcagttgccattaagatgccatttgctgagagaacacgaatcactttcgaatttgttttgcatatgtaaacgtttttggagttggaagttgctttaaacaaggcatgtcaagttattttggctgcatgtacatgtttatctcgagcaagaaatccgaggaaggggcaccaaaaggaaacggacgcagagatgggtacacacgaaacatggtatacttttcagtgcagcacttcacgggttttagtatgcctttgcctttgccagtgccagtgcctgggaatatgtacacagccacccacattcactgcccatcggcattattgcgggccactaaaggaatttttgattagttttaggtgcggtgccccggcccgttttttcccagccgccattaattgtgtcagttgcgtccagtttccagggcacgagtgcacattaaacacggtggaggggagctcgtgtctgttgacttttccacacacgtcagcggtcagttggctggattcctttgggttttcatgggggatctcgtcctagctgtaccttgtatacctatgcacctttgggggtgtgtgggcggttcaccggcgatgtttctggcattttctcaaaccgcacttgccttgccgattcaggaaggtttcacaattaacgggtctaggtgctcatagctcgaggagctcaccgatttagccgtgtccttaggataaagattcgattcaattcgcttcgctttgcactcgtcactacacagctttctggagtcaggacacggcactcgtccaccgacgcagcataacgccagaagagcagaaatatttctggtatatctacaccggaaagcgtttccgccctagccgaacgaggactgcgtgcttgcacggcgcatgcgttaccaatcgagtgttcccggaccagcgaagttccctggcatccagccgtcagaggtcctggcatccctgcattccgacgctgctctgttgtgtgtgtttacctggtgccggggcaatcgagtaattttcttggcggttgagcgcatgtggctatcgaatggctccaatcgattactgggcggaaggcctttaaaaacaggtgacgaaacacatgcttgtcctgcgccggcttgtttatccgggagtagccaggattccagcggatgtctgggcccgcagccacgccctggtggagtttcccggccagtggcctcgctgtgagcagcaccagtttgaatcggacatgcgggtcatcagggacttcatcactgcgaaggaggagcaactactgatgcgggaaatcgagcctcacatcagccgcttgccgtacgagttgagccactgtgatgacgtgggtgggtatatatagagactatatagtatcggatttctggctaaacttcttaaacttcgcaggcagataccgcgaagttgaacgccgaaagtggactccccaaaaccaggccacgctggatcacgtctcgtgagtttccttcggtgagcaggtcatgcccttcgtgcacatcctggacttggctgactctggcgcgatcaagccgcacgtggacaacactcgagtgagtttggccacagaagatgcaactcgatttcattttcatttacgattgtattcgacagttttgcggcaacaccactgcgggcattagcatgctcagcgactgaagcgcgtgaccaaggatcccatgactttgtcagccactctgaggatctgctcctgccgcaactctcgctctatattaagagtgccctagcgcgatacgagttcaccc

SEQ ID NO: 7283 - DNA, 1337 bp, DROSOPHILA
gacgagtgccgtgtcctgactccagaaagctgtgtagtgacgagtgcaaagcgaagcgaattgaatcgaatctttatcctaaggacacggctaaatcggtgagctcctcgagctatgagcacctagacccgttaattgtgaaaccttcctgaatcggcaagctgcaacatagccactgagctccgcacatctcaaacggctgcaggatgttgatccgttggaagagtaaggacaagagcgcctcctccaaccagagcgtcggcggcagcagcagctcctcgtcgaagaagaagcgcaagggtagagagggcgaagaagactggcagaatgaggcaaagtcgggacggcttccgtcgaatgaacagggtggcgacgaaagacgacgagccatgcgacgcgacgatccacgacgacatacgctcggcggcgatatgctggtctacggctcgcagcatccacacgcccatcagatggcgccccagcaacagcgggccatggatctggagatgagtacgcgcgcgcagaagaacaaaaagaaccagccgatgcgcggttatgcgcctgttaaccagggaccgctgttcgacgacgatcccggcatcatgtcggaggtggaaacggccagcaccggattccggaggggcggcaagcagcgctcctcgctccccgtggtacgcacgccctcgaaaactctggaacgaccgctgggcctggtctttctgcagtaccgctcggagacgaagcgcgccctgctgcccaacgagatcacttcgattgatacggtgcgcgccctgttcgtacgctcgtttccgcgccagttgaccatgtcatatctggaggggcccaatgtgaagatttacattcacgatgccagcaaggatatgttctacgagctggaggacgtgcgctcgcatctgcgcgagatcagggatcgctccgtgctgcgtctctttgagtccactgaggtggcagccccgccccagattctgcccggcggccctggaataccccaacccctgccgcaggcgcaggccaattgggatcaggatcagagctacttcagcgagccggagttcgactcggactacaagcaccagcatatccacaaatcaaaggctcatcttgagcgtaagatcctgcttaaattgctgtccgccaaagtcggcgagaccgttgtaaatcaagctcccatccgttccggaaccgacaccgtcgtccaccacagatccatcgtccagcagcaccaggccgcgcttctgaaccttcttagtggcgtcggtgttcctcttgaactggatgtgggtctccgtttcgtcgatgaactgcacgttggctga

SEQ ID NO: 7284 - protein, 376 aa, DROSOPHILA
MLIRWKSKDKSASSNQSVGGSSSSSSKKKRKGREGEEDWQNEAKSGRLPSNEQGGDERRRAMRRDDPRRHTLGGDMLVYGSQHPHAHQMAPQQQRAMDLEMSTRAQKNKKNQPMRGYAPVNQGPLFDDDPGIMSEVETASTGFRRGGKQRSSLPVVRTPSKTLERPLGLVFLQYRSETKRALLPNEITSIDTVRALFVRSFPRQLTMSYLEGPNVKIYIHDASKDMFYELEDVRSHLREIRDRSVLRLFESTEVAAPPQILPGGPGIPQPLPQAQANWDQDQSYFSEPEFDSDYKHQHIHKSKAHLERKILLKLLSAKVGETVVNQAPIRSGTDTVVHHRSIVQQHQAALLNLLSGVGVPLELDVGLRFVDELHVG

SEQ ID NO: 7285 - DNA, 2173 bp, DROSOPHILA
catgggtaattagctcccccaaagctggagacaacaccaacaccacgccagacttacgagcatggagtagttgtagctcgtttcggaagttcatttgccaatgaaatcgaaaatcgaaaatgttcgatttgcagatcgcctggctgctcctctacgtttggaattccaagtggtttccaaagtaaccctcattttgtaggcaaagcatgaaagcacaacgcggaaatatcagtttttctattattacttataacaattaattcgaattaatgtcaaatctgggctcaagttcagttcaagttcaagtagtgcgtaattgaattaacgcaccaagaaggatttaattgacccgcattcgaagtggaatattgatctatcttctatgtcttctatatagggagtaaacactgtaattggaggcttcttaaataggaagtgcgtgttggggtgtgtacaaataaattggactatttaagttttatcgaaaatttgttgcgagtgcgtcacaattaatgacgcacactgcacgtttcgttatcagcaataaaggtcattcaaatccgaaatatttctaataaaatattcatcgtcattttatgggtatgttgcccccgtttaaaactacactattctattctaggtttaaatactaaagggttcgatgttcaaagaaatatataagaaaatataaatatccgtacatgctggcaaattcaattagtttattacaattcagttagttgaaaaccatttaattttatttaaagataaattaccgttgccaaaacatcgatatgcacaccggtgcatggctcgaattttgcacgcatatcgatacttgatgccatcgctattgctgtaccatcgctatgaactactatcctcgaacttgtaaacaacaaaaagccacttcatctagtgaccatttggagctgcccgtccgtttggagctatttcacctactggctactgtcaccacctcacactgaaccgctccgaaatggaatcgcccagtgcccgaactctcgggaattccctgggcgatgacagcggcaacgggaatgaaaacgggaatggaagtggaaacggaaacaccacaatgatgccgcatggaatctaccatgagcggcagacacgtcacctgtgcggcctccacgcactgaacaatctgttccaggggcccgacatgttctccaaatcggaactggacgactactgcaccacattgaccccgcgcaactggctgaatccgcatcgatcgtggatcggttggggcaactacgacgtcaatgtgatcatgtacgccctgcagcagcggaattgcgaggcggtgtggtttgatcgacggcgggatccacactgtctcaatctgagcgtcattttcggcttcattctcaatgtaccggctcagatgagcctgggctactacatcccactgcccttccacatgcgacactggctggcactgcgtcgcttgaacggcagctactacaatctggactccaagctgcgcgagcccaagtgcctgggcaccgagcagcagttcctcgagtttctggccacccaactgcagatggatcacgagctattcctcgtgttggacgaggagacggactgcaaggataagagccagcaacgttggctgctaccgcagttcagggattaatgttatggttagcactccaaataaagctaaaatggagcagtgcattagttaattgtaccaattatttgatgaaactaaccaaaaagtgccctagaatatgcaagttaaacctttaccatccattttgcactgcaagtggaagccaccaaaattatgtatgtagtagtaataaaagcgacaagaataattcacatgtgccatcagtatgaacttttgaaccctagttctgtgcaagccatcattttctagccaattcattagaaattttggaccaatcgagagctgtgccttgcggcaaaacgcctcaaattcgttgggtttcgtgcgaataatgatggtgttttgattgagctgcaacgcgatgacagtttgcgattagagccaccagcaagcattatttgaacgcatttattaaatttcacttaggcaatatgcacgaattgcgctcaaagtgccatgcactggcaattattcggctcttatcgccggcacaactaaaatttcgga

SEQ ID NO: 7286 - DNA, 844 bp, DROSOPHILA
atggaatcgcccagtgcccgaactctcgggaattccctgggcgatgacagcggcaacgggaatgaaaacgggaatggaagtggaaacggaaacaccacaatgatgccgcatggaatctaccatgagcggcagacacgtcacctgtgcggcctccacgcactgaacaatctgttccaggggcccgacatgttctccaaatcggaactggacgactactgcaccacattgaccccgcgcaactggctgaatccgcatcgatcgtggatcggttggggcaactacgacgtcaatgtgatcatgtacgccctgcagcagcggaattgcgaggcggtgtggtttgatcgacggcgggatccacactgtctcaatctgagcgtcattttcggcttcattctcaatgtaccggctcagatgagcctgggctactacatcccactgcccttccacatgcgacactggctggcactgcgtcgcttgaacggcagctactacaatctggactccaagctgcgcgagcccaagtgcctgggcaccgagcagcagttcctcgagtttctggccacccaactgcagatggatcacgagctattcctcgtgttggacgaggagacggactgcaaggataagagccagcaacgttggctgctaccgcagttcagggattaatgttatggttagcactccaaataaagctaaaatggagcagtgcattagttaattgtaccaattatttgatgaaactaaccaaaaagtgccctagaatatgcaagttaaacctttaccatccattttgcactgcaagtggaagccaccaaaattatgtatgtagtagtaataaaagcga

SEQ ID NO: 7287 - protein, 221 aa, DROSOPHILA
MESPSARTLGNSLGDDSGNGNENGNGSGNGNTTMMPHGIYHERQTRHLCGLHALNNLFQGPDMFSKSELDDYCTTLTPRNWLNPHRSWIGWGNYDVNVIMYALQQRNCEAVWFDRRRDPHCLNLSVIFGFILNVPAQMSLGYYIPLPFHMRHWLALRRLNGSYYNLDSKLREPKCLGTEQQFLEFLATQLQMDHELFLVLDEETDCKDKSQQRWLLPQFRD

SEQ ID NO: 7288 - DNA, 3728 bp, DROSOPHILA
atgtctctttcgctggccaccattttccgcctctggtcagagaagcccacttgatagttttgcaaaatcaatagacgcgtcgcataccccttcgcttggattagtaatgggtgcgggtgggtgagaacgggcgacgacgacgtggtggttgccattgaaatcaaacggcggatgtggttccgggcattggcaatacaacaaaattagcattgaatgccagggcaaccgagtgctggcggctctgggctgtgggcttcccattttccgagctcggagctttgccgttgttggtttaatagctgtcatatggggaaatgaggtcttcgccaagcactcacactcgtgcggatataatttggcgcggaatggaatcggaaatcgaggtggaaacgggcatagagttattggaatcccagttagctggcaatttgcgtgcaatttttcaaattagtcaggccggtgatgacgcatgttctttaatgattttaattaccctcgccctttttatggaaccctgaaaattagtattgcaagtatgcaattacaaaactctcactacacggagtctgcccgctaatctctctaatggcatcgcagcacgacccaaaacgtggcaatttgcacatttccaagggctccaaactattggcgtgcacacgcaacggaacccgatccccaatcccgcaatcccggagccaagaagttggccaagaagtcggatgaggagcgcaagcacatcaaagtcctgatgagtttcaaactgtgaattacgagggcgctgatgggagaaaggcgcccagcacgaaaggcgaacacttggcgccgaataacccagttaagaattttcctggaaagcgctttaattcaatttgcagtttgcgttcgcataataaactcaagtgcaggcaaatgcaaatgcagcttactggatttaatgaccttcaaacttaattgttacaaccaggcggcatggcaaccttgcaccatctgcgtttccatcctacttgcacatggtatgaccgtcgcccaagcaggatgcgtaggccatcatatgcggaatggtgctctgttcgtagactccggtgaacaggtgcgcccagggacccaacgcgtagacgggcacatcgtcgcctccgtgcgagtccatgtcgatggggacacccgagggaaactcatcgtcgtggtctcccttcaccaccgtggtgggatccttgcgctccatcgtctccgcgtcgtagaaattctcgtaactcggtccgttggcgtagcttagaaccatgtatggtttgccatcgtgtccatttactggggtctttccaaatacatcagatccacggtactgaaaggaaataatttatttataccacggctagactactgcacaacttgtgaattcaatttaaatttctctactttgtaacaagtttgaggttgccagtccttataacaagttccacctaaccagatagttcttaactcatgattcctgcacttaccgagtatcctgcgtaggtgaacacatgtgagtgatcggcggtgaccaccagcaaggtgtcatcctcgctggtcagctcctgggcagcggcgatggccttggagaactcaatagtttcattcagagccatacgcgcctggttgatgtggtgggcctggtcgatgcgaccgccctcgatgaagaggaagtagccctgctcgttctggctcatgtactcgatggccttgcgggtcatctgctccaaagtgggctggctgctctctgttgtggtctccatgaggtactgcagatggtcgtcgttgaagagaccgaggaggcgatccgttttggtgacatccacggcggccaactctgcggcggtggtcacatagacattattttcgcttgctgatttaaattcatcgataaggttaagtccatcggtacgcttgccccaggattccagactggagtcgacaaagtgcttgcgtccgccgcccatgatcaccttcagcttgctgcccacctcgccgcgggccagttgataggcaatgtcattgattccggagcctgctccacagtcggtagccacctccgcatcgttctcccagtcgcgctcagctatgtgggcgtacactccagaaggcgaggcgtgagtgacgcgggtggtggtcaccagacccgcccacttgcccgcctccatggcccacttggcaatggagtcgacgtgggtgctctcgtccagcatgaccttgcagtcggtgcggggcacctggccattcacgccaatagttccctcctgacctttcacgccacacaaataggcagtggccgtgcaggcggagtcgggcacaatcttatccacggaataggtcttcgagaggcccgtgaaggggaagttttcgaaggacagggacttctcctcgccgcccaagagattgcgagccgctgacgtggtggtcacacccattccatcgccgagaaagaggatcacattcttggcctggcgcttattcggttcagaagccaacttctgctggacaaactgcactccctgttggcgccagtaggcgttggtatcctcgccatcaaccacccggaatgccttgccatgtcgttccggttccggcatatccggatgcatcctgtgctccctgcactcctccggagtacggccgcattccggagcggaccaagcgggatgggctaccagcacgatggcgatcagtagtgcgttcaacaggcggaacatcttgcacaagactgaccctggctagtggttactccgactttggcctatcgagagattcggctcgaaccgattgcgataagattcgataaggcagagacgtgttgctcccataaacgcgaaatcgcatcaaatctaatacgccacctaattcccttagtccgaaccgtgcttttatttacgacggccagctacaaattttatagatttatagcacgtgagtatggggacttgttgccgaccgtgtggatcatcagtggttccattgaaatgtcccggaaaatggctctcacattgggccattggccatcacgtaatcaggctggaaaatctcgcggaggcacgtgaatgaatggcattataaccagttaacgaaggcaatggtatgtgggtgggtatgccgcatttcacatttatttggagccataaaaagcgggtcataaacaggtgactgttttcgcctggtggttttcccttttaatatcaagctgagaaatgcaaaggcattggaatggaagaaaggcagctgcctgccaaccgccggaaaggttaaagttgaccatggcaaaagaaagtgggggagtacgttggggtggcttgaccttggcttgaccttagtttgcacttggcagcaaggaaattagcaagcaaaaggaaaatgagtggcaagcagctaagctgcaactgttgaatacgcaaatcttaaagtttgccatcgtgtttggccacttgaacttatcgctatcgctcgcaaaaccgcattgaaggtaaacaaactctgaacttaattgctaagcataatagtaataaattctttaaagcaattataaattgaatcacctttgagcacatttataatgtaaatatttatgttcgtaaaatgtctaatcgggcgtatacgttatgtgctgcttatttacaaaatacgcttaaaaattgattggaaatggatgggcggggcaaaaatgccgcagcacaaagttgcgcatttaatgctgcctaata

SEQ ID NO: 7289 - DNA, 1571 bp, DROSOPHILA
agatgttccgcctgttgaacgcactactgatcgccatcgtgctggtagcccatcccgcttggtccgctccggaatgcggccgtactccggaggagtgcagggagcacaggatgcatccggatatgccggaaccggaacgacatggcaaggcattccgggtggttgatggcgaggataccaacgcctactggcgccaacagggagtgcagtttgtccagcagaagttggcttctgaaccgaataagcgccaggccaagaatgtgatcctctttctcggcgatggaatgggtgtgaccaccacgtcagcggctcgcaatctcttgggcggcgaggagaagtccctgtccttcgaaaacttccccttcacgggcctctcgaagacctattccgtggataagattgtgcccgactccgcctgcacggccactgcctatttgtgtggcgtgaaaggtcaggagggaactattggcgtgaatggccaggtgccccgcaccgactgcaaggtcatgctggacgagagcacccacgtcgactccattgccaagtgggccatggaggcgggcaagtgggcgggtctggtgaccaccacccgcgtcactcacgcctcgccttctggagtgtacgcccacatagctgagcgcgactgggagaacgatgcggaggtggctaccgactgtggagcaggctccggaatcaatgacattgcctatcaactggcccgcggcgaggtgggcagcaagctgaaggtgatcatgggcggcggacgcaagcactttgtcgactccagtctggaatcctggggcaagcgtaccgatggacttaaccttatcgatgaatttaaatcagcaagcgaaaataatgtctatgtgaccaccgccgcagagttggccgccgtggatgtcaccaaaacggatcgcctcctcggtctcttcaacgacgaccatctgcagtacctcatggagaccacaacagagagcagccagcccactttggagcagatgacccgcaaggccatcgagtacatgagccagaacgagcagggctacttcctcttcatcgagggcggtcgcatcgaccaggcccaccacatcaaccaggcgcgtatggctctgaatgaaactattgagttctccaaggccatcgccgctgcccaggagctgaccagcgaggatgacaccttgctggtggtcaccgccgatcactcacatgtgttcacctacgcaggatactcgtaccgtggatctgatgtatttggaaagaccccagtaaatggacacgatggcaaaccatacatggttctaagctacgccaacggaccgagttacgagaatttctacgacgcggagacgatggagcgcaaggatcccaccacggtggtgaagggagaccacgacgatgagtttccctcgggtgtccccatcgacatggactcgcacggaggcgacgatgtgcccgtctacgcgttgggtccctgggcgcacctgttcaccggagtctacgaacagagcaccattccgcatatgatggcctacgcatcctgcttgggcgacggtcataccatgtgcaagtag

SEQ ID NO: 7290 - protein, 522 aa, DROSOPHILA
MFRLLNALLIAIVLVAHPAWSAPECGRTPEECREHRMHPDMPEPERHGKAFRVVDGEDTNAYWRQQGVQFVQQKLASEPNKRQAKNVILFLGDGMGVTTTSAARNLLGGEEKSLSFENFPFTGLSKTYSVDKIVPDSACTATAYLCGVKGQEGTIGVNGQVPRTDCKVMLDESTHVDSIAKWAMEAGKWAGLVTTTRVTHASPSGVYAHIAERDWENDAEVATDCGAGSGINDIAYQLARGEVGSKLKVIMGGGRKHFVDSSLESWGKRTDGLNLIDEFKSASENNVYVTTAAELAAVDVTKTDRLLGLFNDDHLQYLMETTTESSQPTLEQMTRKAIEYMSQNEQGYFLFIEGGRIDQAHHINQARMALNETIEFSKAIAAAQELTSEDDTLLVVTADHSHVFTYAGYSYRGSDVFGKTPVNGHDGKPYMVLSYANGPSYENFYDAETMERKDPTTVVKGDHDDEFPSGVPIDMDSHGGDDVPVYALGPWAHLFTGVYEQSTIPHMMAYASCLGDGHTMCK

SEQ ID NO: 7291 - DNA, 6434 bp, DROSOPHILA
ttgaggggccagtagctagcacgacagattaagagattgaatacccgtgcgcgtcaaccgatcagaggaaaacaaaaagttcagagcggctatcaactgtgctgatgcgaaacccgatgaggtgggcaataggcaggcatttcggaaaagggacgttttgaaacggcggaatacttgaattgataaagctaagctcatttacacttggggttcaataacacggctccggcgggggtatttgcgatcttccggcctttctgccatctcaataatccaagaaggggcgcgataagccagtttaaatacgtcctcgtctcaaaattacaaacgagagcaagatatgaaagcatattcagcatttgtgtattcgtcgcagttctcagagtgcatttcaccgccgttaattacttgggtaaaccaaatgcaggtccatgggtaaagggaacccaagtacttaagggatatttaaattgttttggcgacagcgcacacctaaaaatagttatgggactttttaaatatttgcatcagcgtgccataatataaaatcaaaacgaaaacaaaacatcgactggtttatttacactttttaaaggaaatctataaagcctccgtttctgagcctcctccttaacgaatccattctgattcaataataatgatgcgcagacgaagctggagcggaacgagcagctggaggtttggtacatcttatataatgctccgagtggattcattgttttgacgatttgctttgcactttgtctcgcgggtacgcacaaagctgctacgtagtaaacaagggatcccgatttcttgatttctcgacagcgcagtcggcgccggctccgtccagcggtaatctgcaatcatagctgaccgcctgcccggttatcagtgcggcggcagcggcgtcgacctatgcagcgacggcaactgcgacagcaaagaatgaggaaagaggagcgactgctctgctggcattgctcagttcagttgcccagctcgaactgattccgtccgattccgacgtcgtagtaataacttgtttggtcggcagtacgcacagtccagtccagcggagaaccagtcccagttccaggcccgctctctaatcccagcgcagatcggatcgccgcgaaacgggccaaatctaatcggttccgtaaggttctcggccagatagtgcgtgggccggcccgagtatgtagctaatcgcagcaaaccaaaaatttgcaagtggatcaaccggtggcagtgggccaaactcgaactccgtgcgcagataatcaaattccgcaaggcagtccgtctttaattgctgctttgaagtggaagtggcggcggaaactaatatgcgctagattcgtgcacttacatctggacaggaaaactgcagtacggttggaaaacctgatattgctctagctctaactctagcttcaactctacgctccagctgcagctggaattaaaacaacaacagaccagccagtgcgatcgagcccacaaaagagacggcgacaaaacaaagaagcgggcgaacaaagaacgcgcagcaacaaaagaacgaaggaacacagaggcacagatacagacaccagatacaaaacgagtctgtcgcatagatacatctcataggtggtgcatccagcaggagtatctatcggtaggggagcggaatgagacccgaaaaaaacccaataaacacgactgtgttcagccagcgtaaacgcgacgaaattgttaattaagacgccaaatgtttggcagacttcgaaagtgcagagcactgaacagcgagtaaacaacgtgaaagagagtggcagagaacgccagataagcgcgtgtgggtgcagttcgtctccgagagagtggttccgattccaacggagcgcgcacgtttgtgttgcccaccgaaaatcagctggtgccccaaagctcattccaagtgcacgttgatcgtgaccgcgctctttgcaggcgctctccagctcagtgccacccactcaccccctttctatcaccacgcatcacgttatcagccaatgcctcttttctgcaactgaaacgcagaggaggagcgcggagagaagtacgaaccatttgcgatttcaagaggtcgacaagtaagttagagtgaactgcagagtaaaagcataccatccttagatcagaccctaatatatcacagtggaagcaatcacagcctaggattcaaaattgtcaagatatacagatttcctttgaccgccgatttaagatagtcctcggttgatgtcgaaagttccagaaatcagagaagagtgcttcggacttttttcagattggtcctatttttttttgaaaacagctaattccactatcaatttaatcgtttcacccgaccgtttcaccaattatttcaattccgttcacattcgagttcaagatcgaccgcattattggaaaatttaaacacccagggagcgcgttatcggatgccgttgacccgatttcagagttggcgaatcgaactaaatctcaactctatacatatagtgcccatactgatacgtgttgtttccatttaataatgaattaatgcctagtaagtatgtgccaagcttatgtacgcaggagctgctgataaggctagaacacatacggttgaactttgaattcagcacgggcagatccacaagctccgaagcaaccaaggctctcggaattgaaaccccgattagttcgtggaaacatttgtaagcgcatggttaaaaatctgtctggtgcgtcaaaaatagtttaaaattagcacaacgagcaaagaaattgaattaggttctacaacgtattaactattaggtgtgaattatagcaatttaaaaggaggtgctcagttttcttatgtgttcaatgaaccccgagttcctagggtaatatatagcccatcctgataagcttagttatgccaaacgattcctgggttgagccacgtgttccgcatttataaagataacactatataaatttaatattaatgaacaagattttgaattccagctaagttacatgttgctcgtgtttactttctgaaccggggacaacatacgtataggataacgacatttactattactcccattttagcgtgcagcgacagactatcagaaaacaatgtcacataccaaagatgcagagatgtccatgcccgctcggcaggaatctgatcgtacatcggccccatctgttactaaatccctcactctgaactctactcggagcggggtgggcacgggaaactttgggggctacggcatgacgaacggggccgagaaaccttctgtgctgcacatgataatggaagccttgggtctacgcaatcaggctcaaaaccgcgagccaacatccaaggatattggaactctgataagtgagtagagcactctcggcaagcccgacatgcttgattaatgcggttcacttttttcagtgctgggcgtaatgtttttgctctttgtaatcagcgtgaccggatttttcgtaatgtggtttaccgaatattacaacaacaccattctggaggtgagtctatcgtaaatcctatgtatcgtggtgttcctaatttcaactgatctacagaacctgatcctggccgaaaactcggataccgctaatagttggcttaaccctgatcctaagtacgacactttgctaaaggctcacatttttcactaccccaacatcgatgactacttagcagggcgggcagataaaataaaggtcgtggatgtgggacctctcacctaccaggaacacactgttaaagatgaagtttcctttaacaaaaatttcactgttagcttcagggtaggtctccagtcaatgtaatcaaactacatgatttaacaatctgtttttcaggaccgcaagtcttataagtttctcccggaaaagtcgtctattggggaacacgaagtggtcagggtgcccaatgtgccgcttatctctgccgccggaccagttaagcgcatgaaggctttcgaacgcttagctgtatccacttggataaaacaattcaaggagcctctctttaagaatctcacggtttccgaatatctctggggttatgaggacagcattatcaagttaaaatcactgggcagaggccggcgacggtttggtcttctgatgagcgtaagttgagtaagaaattggttactggtcagcttatcaaaatatgttatccattagcgcaacgggactagcgtggattcggtccagcttaatacaggcgaggacgacatcaccaagttcagcatcattacccagtttaacggcatgccccagttggactactgggagggggatgagtgcaatcgcatcgacggctccgagccttctatgttctcaccacatttgctgcaggatcgcagcacagttaatgtattcctccaggtgctgtgccgcaaggtgccgctacacttcgaaaaagaggttaccatctacaacgacattgatgttctgcgctaccggacgccaatggacgtattcagccatccgtccaaaaatcctgcgaaccagtgctattgtcagaacacagaactgtgcttgcccagcggagttatcaacgccaccaagtgctacggggatgcgcccatttttccctcgttcccacatttcttcacgggcgatccggtgctgtaccaagactttgagggtattgagccagacgcagcagtgcatcaaacctatgccgacatccatcctcgattcggttttccaattagcggcgcgtcccgtgtccagataaacataatgctggacaagacgccgatattgagaagtaagcgcaaataagataatcttttttggacaaatactatatgtactggtttcttttagatcagggcgatagattaaagaacactaccatccttccacttatgtggatcgagatcacgtcgggagacttttccgaggaggtgctccacacgctgtacttaagcacctttggcctgaatgccattcagcaaactcttaaatacggcaccctgctcatatcggtgacatcgttcagcctgatcgtagccggcgtctattacctgaacagcaggcgagagcagcagcttcaggagagcaagacgtccgctgagctggaggcgctgaacggcggtgagaacgtcatcgttgtgcaccacattgacatgcccgttccactgcccgtccaagatgggggcatccatcagggaacgtaaaagtgccactagttgtttagttaagggcgggtatggggaaaattcaaacttaaatgagattttcgaatttgtctgcattaattatagaatagtttgtaaacatatagtcgccagttacctttagtctttagtcatctgatgtatgtaaatatatgtagaatcgtttaataaactgttcattacctataactgttaatatttatatgttttccctataataaattaagttggccacattgcaacacttatttgcccaaggaaagataatgttcatgtagcaaatattttattgttaagtttctaaacaaaaacgaaattcgtatattagttgcgtgttcaacatttgattttctgttatgatctttgttctgtttgaaaaccgttttagttgttaaatgcgtaaattacattgcatcgagtaattctatcggttttatattaaggtagaaaaaatttagaaatcaattttctgtggatttagtctctctttattggtgtttgcgggtttctggatctgagagttaatacgtttattggttgatgtgtgtgttgtattattttacttgatttcgttgaccacttaaatacgccgtcattcgagggatgcgaaaattcttgagtgtgtgtgtttacaacattgttttttttttttgtttaagttttgtcgttataaaaatgttggttttttcgtttacgttttaatttaagtatgtataatagtttatataaaaaataacagagaaattatataaaagaaacattaaatataatcgtttattttgctcttcatcatcaccttcttcctgcgattcaactttttcttcatctaataattaacgcgtcaattggcagaatcctctccatctaatgattcatcctggaccgatgagtcgtcgccgccaccgcctcctcctgcacgctttgatgaaggtgtacccgtgagccgactggagctgagaccaatgccgccggtgcgtctaggaaggaatagaccacgacatataattagtatttctgttcaggacgtattttccgtctttctgtgagcgtgcagtgcaggggcaacatatacacaagtccaaacaggggtacgttggagggttcacgactaagaactttttttgaggaagtttggagaattgcataaatttgcagtttggtctttacgtgagttctgttcctaacatgcaaagaaaa

SEQ ID NO: 7292 - DNA, 3147 bp, DROSOPHILA
ccagctcgaactgattccgtccgattccgacgtcgtagtaataacttgtttggtcggcagtacgcacagtccagtccagcggagaaccagtcccagttccaggcccgctctctaatcccagcgcagatcggatcgccgcgaaacgggccaaatctaatcggttccgtaaggttctcggccagatagtgcgtgggccggcccgagtatgtagctaatcgcagcaaaccaaaaatttgcaagtggatcaaccggtggcagtgggccaaactcgaactccgtgcgcagataatcaaattccgcaaggcagtccgtctttaattgctgctttgaagtggaagtggcggcggaaactaatatgcgctagattcgtgcacttacatctggacaggaaaactgcagtacggttggaaaacctgatattgctctagctctaactctagcttcaactctacgctccagctgcagctggaattaaaacaacaacagaccagccagtgcgatcgagcccacaaaagagacggcgacaaaacaaagaagcgggcgaacaaagaacgcgcagcaacaaaagaacgaaggaacacagaggcacagatacagacaccagatacaaaacgagtctgtcgcatagatacatctcataggtggtgcatccagcaggagtatctatcggtaggggagcggaatgagacccgaaaaaaacccaataaacacgactgtgttcagccagcgtaaacgcgacgaaattgttaattaagacgccaaatgtttggcagacttcgaaagtgcagagcactgaacagcgagtaaacaacgtgaaagagagtggcagagaacgccagataagcgcgtgtgggtgcagttcgtctccgagagagtggttccgattccaacggagcgcgcacgtttgtgttgcccaccgaaaatcagctggtgccccaaagctcattccaagtgcacgttgatcgtgaccgcgctctttgcaggcgctctccagctcagtgccacccactcaccccctttctatcaccacgcatcacgttatcagccaatgcctcttttctgcaactgaaacgcagaggaggagcgcggagagaagtacgaaccatttgcgatttcaagaggtcgacaacgtgcagcgacagactatcagaaaacaatgtcacataccaaagatgcagagatgtccatgcccgctcggcaggaatctgatcgtacatcggccccatctgttactaaatccctcactctgaactctactcggagcggggtgggcacgggaaactttgggggctacggcatgacgaacggggccgagaaaccttctgtgctgcacatgataatggaagccttgggtctacgcaatcaggctcaaaaccgcgagccaacatccaaggatattggaactctgataatgctgggcgtaatgtttttgctctttgtaatcagcgtgaccggatttttcgtaatgtggtttaccgaatattacaacaacaccattctggagaacctgatcctggccgaaaactcggataccgctaatagttggcttaaccctgatcctaagtacgacactttgctaaaggctcacatttttcactaccccaacatcgatgactacttagcagggcgggcagataaaataaaggtcgtggatgtgggacctctcacctaccaggaacacactgttaaagatgaagtttcctttaacaaaaatttcactgttagcttcagggaccgcaagtcttataagtttctcccggaaaagtcgtctattggggaacacgaagtggtcagggtgcccaatgtgccgcttatctctgccgccggaccagttaagcgcatgaaggctttcgaacgcttagctgtatccacttggataaaacaattcaaggagcctctctttaagaatctcacggtttccgaatatctctggggttatgaggacagcattatcaagttaaaatcactgggcagaggccggcgacggtttggtcttctgatgagccgcaacgggactagcgtggattcggtccagcttaatacaggcgaggacgacatcaccaagttcagcatcattacccagtttaacggcatgccccagttggactactgggagggggatgagtgcaatcgcatcgacggctccgagccttctatgttctcaccacatttgctgcaggatcgcagcacagttaatgtattcctccaggtgctgtgccgcaaggtgccgctacacttcgaaaaagaggttaccatctacaacgacattgatgttctgcgctaccggacgccaatggacgtattcagccatccgtccaaaaatcctgcgaaccagtgctattgtcagaacacagaactgtgcttgcccagcggagttatcaacgccaccaagtgctacggggatgcgcccatttttccctcgttcccacatttcttcacgggcgatccggtgctgtaccaagactttgagggtattgagccagacgcagcagtgcatcaaacctatgccgacatccatcctcgattcggttttccaattagcggcgcgtcccgtgtccagataaacataatgctggacaagacgccgatattgagaaatcagggcgatagattaaagaacactaccatccttccacttatgtggatcgagatcacgtcgggagacttttccgaggaggtgctccacacgctgtacttaagcacctttggcctgaatgccattcagcaaactcttaaatacggcaccctgctcatatcggtgacatcgttcagcctgatcgtagccggcgtctattacctgaacagcaggcgagagcagcagcttcaggagagcaagacgtccgctgagctggaggcgctgaacggcggtgagaacgtcatcgttgtgcaccacattgacatgcccgttccactgcccgtccaagatgggggcatccatcagggaacgtaaaagtgccactagttgtttagttaagggcgggtatggggaaaattcaaacttaaatgagattttcgaatttgtctgcattaattatagaatagtttgtaaacatatagtcgccagttacctttagtctttagtcatctgatgtatgtaaatatatgtagaatcgtttaataaactgttcattacctataactgttaat

SEQ ID NO: 7293 - protein, 589 aa, DROSOPHILA
MSMPARQESDRTSAPSVTKSLTLNSTRSGVGTGNFGGYGMTNGAEKPSVLHMIMEALGLRNQAQNREPTSKDIGTLIMLGVMFLLFVISVTGFFVMWFTEYYNNTILENLILAENSDTANSWLNPDPKYDTLLKAHIFHYPNIDDYLAGRADKIKVVDVGPLTYQEHTVKDEVSFNKNFTVSFRDRKSYKFLPEKSSIGEHEVVRVPNVPLISAAGPVKRMKAFERLAVSTWIKQFKEPLFKNLTVSEYLWGYEDSIIKLKSLGRGRRRFGLLMSRNGTSVDSVQLNTGEDDITKFSIITQFNGMPQLDYWEGDECNRIDGSEPSMFSPHLLQDRSTVNVFLQVLCRKVPLHFEKEVTIYNDIDVLRYRTPMDVFSHPSKNPANQCYCQNTELCLPSGVINATKCYGDAPIFPSFPHFFTGDPVLYQDFEGIEPDAAVHQTYADIHPRFGFPISGASRVQINIMLDKTPILRNQGDRLKNTTILPLMWIEITSGDFSEEVLHTLYLSTFGLNAIQQTLKYGTLLISVTSFSLIVAGVYYLNSRREQQLQESKTSAELEALNGGENVIVVHHIDMPVPLPVQDGGIHQGT

SEQ ID NO: 7294 - DNA, 5978 bp, DROSOPHILA
ctgaacccacaacaccattaagcaaaagctacaacctcgattttagctccttgactcctcagtcgcagaaactttcgcagaagcaacggaagcgtctttcctccgagtcaaagagttggcggactaataacccacccctagtggaacaatcctccactccagtggctgttccgaatgcctggggcgtaacaaccacgccatcgggttcgttcaatgactcatttacttctccaaccactggaagcagcacggatcccacttcatttgccaatatgatgaggggacatgccacatcctccaccacacccacggaccaaagccaaagcttctcgcgcatcttggcggatgaaaaaagacagagggaatcctatgagcgcatgcggaacaaatctttggtacacacgcagattgaggagagggcaattgccgaattgagggagttctacaacgtggacaacattgatgatgagactataaccattgcccgagtgtccagacccagtgatatcaactttagcatatggctgaggcagtaaattggtacaggtagcttagttgtgtgaagtgtttgtcctatagtttttgtttttattagagtgttcggactgtttgtgtttttaaagcgatttactgcgaccggggcatcaaatgtagaactcggatccgcctgcaaagaagctcttgctatttatttatattcaaaaccaaatgcaataggatattggacggcacattgggtaacaaactttattgcatgagcatatagataatacagatagatatagatatttacaagctgggggacacacactcaacaatgaggcaacaagacaagtgacgaataaatagccatctaagcttagctaaaccgaaccgaacccgaaataaacccgttgcttatgcaaatgagaacacgatgaacgaaggggattgacacagagcgagtggtgtggagatgaaactggacgagaagatgtgggcgatggatgtggcggcttgttcagaagcactccttacgaaaggcaaatccgtactggtcgcacttgtatctcaacgttttggccaactgtggtgggccgcagtagaagacggtgacctttcccttttgctgggcctgcagctgcttgaacaccttatcccagttgggcctgccggcattggtgcgggttttcagacccgtgatcagatcccgcttgccctggtaagaaaattcatgaagagtttagaatagcactgatattgaggcatatgttttgcgcctaccttttcgtgcagtaagtccaaagctagttggagacccactgccttcatgtcggttctttgcagcgcacttgttatgtacatgtgcatgtccaggaatctgtggaaaattcattgacaatcttcgcacaatacatgctaacagctaacactcaccgctccatggcaccgcccagctctgcctgctcgatctccagctgggacagcagattgacgaaccactcgaaggatctttgatccctgttgatccagaagaagtctaccttccgcagattcatcacagacttgggtatctcgctggcccattcgaattggcatctcgggcaactgtgccgagctttccagtaccgatgcatgatggactatttaggattacactattatatgcgttcatggactacacaagacatattatacctgcagaatggaggcaaacggtgtgactccgatgcccgtgccaattaacaccgcgtgctgagcgccaaagatgtgacttgagggtgctccatatgggccatcgataaatatctgtgtggagaattagtaagttagcattaggattaggttagtgggttagcccttgttggcttttggtatgtgtgttggtgtaacccgcacctccatgactcccgcatcaagtgtcactttgccaccgctgttagttgtggagctaccagttgatcccccaccacctcctccggttctgttatttatggaggcggacagggagcgcaggaatgtgggtcgtcgcagaatagattttctgctaggcgatcccgtctgtgtttggtccttcggttggagcaattaatggtttagaagagttaattggtaggtcagtcaaccgagtacttacctccaacggcttggatgccccctcggcggataagcttagcctggccaactgcaacttgtccgctgaatccatcctcgaactcagttgaccctgttcggctcggctagctggacttgctccattggcttctcctgctgccacctgatgctctcgctcctccatgctgggcgtcttgaaggcgatgatagtgggcttggtacgcatgtatcggaaactctgcgccagcgacttgttttgcggactgaggtaggccaatcccacgctgttgttccttgcgcgacgcacccgcttctcatcaaaggcagactcggattcagagcgacccaaagctcgaagtctgtggattacgatgcaagtctagaaaaggtaccatatttaaagcatatacttacgccttgaggcgactccgctttttgctcttcacactgatgtccggcagagaaatgctcttctccagcggtctctgcttcaagttggagtcctcccgctcgccatcagcaatgaaagctccgtttgggatgcccttctttgggtccactgcctcctttctggagaatgtccgctgcagagtcttcttgatgctgcgtatgcggttaactccagtggctggaggatcgataggagctcctggcgcgggcttgcggttctgtcggggcggacgcactggcggcacagcctgcactcccaaattcttggccaggaaatcagtttgcggcgttgctgatctttctccggctatcgcagggttgcgagcttcgttgaggagcatgaaactgggcgtgggaatggcgtgcatgtgttggggaatctcttgcgaggagccactttgctgcagcttttgctgctcccgctcaaagtagcggtacaagcgattggtccactcgcccacagtgcgtatgtgtaaccacatgtagtcctcctgctcgggcgccgaacttatagtaaatggatgccactcatagttggcaatggccggtatgttcacgaagacataatcgccgggacggaagttaaaatgatgtggtcgcttgatcaccagatgcaccaccttcgaaggcaaaagcaatccggaactgatgtacgtcttgccgtgctctcccctcatccaaatgaagcgaagagccctttccactatgtaaacgagtcctgggagcaggaaccacttccagaagttgggtccatggaagaggcacagtatccagaagggcacataaagcagatgcgtccaatagaagacttcgaaactgcctttccgccgtacaaagggctgggagcacacgaacatcaccaccaggatggcaagcagagctactcccgtgggattggcacatcctggtatcaggccaaacaaaccgggacgatctgtgagtagccattcccctatggtgtaatgacccgcatttatgtttggatcgttgatcacgatgatggaaaagttgaacagatgcattattgtatgaatcaagctcaatacggagatcgtgatgcccgtcagtttgtgcagatagacgtggtgatccagtggcaggtacgaggacaacccacgacccctgaggtaagtcagtgagtgccgcagcataagtacaaggacccaggcacagttgaagttcaggcattgtcctaaaagtaaattagtaattgtagttaattatacctatcaattaattgcagatcagtactcaccacaagctctagctatgatgacgaaaccattactggcacgatactggatagcgcgggatatgaacaagcacagattgacggtgatgtagaagaagagatatgtgacaaacacctggttgttcttcatgtaggccagcgagaactgatggggcagggagttccagaatccgctcttcgctgctcctcccgcctgccgatcctctgcgatgggcactaaccagcgatcgattctacgaaatggaatttcgttagttaaaagatctatgtatcttcaggcagaactcacgttatgctcaggttctccagtaggccaccgtgcttatggagctggttctttagcgcctcgtaggtgatttcaccactattgtgcggatcagcatcctcgaacatggcactggtgagatcctcgatctggtcttcggaaaactccatgccgttctctttgatgcagtgccgtataacatcgtgcagctccttgtgctgaatgagtccgtcacctggtagattgaagatggatggttgagtagagattctctagtttattctgcaaacccaccatctatatcatagaccttgaacagaaatcgaatcttgtcatctgccgactgaccagagaactggtgtatggcatcaatgaactcctgcagcgaaatggaacccgagttgtccttatcgaagatttggaaaacccgctctgtgaagaaaggctaaatcaaaggaaaatgaattaacatatgtatctgcttgtttgaaccatcatttcaaaatactttgacttgttttgctaactcacattctttgaggtaactatcttctggaactcctcccgccgaatctcctgctcgttgcccactgtagtacggaaaagctgctccaaccgcgccagcgagctcttgtcgaatccggtccttggccgggagttggtcagatgagagatgaactccattacctggttggtggaaaccaaattgcttccatccaactcaatcaggcggtatagcttatcgaggatcttgtgggtgaatttgggaatggatcacaataaattccgagcattgtggaaactacaatacttacccctctggtatgccagatgtcgcgaaagttcttgaaggaaaccctcttgttctcaccgcagatcacataggccaccgattcaatttgctcggcaaagtccatctggcgatcgtccctgcaagattcacaagacagatctcaatataggtaaacatacattggtactcccacatatcttggcattgatacacaaagaaaacatttacccagaatacgatattctgaaaatccatcaaagatcattttgccgtgagtcattcgactggttaattggttttcaaaacaattaatgctttcattgataagaagtatattaaactgaatcactcaatgagatattatcgaaaatattattgagagaactggatttcacattaaattgtcttcgcattcaattgcctccttccactgacacatattttccaactttatctttactgattccatttgctgatttacatgtgtactccatcagcacttggcagtcgcgaatgccaaattattttgattagtgtttgcgttgcaaaaattaatatatttacaatgtgcgatgatgttattcgcttcgatgatgtcgtattgggctcttaattgtttaaagcacttgataaaaatccgtgtcagcggtttcattattttctgtgcacaagatacgtcgcctgccgatcccgataccaatcgcctaacccgcatccccagatatcgctgctgctcgcactatatttgtatttgaatgacttcattacgacaggcagccaatgacagtttctggctgcagagcagtccaggtgcccagttccgatccgcagccaactttagaggctgtcgaggcacgcggactatgttagctgttgtatatgttaacacacggcgcagatagcatcgccatgggcaacggacatcggcatcgtctgggaacggagctggcatctggcatctggggctgcgatgtgatgtggcatggggcttctggtcgtcgcagctggaatggaatgcctggagcacgccagccaggtgcgtgtgtggatcggactcgatcgtatggctattttttctttatttctttgcctttccgaaggcgagctaattgttttggcaccgt

SEQ ID NO: 7295 - DNA, 3264 bp, DROSOPHILA
atggactttgccgagcaaattgaatcggtggcctatgtgatctgcggtgagaacaagagggtttccttcaagaactttcgcgacatctggcataccagagggatcctcgataagctataccgcctgattgagttggatggaagcaatttggtttccaccaaccaggtaatggagttcatctctcatctgaccaactcccggccaaggaccggattcgacaagagctcgctggcgcggttggagcagcttttccgtactacagtgggcaacgagcaggagattcggcgggaggagttccagaagatagttacctcaaagaatcctttcttcacagagcgggttttccaaatcttcgataaggacaactcgggttccatttcgctgcaggagttcattgatgccatacaccagttctctggtcagtcggcagatgacaagattcgatttctgttcaaggtctatgatatagatggtgacggactcattcagcacaaggagctgcacgatgttatacggcactgcatcaaagagaacggcatggagttttccgaagaccagatcgaggatctcaccagtgccatgttcgaggatgctgatccgcacaatagtggtgaaatcacctacgaggcgctaaagaaccagctccataagcacggtggcctactggagaacctgagcataacaatcgatcgctggttagtgcccatcgcagaggatcggcaggcgggaggagcagcgaagagcggattctggaactccctgccccatcagttctcgctggcctacatgaagaacaaccaggtgtttgtcacatatctcttcttctacatcaccgtcaatctgtgcttgttcatatcccgcgctatccagtatcgtgccagtaatggtttcgtcatcatagctagagcttgtggacaatgcctgaacttcaactgtgcctgggtccttgtacttatgctgcggcactcactgacttacctcaggggtcgtgggttgtcctcgtacctgccactggatcaccacgtctatctgcacaaactgacgggcatcacgatctccgtattgagcttgattcatacaataatgcatctgttcaacttttccatcatcgtgatcaacgatccaaacataaatgcgggtcattacaccataggggaatggctactcacagatcgtcccggtttgtttggcctgataccaggatgtgccaatcccacgggagtagctctgcttgccatcctggtggtgatgttcgtgtgctcccagccctttgtacggcggaaaggcagtttcgaagtcttctattggacgcatctgctttatgtgcccttctggatactgtgcctcttccatggacccaacttctggaagtggttcctgctcccaggactcgtttacatagtggaaagggctcttcgcttcatttggatgaggggagagcacggcaagacgtacatcagttccggattgcttttgccttcgaaggtggtgcatctggtgatcaagcgaccacatcattttaacttccgtcccggcgattatgtcttcgtgaacataccggccattgccaactatgagtggcatccatttactataagttcggcgcccgagcaggaggactacatgtggttacacatacgcactgtgggcgagtggaccaatcgcttgtaccgctactttgagcgggagcagcaaaagctgcagcaaagtggctcctcgcaagagattccccaacacatgcacgccattcccacgcccagtttcatgctcctcaacgaagctcgcaaccctgcgatagccggagaaagatcagcaacgccgcaaactgatttcctggccaagaatttgggagtgcaggctgtgccgccagtgcgtccgccccgacagaaccgcaagcccgcgccaggagctcctatcgatcctccagccactggagttaaccgcatacgcagcatcaagaagactctgcagcggacattctccagaaaggaggcagtggacccaaagaagggcatcccaaacggagctttcattgctgatggcgagcgggaggactccaacttgaagcagagaccgctggagaagagcatttctctgccggacatcagtgtgaagagcaaaaagcggagtcgcctcaaggcacttcgagctttgggtcgctctgaatccgagtctgcctttgatgagaagcgggtgcgtcgcgcaaggaacaacagcgtgggattggcctacctcagtccgcaaaacaagtcgctggcgcagagtttccgatacatgcgtaccaagcccactatcatcgccttcaagacgcccagcatggaggagcgagagcatcaggtggcagcaggagaagccaatggagcaagtccagctagccgagccgaacagggtcaactgagttcgaggatggattcagcggacaagttgcagttggccaggctaagcttatccgccgagggggcatccaagccgttggaggaccaaacacagacgggatcgcctagcagaaaatctattctgcgacgacccacattcctgcgctccctgtccgcctccataaataacagaaccggaggaggtggtgggggatcaactggtagctccacaactaacagcggtggcaaagtgacacttgatgcgggagtcatggagatatttatcgatggcccatatggagcaccctcaagtcacatctttggcgctcagcacgcggtgttaattggcacgggcatcggagtcacaccgtttgcctccattctgcagtccatcatgcatcggtactggaaagctcggcacagttgcccgagatgccaattcgaatgggccagcgagatacccaagtctgtgatgaatctgcggaaggtagacttcttctggatcaacagggatcaaagatccttcgagtggttcgtcaatctgctgtcccagctggagatcgagcaggcagagctgggcggtgccatggagcgattcctggacatgcacatgtacataacaagtgcgctgcaaagaaccgacatgaaggcagtgggtctccaactagctttggacttactgcacgaaaagggcaagcgggatctgatcacgggtctgaaaacccgcaccaatgccggcaggcccaactgggataaggtgttcaagcagctgcaggcccagcaaaagggaaaggtcaccgtcttctactgcggcccaccacagttggccaaaacgttgagatacaagtgcgaccagtacggatttgcctttcgtaaggagtgcttctga

SEQ ID NO: 7296 - protein, 1087 aa, DROSOPHILA
MDFAEQIESVAYVICGENKRVSFKNFRDIWHTRGILDKLYRLIELDGSNLVSTNQVMEFISHLTNSRPRTGFDKSSLARLEQLFRTTVGNEQEIRREEFQKIVTSKNPFFTERVFQIFDKDNSGSISLQEFIDAIHQFSGQSADDKIRFLFKVYDIDGDGLIQHKELHDVIRHCIKENGMEFSEDQIEDLTSAMFEDADPHNSGEITYEALKNQLHKHGGLLENLSITIDRWLVPIAEDRQAGGAAKSGFWNSLPHQFSLAYMKNNQVFVTYLFFYITVNLCLFISRAIQYRASNGFVIIARACGQCLNFNCAWVLVLMLRHSLTYLRGRGLSSYLPLDHHVYLHKLTGITISVLSLIHTIMHLFNFSIIVINDPNINAGHYTIGEWLLTDRPGLFGLIPGCANPTGVALLAILVVMFVCSQPFVRRKGSFEVFYWTHLLYVPFWILCLFHGPNFWKWFLLPGLVYIVERALRFIWMRGEHGKTYISSGLLLPSKVVHLVIKRPHHFNFRPGDYVFVNIPAIANYEWHPFTISSAPEQEDYMWLHIRTVGEWTNRLYRYFEREQQKLQQSGSSQEIPQHMHAIPTPSFMLLNEARNPAIAGERSATPQTDFLAKNLGVQAVPPVRPPRQNRKPAPGAPIDPPATGVNRIRSIKKTLQRTFSRKEAVDPKKGIPNGAFIADGEREDSNLKQRPLEKSISLPDISVKSKKRSRLKALRALGRSESESAFDEKRVRRARNNSVGLAYLSPQNKSLAQSFRYMRTKPTIIAFKTPSMEEREHQVAAGEANGASPASRAEQGQLSSRMDSADKLQLARLSLSAEGASKPLEDQTQTGSPSRKSILRRPTFLRSLSASINNRTGGGGGGSTGSSTTNSGGKVTLDAGVMEIFIDGPYGAPSSHIFGAQHAVLIGTGIGVTPFASILQSIMHRYWKARHSCPRCQFEWASEIPKSVMNLRKVDFFWINRDQRSFEWFVNLLSQLEIEQAELGGAMERFLDMHMYITSALQRTDMKAVGLQLALDLLHEKGKRDLITGLKTRTNAGRPNWDKVFKQLQAQQKGKVTVFYCGPPQLAKTLRYKCDQYGFAFRKECF

SEQ ID NO: 7297 - DNA, 2606 bp, DROSOPHILA
aatacaaatctatttcggcacggtttcctagcgtgcaaccagaattctgacaatggttttaagaaataatggggacctcctaaatgctttcaaaatgctttcggctgagaggaacaacaactgatacgttgggcataaaggccccggggcattagaagtgttaatagaaaagtgcctccggctgatcaggtttcgttgcaggaccgaatggatcgccgcctgaggtgttgatgagctggccttgaaaattcctacgactttggattcgagcgacaatggtctagtgtttaagataatgtccgaatgatccagggatcggaaggtcatcagtacataaaataaattaaattaaatgtattaacataaaattaaagattttttaaaagtctaaaatacctagccttgttaattaaagattattttttcgtaaacacttttggtagtgtataaattgtaaatgtccccatttttataattgtaatgacagtctattccactaattttgttgtattttgttagttatacaaattggatggccactttcaataggagatacagctttttacttcggaggtgtttttacttggctctgatgtctggaccttgttgcctttttaaaccggttggcagccggcacgcgacagggccaggttttcgtttggggacgacaggcagctgaaaatgagcaaaaacactcagaaactcttcccactcgacaacgggaacactcaggtcaccaacagctgcgttttacagagagaacgagagataatattactacctctctattaaaatcagagaaaacactcatctcaagagacgatccttcagtgatgatgctgttgcaccttttccaggggcaggtaggtagtcacgcaggtgggatccctaggccctgatacctataaatagcctgaacggaacggggaagggcatcagaacagagccagcgctgaagcaaggagcatcgtcacacaataacgttatactatctcttaaaatggctttgggcagcgaaaatcactctgttttcaacgacgacgaggagtcatcttcggcctttaatggaccctctgttatccggagaaatgcccgggaacgcaaccgcgtaaagcaggtcaacaatggcttcagccaactacgacaacatatccctgcggccgtaatagccgatttaagcaatggtcgccggggaattggtcccggcgccaataaaaaactgagcaaagttagcacactgaaaatggcagtagagtacatacggcgcttgcagaaagttcttcatgaaaacgaccagcagaaacagaaacagttgcatttgcagcagcaacatttgcactttcagcagcagcaacagcatcaacacttatacgcctggcaccaagagttgcagttgcaatctccaactggcagcacaagttcctgcaacagcattagctcttattgcaagccagcaacatcgacgattccgggagcaacacctcctaacaattttcataccaagttggaagccagttttgaagactaccgtaacaattcctgcagttctggtactgaagatgaggacatcctcgactatatatcactctggcaggacgacctgtaaaaaaacagatcaaatcttcagctattgctagtcgcacccaaccataacacacatcaaaccattgattggccaacaagtattacctcagccacaaagtatttatattccctagaactacctttttgccttataaattagtatttaaggttttatatagtttctaaggatagtttctaatggaagacaatttatatttaagtttttttttatagcatacattgaggacattaaactgatatatataaaattttaaatgagtttttattgtaaacaaaattaaacggtaattaaagtgaaacaaatttatgtacaaaaggagtaaaattcagaaaagttttaatgaacaaatgctttatgaatatgggcgtagcaatgttttgatacaaacttgatcctgtcctgtataccacaggacacgcttccttttacctggtacattcctttaaacgatcctagtatacgctttattcggggtaagcccgaaaaaagtattcgaaactgtaaccgttaagtatttacagatcactagccaatgaagataaattacaataacattttgtaaacacttttgatcgaaaacgccgatttgcataaataaagttggattgagtagggtgaaaaaggcaaaatatttacctgctgcatttttgcatatgaaccggtcaaggtaataagatcctgagaattcacaattccggagagatcgatcgatcgatcgatgaatgaactaattttgagttattcccgcaatgcagccgaaacaagcgaaaaaacaacggtcggcaattgttcagatcgcccccgacaacgttcagaaaaatgaaaataagatctgctcaggcattctgcaccggaagccgccgcgatgaagctgctgcaaaaaaaactcacgcaagatacatatactctaaaaacaaaagaaacatggttcatgggtcttttcggcaaattcttcaccatattagatcactacatcacacaccaatctattcattagcaa

SEQ ID NO: 7298 - DNA, 606 bp, DROSOPHILA
atggctttgggcagcgaaaatcactctgttttcaacgacgacgaggagtcatcttcggcctttaatggaccctctgttatccggagaaatgcccgggaacgcaaccgcgtaaagcaggtcaacaatggcttcagccaactacgacaacatatccctgcggccgtaatagccgatttaagcaatggtcgccggggaattggtcccggcgccaataaaaaactgagcaaagttagcacactgaaaatggcagtagagtacatacggcgcttgcagaaagttcttcatgaaaacgaccagcagaaacagaaacagttgcatttgcagcagcaacatttgcactttcagcagcagcaacagcatcaacacttatacgcctggcaccaagagttgcagttgcaatctccaactggcagcacaagttcctgcaacagcattagctcttattgcaagccagcaacatcgacgattccgggagcaacacctcctaacaattttcataccaagttggaagccagttttgaagactaccgtaacaattcctgcagttctggtactgaagatgaggacatcctcgactatatatcactctggcaggacgacctgtaa

SEQ ID NO: 7299 - protein, 201 aa, DROSOPHILA
MALGSENHSVFNDDEESSSAFNGPSVIRRNARERNRVKQVNNGFSQLRQHIPAAVIADLSNGRRGIGPGANKKLSKVSTLKMAVEYIRRLQKVLHENDQQKQKQLHLQQQHLHFQQQQQHQHLYAWHQELQLQSPTGSTSSCNSISSYCKPATSTIPGATPPNNFHTKLEASFEDYRNNSCSSGTEDEDILDYISLWQDDL

SEQ ID NO: 7300 - DNA, 9173 bp, DROSOPHILA
aagaacaacaacaggagcaccggacactaatgcacactcacagcgtagcacaaacacacactggcaaaaaaacaaaaaccgccgaatcgaattgttgttgtcttgtctcgttaacttgcgcttatggcttttctaattctacttctatttctatttggatttcgatttaattcgtttttggaaatgctacctttgccgtttgtttgggagcgtaaatgaagtgaagttccctgacaatctgttctcgaccaaagcaatagactttctgaatttcggctcggtgtcgagtcggccgccgctcgtttcgtccacttaaactttcaggatgaacgaaaaaaaatactaatagtatttcctcgtcgagcaacaacaatacagtgtgcccagagacggcggagcagtaaatgtaactgcagcgcgacaagtgtgcccgtgtacgggaagacaaggaaagccagcaaaaataaggctttagaagctacacaaaataccaaatgcactaataattttaaagaacttttaattcacaagtttgcgaattttgtttattgcttattattattattgttcattacgtttaccactagtttttgagagaaattattatgcgctacaattagtgttggtttttcggtaagaactcataaaagtcaactatgtaaaggaagtatgccatggactataatggaaattagcaaacttcatcgttgagaccaaagggcatatgtgtgttcccatataggggaattttcccgcttatcaatacaagtatgtgtgcaaaattcttgtccaattgttgtcagcacatgaaaacggataactaaccataggttataggaaggatccactgtagttctgcaatgcaaaccagggctggcagcgagaacactgctgtaagctaacagcaaactgtactgtaaacagtagaaaactgttcgtggtatttagtatttagctagtattttaataccaacttttgtgcaatgcgatgagaaataaagaagaagagaagaggaagaaacgctcacaaactcttcgtttctctgcattaatacgcactttattattaagttaagctttattccattatattatggccgaatttctggactccgaggccgaggaatcggaggtaggtgtctgcggaaccccaaaaacactatttctagaagcgcgtaccgttcgtgcgtcgttatgtgtgcggtgtgcgttgcgccttgcgtgtgtgtacatacatatgtgcctacatatatattgaattaaccaaatggcttttcttcgtttttcccgcaggaggaggaagaattggacgtcaacgagcgcaagagactcaagaaactgaaggcggccgtctccgatagtagcgaagaagaagaaggtgagtttttccactggagccgctgaaggcgcgtacaaatacatacatacatacatacgtatgtggcgatctctggcgggtttttcacccctctcaccatccatcgatcggaacagtccatatccgggataaaggcacctataactggccaatgccacacgcttgcaacttcttttgtttacaactttgaggttaggtcttgtgtttttaccgtgctaccgtggccatcaaatatcagcatcagcagtagcaatagcagcagcaacaacaacaaacagctgcgctcgttccagtaaataaaacaagtgcggcgaattggaagaacgcggcgtattccaagaaattgcaaatcaaagcagggagggagaattagttcaatagatggagctggaataatcaatggttagggcttatctatatcgaaatctaggtaatttatcaaatgtaggtctttctcaaaaccgggtgaattacttaaatttaagctttaaaaacagttttcagttgcatatgtatatctgcggctacaatgaaggtaaaaggtaaaccgatattcttattgccctattccgtagacgacgaggaacggctgcgcgaagagctcaaagatctgatcgacgacaatcccatcgaggaggacgatggcagtggttacgattccgatggcgtcggcagcggcaagaagcgcaaaaagcacgaggacgacgatctggacgatcgactggaggacgacgactacgatcttatcgaggagaatctgggcgtcaaagtcgagagacgggtaggtgttcccttcagggaagaactatgtactttttaaactccaattgtggctccaatttcgaagcttaactaacaaagaataacatagctgagggattggggcttctatctcctcaaatatattgtttgaaattatgttttcccttgtagaagcggttcaagcgtctgcgtcgcatccacgacaacgaaagcgatggcgaggagcagcacgtggacgagggtctggtgcgtgagcagattgccgagcagttgttcgacgagaacgatgaggtatgccactagtaatccctgaccaccaattaatgcacagtgtccaactgattgcccctgatcctacagagcattggtcatcgcagcgagcgcagtcacagggaggcggacgactacgacgacgtggatacggagtcggacgcagatgacttcattgtggacgataatgggcgtcccatagccgagaagaagaagaaacggcgccccatctttacagacgcgtaagtatacaaactataataaagtttagatatcaatagatacgattaatataatccaaccacagatcacttcaagagggtcaggacatctttggcgtagacttcgactatgacgacttctcaaagtacgaggaagacgactacgaagatgactcggaaggagatgagtacgatgaggatctgggcgtcggcgatgatacgcgcgtcaagaagaagaaagcgctcaaaaagaaggtggtcaagaagacaatcttcgacatatacgagcccagcgagctcaagcgtggtcatttcaccgatatggacaacgagattcgcaagacagacatcccagaaagaatgcagctgcgagaggtgcccgtaaccccggtgcccgagggatcagacgagctggacctcgaggctgaatggatctacaaatatgccttctgcaagcacactgtttcggaacaggaaaagccggagagccgcgagaaaatgcgcaaaccaccgacaaccgttaacaagattaagcagacgctagaatttatacgcaaccagcagttggaggtgccctttatagccttctatcgcaaggagtatgtgaagccagagcttaatatcgacgatctctggaaggtttactactacgatgggatctggtgtcagctaaacgagcgaaagcgcaagctaaaggtgcttttcgaaaagatgcgtcagttccagctggacacgctatgcgccgacacagatcaacccgtaccggatgatgttcgcctcatcctggacagcgatttcgagcgcctcgccgacgtacagtcgatggaggagctaaaggacgtgcacatgtactttctgctgaactattcgcatgagctgccccgcatgcaggcggagcagcgacgaaaagctatacaggagcgtcgcgaggccaaggcgcgtcgccaggcagccgccgctgagaacggtgatgatgcggccgaggcgatagttgtaccagagccggaagacgatgacgatcccgagctgatcgattaccaactaaagcaggcgtccaacagcagtccctatgcggtattccgcaaggcgggcatctgcggctttgccaaacactttggtctcacgccggagcagtatgccgaaaatctgcgcgacaattaccagcgcaatgagatcacccaggaaagcatcggtcccacagagctggccaagcaatatttgtcgccgcgcttcatgaccacggatgaggttatccatgccgcaaaatacgttgtggcccgacagctggcacaagagcctctgctgcgcaagaccatgcgtgaggtgtatttcgacagagctaggattaacatacggcccaccaagaatggcatggtgctgatcgatgagaattcgccggtgtattcgatgaagtacgtggccaagaagccggtaagcgatctatttggcgatcaattcataaagctaatgatggccgaggaggagaagctgctggagataacgttcctcgaggagttcgagggcaatgcgtgtgccaacggaacacccggtgactatgtggaagagtccaaggccctgtaccagctggatcagtttgccaagcacgtgcaggagtggaataagctgcgggcggaatgcgtacagctggcgctgcagaagtgggtcattccggatctgatcaaggagctgcgctcaactctgcacgaggaggctcagcaatttgtgctgcgttcctgcacgggtaagctgtataagtggctaaaggtggcaccctataaaccgcaactgccccccgactttggctacgaggagtggagcacgctgaggggcatacgggtgctgggtctggcctacgatcccgatcactcagtggccgctttctgtgcggtgactaccgtggagggcgacatctccgactacctgcgactgccgaacattctgaagcgcaagaattcttacaaccttgaggagaaggcccagaagttggccgaccttcgaaagctgagtgactttatcaaaatgaagaagccacacattgttgtcatcggagcggaatcgcgcgatgcccagaacatccaggcagacattaaggagattctgcatgaactcgagacctccgaacaatttccgcccatcgaggtggagataatcgacaacgagctggccaagatctatgccaactcgaagaagggcgagtctgactttaaggagtatcctcctctgctgaagcaggctgcttcgctggcccgcaagatgcaggatccgctagtggaatactcacagctgtgtgatgcggacgacgagattctctgcctgcgctaccatccgctacaggagcgtgtgccgcgcgaacagctgctggagcagctcagcctgcagtttatcaatcgaacgagcgaggtgggtctggacattaacctgatggtgcagaactcacggaccatcaacctgctgcagtacatctgtggcttgggtccgcgcaagggtcaggctttacttaaacttcttaagcagagcaaccagcggttggagaaccgcacccagctggtcaccgtgtgtcatctggggcccagggtctttatcaactgcagcggtttcattaagatcgatacctcatcgctgggcgacagcacagaggcgtatgtcgaggtgctggacgggtcgcgtgtgcatccagaaacgtacgagtgggccagaaagatggccatcgatgccatggagtacgacgacgaggagaccaatccggccggtgcccttgaggaaattctcgagtcgccagagcgccttaaggatctcgatctggacgcattcgctgtggaactggagcgccagggattcggcagcaagagcataaccttgtacgacataaggaacgagttgagctgcctgtacaaggactaccgcactccgtacacaaagcccagtgcggaggagctcttcgatatgctgaccaaggagacgcccgactcgttttatgtgggcaagtgcgtcacggccatggtcaccggtttcacctaccgtcggccgcagggcgatcagctagacagcgcaaatccggtgcgtctagattccaacgaaagctggcagtgccccttctgccacaaggacgacttcccagagctgtccgaggtgtggaatcactttgacgcgaacgcgtgccctggccagccatctggtgtgcgtgtgcgtctggagaacggcctgcctggctttatacacatcaagaacttgtccgatagacaggttcgcaatcccgaagaacgtgtgcgcgtctcacagatgattcatgttcgcatcattaagatagacattgaccggttctcagtcgaatgctcttcgaggaccgctgatcttaaggatgtgaacaatgagtggcggccgcgtcgcgacaactactatgattatgtgactgaggagcaggacaatcggaaagtgagcgatgccaaggccagggctctgaagcgcaaaatttacgcgcgtcgcgtaatcgcccatcccagcttcttcaacaagtcgtacgcggaggtggtggccatgctagcggaggccgatcagggcgaggtggccctgcgtccgagcagcaagtccaaggaccatctgacagccacctggaaggtggccgacgacatcttccagcacatcgatgtgcgcgaggagggtaaagagaacgatttcagcctgggcagaagtctgtggatcggcaccgaggagttcgaggatctggacgagatcatcgcccgccacatcatgccgatggccttggctgcccgcgaactgatacagtacaagtactacaagccaaacatggtgaccggcgatgaaaatgaacgggatgtcatggaaaagttgctgcgcgaggagaaggcaaatgatccgaagaagatacactacttttttacggcctcacgcgccatgccgggcaagttcctgctgtcctatctgcccaagacgaaggtgcgtcacgagtatgtgacggtcatgccggagggctatcgtttccgtggccagattttcgatacggttaacagtctgctgcgttggtttaaggaacactggctggatccaacggccacgccggccagcgcctcggcgtccaacttaacgccactgcacttgatgcgtccgccgccgacgatctcgtcgtcatcccagacctccttgggcccccaggcgccctacagcgtcactggcagcgtgactggtggaacgccgcgcagtggcatcagcagtgccgtcggcggtggcggttccagcgcctactccattacgcaatccatcactggctacggcacgtcgggcagttctgctccaggggctggagtatcttcctcccactatggcagctcatcgacgccgtcgtttggcgccatcaatacgccatacacgcccagtggacagactccgttcatgacgccctacacgccgcatgcctcacagacgcctcgctatggtcacaatgtgcccagtcccagctcgcaatcatcgagcagtcagaggcatcactacggcagcagttccggaacgggcagcacgcccaggtatcacgatatgggaggaggaggcggtggcggcgttggtggtggtggtggttccaatgcctacagcatgcagccgcatcaccagcaacgtgccaaagagaacctcgactggcagctggccaacgatgcctgggcaagacgcagaccgcagcagcatcagtcacatcagtcgtatcacgcccagcagcagcatcatcactcgcagcagcaaccccatatgggcatgagcatgaacatgggcattacaatgtcactgggacgtggcaccggtggcggcggaggaggtggctatggatcgacgcctgtcaatgattacagcaccggaggcggtcataatcggggtatgtcctcgaaggcgtctgtgcgcagtacgccgcgcaccaacgcctcgccgcactccatgaatctgggcgatgccacgcccctctacgacgagaactaggggcggcgaagtgaatggaaaccgaaaaccaacacaagctgcaaaggatgcactatgcacacaccatatgctactatatacatacactatactacaaaaacgagaacagaaccgaacagaacagaaaagtctacaattatatataattcatgcacgcgcagctggcgaagatccagttgcactaatcttagtactttggagtgcgattccgcattgatcctcaacgatatttaggtttaagtcaagtccataactgatccgcagttcacaccacatatataaatatatattatctatgtataattgaaaattgcggaacgcctgccgttggagtgggtgcatcacctggcggtgggggagtaggagtagaacggctgggcaggagctgagacgccggtgggccggggagcaatcaggtttgtgacgacggaagaatgaaaaataaatttcaattttttctgaccagaaatataccgccagctcttcttactaatgggaattcaagattggttttatccgcagcttttatgaataaaacgcccgagttgtgtaatttaagcaatttgtacaatttatttcgtgtcaaatgtgtgaggaaattgatgttcccaaattgggggaatatatctggaatctcgtaatgcagtccggccgcagactagtttctggccacaccgcgtcggatcacatagaccagcgagatgccgatgaaggcggcgcccagggccagtgccacatgacggcagctgttgcatggaatagagaatatgaaaggcggtttaaatcaatgggagtatcatggtcaggataaggcactccgaccgactgggtgtcacaacaacaaaactgggtgcactttggttagctagctaggattacacggttttgcaggcatttctagaggggttgatttaacttaggatgcagcattgcttgggggtggcggcggcatcagtaggcgtggcactttaccaaggcacagaaccaagaatcaaaataaaaacgcaagtcaaggtggggtgccattcacaaaaccaaagagtgaccaattacagcgtgcaaattgttggtattctagattatcacatttatatatgtacataattccagttgcttgacgtgtgctttgggttaatcatgatgggtaatatatgtacacaggtcagtggttagaacttacaagtccaactagcttttgtagaaccttattttcgtgcttgagaaggaattaaatcttgaatggagcaaatatcatacatgcaagttgagattcattagattcattaaatattaagtattgtggctttgttagcggttggtaaagaaaaagttgatactctatatgggaatataaataattgatataatttaaggaacacttctgtatcatcattatcttcttcagggtatccaatcgtatcaaagggtatcaaagtagtacaccaaaaagtgtacgaaatagagactttcaggacacgtgaagcgtgaaactttgggggcttcgaggcaattaatggattacataagagttggctaattgtacttattgattgaaacgcagg

SEQ ID NO: 7301 - DNA, 6151 bp, DROSOPHILA
gaagaagagaagaggaagaaacgctcacaaactcttcgtttctctgcattaatacgcactttattattaagttaagctttattccattatattatggccgaatttctggactccgaggccgaggaatcggaggaggaggaagaattggacgtcaacgagcgcaagagactcaagaaactgaaggcggccgtctccgatagtagcgaagaagaagaagacgacgaggaacggctgcgcgaagagctcaaagatctgatcgacgacaatcccatcgaggaggacgatggcagtggttacgattccgatggcgtcggcagcggcaagaagcgcaaaaagcacgaggacgacgatctggacgatcgactggaggacgacgactacgatcttatcgaggagaatctgggcgtcaaagtcgagagacggaagcggttcaagcgtctgcgtcgcatccacgacaacgaaagcgatggcgaggagcagcacgtggacgagggtctggtgcgtgagcagattgccgagcagttgttcgacgagaacgatgagagcattggtcatcgcagcgagcgcagtcacagggaggcggacgactacgacgacgtggatacggagtcggacgcagatgacttcattgtggacgataatgggcgtcccatagccgagaagaagaagaaacggcgccccatctttacagacgcatcacttcaagagggtcaggacatctttggcgtagacttcgactatgacgacttctcaaagtacgaggaagacgactacgaagatgactcggaaggagatgagtacgatgaggatctgggcgtcggcgatgatacgcgcgtcaagaagaagaaagcgctcaaaaagaaggtggtcaagaagacaatcttcgacatatacgagcccagcgagctcaagcgtggtcatttcaccgatatggacaacgagattcgcaagacagacatcccagaaagaatgcagctgcgagaggtgcccgtaaccccggtgcccgagggatcagacgagctggacctcgaggctgaatggatctacaaatatgccttctgcaagcacactgtttcggaacaggaaaagccggagagccgcgagaaaatgcgcaaaccaccgacaaccgttaacaagattaagcagacgctagaatttatacgcaaccagcagttggaggtgccctttatagccttctatcgcaaggagtatgtgaagccagagcttaatatcgacgatctctggaaggtttactactacgatgggatctggtgtcagctaaacgagcgaaagcgcaagctaaaggtgcttttcgaaaagatgcgtcagttccagctggacacgctatgcgccgacacagatcaacccgtaccggatgatgttcgcctcatcctggacagcgatttcgagcgcctcgccgacgtacagtcgatggaggagctaaaggacgtgcacatgtactttctgctgaactattcgcatgagctgccccgcatgcaggcggagcagcgacgaaaagctatacaggagcgtcgcgaggccaaggcgcgtcgccaggcagccgccgctgagaacggtgatgatgcggccgaggcgatagttgtaccagagccggaagacgatgacgatcccgagctgatcgattaccaactaaagcaggcgtccaacagcagtccctatgcggtattccgcaaggcgggcatctgcggctttgccaaacactttggtctcacgccggagcagtatgccgaaaatctgcgcgacaattaccagcgcaatgagatcacccaggaaagcatcggtcccacagagctggccaagcaatatttgtcgccgcgcttcatgaccacggatgaggttatccatgccgcaaaatacgttgtggcccgacagctggcacaagagcctctgctgcgcaagaccatgcgtgaggtgtatttcgacagagctaggattaacatacggcccaccaagaatggcatggtgctgatcgatgagaattcgccggtgtattcgatgaagtacgtggccaagaagccggtaagcgatctatttggcgatcaattcataaagctaatgatggccgaggaggagaagctgctggagataacgttcctcgaggagttcgagggcaatgcgtgtgccaacggaacacccggtgactatgtggaagagtccaaggccctgtaccagctggatcagtttgccaagcacgtgcaggagtggaataagctgcgggcggaatgcgtacagctggcgctgcagaagtgggtcattccggatctgatcaaggagctgcgctcaactctgcacgaggaggctcagcaatttgtgctgcgttcctgcacgggtaagctgtataagtggctaaaggtggcaccctataaaccgcaactgccccccgactttggctacgaggagtggagcacgctgaggggcatacgggtgctgggtctggcctacgatcccgatcactcagtggccgctttctgtgcggtgactaccgtggagggcgacatctccgactacctgcgactgccgaacattctgaagcgcaagaattcttacaaccttgaggagaaggcccagaagttggccgaccttcgaaagctgagtgactttatcaaaatgaagaagccacacattgttgtcatcggagcggaatcgcgcgatgcccagaacatccaggcagacattaaggagattctgcatgaactcgagacctccgaacaatttccgcccatcgaggtggagataatcgacaacgagctggccaagatctatgccaactcgaagaagggcgagtctgactttaaggagtatcctcctctgctgaagcaggctgcttcgctggcccgcaagatgcaggatccgctagtggaatactcacagctgtgtgatgcggacgacgagattctctgcctgcgctaccatccgctacaggagcgtgtgccgcgcgaacagctgctggagcagctcagcctgcagtttatcaatcgaacgagcgaggtgggtctggacattaacctgatggtgcagaactcacggaccatcaacctgctgcagtacatctgtggcttgggtccgcgcaagggtcaggctttacttaaacttcttaagcagagcaaccagcggttggagaaccgcacccagctggtcaccgtgtgtcatctggggcccagggtctttatcaactgcagcggtttcattaagatcgatacctcatcgctgggcgacagcacagaggcgtatgtcgaggtgctggacgggtcgcgtgtgcatccagaaacgtacgagtgggccagaaagatggccatcgatgccatggagtacgacgacgaggagaccaatccggccggtgcccttgaggaaattctcgagtcgccagagcgccttaaggatctcgatctggacgcattcgctgtggaactggagcgccagggattcggcagcaagagcataaccttgtacgacataaggaacgagttgagctgcctgtacaaggactaccgcactccgtacacaaagcccagtgcggaggagctcttcgatatgctgaccaaggagacgcccgactcgttttatgtgggcaagtgcgtcacggccatggtcaccggtttcacctaccgtcggccgcagggcgatcagctagacagcgcaaatccggtgcgtctagattccaacgaaagctggcagtgccccttctgccacaaggacgacttcccagagctgtccgaggtgtggaatcactttgacgcgaacgcgtgccctggccagccatctggtgtgcgtgtgcgtctggagaacggcctgcctggctttatacacatcaagaacttgtccgatagacaggttcgcaatcccgaagaacgtgtgcgcgtctcacagatgattcatgttcgcatcattaagatagacattgaccggttctcagtcgaatgctcttcgaggaccgctgatcttaaggatgtgaacaatgagtggcggccgcgtcgcgacaactactatgattatgtgactgaggagcaggacaatcggaaagtgagcgatgccaaggccagggctctgaagcgcaaaatttacgcgcgtcgcgtaatcgcccatcccagcttcttcaacaagtcgtacgcggaggtggtggccatgctagcggaggccgatcagggcgaggtggccctgcgtccgagcagcaagtccaaggaccatctgacagccacctggaaggtggccgacgacatcttccagcacatcgatgtgcgcgaggagggtaaagagaacgatttcagcctgggcagaagtctgtggatcggcaccgaggagttcgaggatctggacgagatcatcgcccgccacatcatgccgatggccttggctgcccgcgaactgatacagtacaagtactacaagccaaacatggtgaccggcgatgaaaatgaacgggatgtcatggaaaagttgctgcgcgaggagaaggcaaatgatccgaagaagatacactacttttttacggcctcacgcgccatgccgggcaagttcctgctgtcctatctgcccaagacgaaggtgcgtcacgagtatgtgacggtcatgccggagggctatcgtttccgtggccagattttcgatacggttaacagtctgctgcgttggtttaaggaacactggctggatccaacggccacgccggccagcgcctcggcgtccaacttaacgccactgcacttgatgcgtccgccgccgacgatctcgtcgtcatcccagacctccttgggcccccaggcgccctacagcgtcactggcagcgtgactggtggaacgccgcgcagtggcatcagcagtgccgtcggcggtggcggttccagcgcctactccattacgcaatccatcactggctacggcacgtcgggcagttctgctccaggggctggagtatcttcctcccactatggcagctcatcgacgccgtcgtttggcgccatcaatacgccatacacgcccagtggacagactccgttcatgacgccctacacgccgcatgcctcacagacgcctcgctatggtcacaatgtgcccagtcccagctcgcaatcatcgagcagtcagaggcatcactacggcagcagttccggaacgggcagcacgcccaggtatcacgatatgggaggaggaggcggtggcggcgttggtggtggtggtggttccaatgcctacagcatgcagccgcatcaccagcaacgtgccaaagagaacctcgactggcagctggccaacgatgcctgggcaagacgcagaccgcagcagcatcagtcacatcagtcgtatcacgcccagcagcagcatcatcactcgcagcagcaaccccatatgggcatgagcatgaacatgggcattacaatgtcactgggacgtggcaccggtggcggcggaggaggtggctatggatcgacgcctgtcaatgattacagcaccggaggcggtcataatcggggtatgtcctcgaaggcgtctgtgcgcagtacgccgcgcaccaacgcctcgccgcactccatgaatctgggcgatgccacgcccctctacgacgagaactaggggcggcgaagtgaatggaaaccgaaaaccaacacaagctgcaaaggatgcactatgcacacaccatatgctactatatacatacactatactacaaaaacgagaacagaaccgaacagaacagaaaagtctacaattatatataattcatgcacgcgcagctggcgaagatccagttgcactaatcttagtactttggagtgcgattccgcattgatcctcaacgatatttaggtttaagtcaagtccataactgatccgcagttcacaccacatatataaatatatattatctatgtataattgaaaattgcggaacgcctgccgttggagtgggtgcatcacctggcggtgggggagtaggagtagaacggctgggcaggagctgagacgccggtgggccggggagcaatcaggtttgtgacgacggaagaatgaaaaataaatttcaattttttctgaccagaaatataccgccagctcttcttactaatgggaattcaagattggttttatccgcagcttttatgaataaaacgcccgagttgtgtaatttaagcaa

SEQ ID NO: 7302 - protein, 1831 aa, DROSOPHILA
MAEFLDSEAEESEEEEELDVNERKRLKKLKAAVSDSSEEEEDDEERLREELKDLIDDNPIEEDDGSGYDSDGVGSGKKRKKHEDDDLDDRLEDDDYDLIEENLGVKVERRKRFKRLRRIHDNESDGEEQHVDEGLVREQIAEQLFDENDESIGHRSERSHREADDYDDVDTESDADDFIVDDNGRPIAEKKKKRRPIFTDASLQEGQDIFGVDFDYDDFSKYEEDDYEDDSEGDEYDEDLGVGDDTRVKKKKALKKKVVKKTIFDIYEPSELKRGHFTDMDNEIRKTDIPERMQLREVPVTPVPEGSDELDLEAEWIYKYAFCKHTVSEQEKPESREKMRKPPTTVNKIKQTLEFIRNQQLEVPFIAFYRKEYVKPELNIDDLWKVYYYDGIWCQLNERKRKLKVLFEKMRQFQLDTLCADTDQPVPDDVRLILDSDFERLADVQSMEELKDVHMYFLLNYSHELPRMQAEQRRKAIQERREAKARRQAAAAENGDDAAEAIVVPEPEDDDDPELIDYQLKQASNSSPYAVFRKAGICGFAKHFGLTPEQYAENLRDNYQRNEITQESIGPTELAKQYLSPRFMTTDEVIHAAKYVVARQLAQEPLLRKTMREVYFDRARINIRPTKNGMVLIDENSPVYSMKYVAKKPVSDLFGDQFIKLMMAEEEKLLEITFLEEFEGNACANGTPGDYVEESKALYQLDQFAKHVQEWNKLRAECVQLALQKWVIPDLIKELRSTLHEEAQQFVLRSCTGKLYKWLKVAPYKPQLPPDFGYEEWSTLRGIRVLGLAYDPDHSVAAFCAVTTVEGDISDYLRLPNILKRKNSYNLEEKAQKLADLRKLSDFIKMKKPHIVVIGAESRDAQNIQADIKEILHELETSEQFPPIEVEIIDNELAKIYANSKKGESDFKEYPPLLKQAASLARKMQDPLVEYSQLCDADDEILCLRYHPLQERVPREQLLEQLSLQFINRTSEVGLDINLMVQNSRTINLLQYICGLGPRKGQALLKLLKQSNQRLENRTQLVTVCHLGPRVFINCSGFIKIDTSSLGDSTEAYVEVLDGSRVHPETYEWARKMAIDAMEYDDEETNPAGALEEILESPERLKDLDLDAFAVELERQGFGSKSITLYDIRNELSCLYKDYRTPYTKPSAEELFDMLTKETPDSFYVGKCVTAMVTGFTYRRPQGDQLDSANPVRLDSNESWQCPFCHKDDFPELSEVWNHFDANACPGQPSGVRVRLENGLPGFIHIKNLSDRQVRNPEERVRVSQMIHVRIIKIDIDRFSVECSSRTADLKDVNNEWRPRRDNYYDYVTEEQDNRKVSDAKARALKRKIYARRVIAHPSFFNKSYAEVVAMLAEADQGEVALRPSSKSKDHLTATWKVADDIFQHIDVREEGKENDFSLGRSLWIGTEEFEDLDEIIARHIMPMALAARELIQYKYYKPNMVTGDENERDVMEKLLREEKANDPKKIHYFFTASRAMPGKFLLSYLPKTKVRHEYVTVMPEGYRFRGQIFDTVNSLLRWFKEHWLDPTATPASASASNLTPLHLMRPPPTISSSSQTSLGPQAPYSVTGSVTGGTPRSGISSAVGGGGSSAYSITQSITGYGTSGSSAPGAGVSSSHYGSSSTPSFGAINTPYTPSGQTPFMTPYTPHASQTPRYGHNVPSPSSQSSSSQRHHYGSSSGTGSTPRYHDMGGGGGGGVGGGGGSNAYSMQPHHQQRAKENLDWQLANDAWARRRPQQHQSHQSYHAQQQHHHSQQQPHMGMSMNMGITMSLGRGTGGGGGGGYGSTPVNDYSTGGGHNRGMSSKASVRSTPRTNASPHSMNLGDATPLYDEN

SEQ ID NO: 7303 - DNA, 7273 bp, DROSOPHILA
gtactaaaattagcaattaataaactagtagtaagcaggcaaacgacgattttaaatcttatcacacctgattgattaagacacaacctcaattcaattaactttaaaacacaattctcagaaaactgagcaattttaaaagaaatcggaattgggtgatctaataaacacccaccaataatgctttattgcacgcttttgtcatacaaaagaaagcactcatagtgaacgaatcaatatcttatcgaaggaagtgcttaataaaatgcgattatatttgaagaacctggccaaaatgccatgtatgtacggtgatatataagaaaacgcagttctgtcaaccgaacgcgaatggcttgcagaacgtcagcacctgtcaattagggaattgcatttaccaggccagaaacaagagttggtcggcgaaaaaggtaacacaacacagcacaataaaaaaaacaaatataattatatggccacaaagggggctaaaggggaacggttggcaaattgcgttagaatgtgcaatcttgctaatgacccaattagaacgatggccaaagcaaaagctttcaccgccgacctgttttccttcttattttatttttcctgtagctgtggctgacaggacacgccagagtgccacagtctggattctaacactgcaaggacactggacacacaatgacagaaagttcagggcagagggtcggacacgcgactattaaaaattacattttccaaccataacaatttcgcgtcggacggaatgaacttgaatgaaatggaattgtgtctgtcgctgtccccgtccttgcacttcctccttgcccattcccatggcaaactctctttgcggactctttcataaatatcaaagcagggcaaagatgacgccactatatgattcccaaaacgagctgacatgcgacccacgaaattttacaaaaaaaaaaaaaaaaaaaccataaaccacacagagaggaatactttctcggtaatggtgaaggagaaaactccagcaaccactcgccgcctcctcatcgtcatcttctttttgtcaaggtcgaggccaagtggtggcacattattttgcaatttactagttactttaataacccacccacatgcgaacgctgaccgccaagccacagctggtctgcccacttggcacaccttctccattaacaaagcacttatcccaatccctgaccttagtctaccctaaaccactaaccaaataacccaaccatacaaacccggccaaaccataacagtacaacttaactcgcatgtaaattgtcttgcgtggcggaccatcaatgtgttcatttgacaataattgagttttggttatgacgagcatttcatgaatattgcattgaaattttatatctgtataggtatgacagccagagcgacatttcgtgaccagaagttgacattttgaaagccaactggagcgcgattctttggcattatcaaatgtttactttaaaaaattgttttttaaagaagtgatgtaaaaatatatagatttattgtagatttttaaagacttgactgacttaaaacgattctacaacaatttgtattattattttttttactatagagaaacggagcggtacaagaaggtgaaatggcaggagttgcgtgttggggacattgtccacttgtccaacaacgagacggtgccggcggacatcctgctattgcgaacaagcgatccccaaggggtgtgctacatagacacctgcgatttggacggtgaaacgaatctgaagcggcgcgaggtgagttcccagcaattagctaacccagtagctctacgtgattctacagatatttgtcatttctgcgcaggttgtacgtggcttcgaggaaatgcagagcatttttgtgcccagcaagtttgttagtcgcgtggaagcggatgcgccgaccacgaagctatatagattccatggggccttaatacatccaactggtgagcgtgtgcccatatcgaccgagtgccttttgctgagagagagcagactgaaggtgggttaactcttaccgggttcaatgtacatacattctttttatctgaatttgttcttcacttcagaatacggactatatcgaaggtattgtagtctatgcgggacatgaaacgaagtctatgctgaataatagtggtccaaggtacaagcgatcccaggtggaacagcaaatgaatattgatgtgatatggtacgtaaaatatttcgaattatctcttaatatatattaatgatgtgttcaatttcaggtgtgtgataattttgttgatattgtgcgttgttggcgctattggatgcagaatgtggttgagctcgtttacccatttcccggtgccctatttgcccccgaataaactgactgccaatatggagagcatgtggattttctggacgtacatcgtcatcctgcaggtgatgattccactgtcgctctacgtgaccatcgagctgtgcaaaatcctgcaggtctttcacatccacaacaatgtcgatttattcgatgcggagactaacaagcaaacggaatgccgggcgatgaacataaccgaggagttgggacagatccagcatatatttacagataaaacaggtactctcacagagaacaagatgatctttcgacgatgcgttgtcaatggatcggattacaatcatccgccatcggagcttgaaaagatatactctaagccaggcgcaccagcgccaccactgattccgaatgataatctaaatagcgacatggcacaacttacacaaggaacatatctcacacctcatgcgcagcgcattcaagaatttctcgtggtactggccatctgcaacacggttatcgtgggtgccgcccctcatcgagatatgatgaatgccagtgggattatcgaagtgcagcaaataggaaacagtccggcgaatcttaagcacggcaagcagcgacagaagctgctggccagtagcacaagtacgaccacgacgacgactataataaatggacctacgacacagccgcaggtagtgtccattccagcggatcgttatatcaggctggctgagtcacgatcggtgactccttctccacctcccaatctgctttttgcgttgccggctcagagccatcagccaacgctttcgcctatcagcagctctgctgaatcgtcaccgaattccgagtctgaatcaccatcaccgccgatgaaaaacaagtccctttccaacagtatttcgcccaccggcagggccaaggcagtcattaactccaagattaccagtatagcaacctttctgaatgccaaaactcagggaaagcgaatgaagttgccgtaagtttcattaattattgattttttcaaaagataaatcttaattttttgccatttttatttccagttcatccaaaacgggaacgatttacagaaccgccgatgggcgaccgctctacgaagccgagagtcctgatgagttggccctcgtgaatgcagcctatagctatgattgctgcctacttaatcgcagtcccaatcagattttggtcagcatgccaatggcgggagccacaagagagtacgagatactcaaggtgctgccctttgattccagtcgcaagtgcatgtcaattgtggttcgacagattggcagtcaggagattgtgctgtacaccaagggcgcagatagctctatcatgcccgtcttggtgccttgctcgcataacagtcccgaaggtgagtggcacatgcattatatacttcatagtgtttcgataataaatgaccgatttgattgatttttaggcatattgcgagaacagacccagcaactgctagatcggtatgcccgcgaaggtttgcgcatcctagtaatggccaaacggactctgaactctgccgactatacggattggtgggcgcggcatcaggaaatcgagatgtcgttggagaaccgcgaacgaagattacgtgattcattcgcgaagctggaaagcaatctgactctgttgggagcaacaggcatcgaagatcgcctacaggatggagtgccggagacgatagcctcgcttctctccgcggggatttcagtttgggttctgactggtgacaagcccgaaacggccataaatattgcctactctgcaaagctatttacccagcaaatggagctcataaggcaagcaaaattataaattaagagtgcttccacaatgcctttaatttttacgttgaagtatctaattgtaattcctgcgtcgttttaggttaacagcacgatcccgcgatgctgctgaaacagccataaatttctatctgactgatatggagaatgacaagacaacatccacgttaggctatggccagtcgttaagaaagaaacaacgcgcattggtagtggatggaaagaccttaacatttatccttgatccaaagtgagttagacacaaagtgtgtttttatcctcttatttaattgcattaccaatttacagatccaaactaatcctgccttttctgcggctgtctaagcggtgcgcttcggtactctgctgccgatccactccgctgcaaaaggcctacctagtcaaagtggttaaggaggagctcaatctgcgaaccctggccatcggggatggcgccaacgatgtgtccatgatccagatggcagacgtgggcgttggaatctctggtcaagaaggcatgcaggccgtcatggccgccgatttcacattaccccgctttcgttacttggagcgcctactcttggcgcacggctattggtgctacgatcgattgtcccgcatgattttatactttttctataagaatgctgtaagtttaagatctgataagataataaggaaactttaaatcctacaataatcctttgttccaggcctttgtctttctgatattctggtaccagttgtactgtggattttctggccaagtgatgatggatcagatgtacttgatgctgtataatttaatattcacctcgctgccaccattggccattggagtgtacgacaagcgtgtggccgaagatctcctgctaaaaaatccatatctctataaaaatgtgagttaagaagcaagttgtatgcataatctatatgattaattattgtgaatccattcgttttcagggtcgactgggcgtagcttatagaccacacgacttttggctaatactactggatgccctctatcagagcctggtcatattcttcgtggcgctgtgcgcctatgcggagagtgatgtaggaatctgggagtttggtacgacgataacggcatcctgtctcttcgccaacctcgtacactgtgccattgaaatacgttcctgggtgagagtttattcaacaaggttaataaattctatgcatgcttattaaattttcgtattttccctttcagactgtgctgcatgtcttatccatagtgcttagtctaggttccttctacctctttgcgatcgtttacgattctgtgtgcatgaattgcttcggagtccggtcgtcatactgggtcatctttgtgtgctttgcctccgctgttcactggctagtgataatgctctccacagtggtggcagttctgccacggttagtatgaaaatatatttcgattttaaacgtttaattaatttttattatttttacagcctgctcctaacaacagtgcgcatttcgttgtgtcccgacgacagcaccaaagttattctgcaaagcaaacgggagcgcagcagaggtgaggctttgttagttacttggtcgcgctccacgtcagcctcatcaatctataggtaaaaaggcacaaaatacttgatctgcaagcaagttgcaactttttcatttgcacgatttgagtatacccttttgagcatgtattagtttgttttgattttgtgtctttttatttctacattgttgcgcaattctttaatgcaattcgtatttaatacaacaaaaaattgatgccgtcttacagaatcaccgattatgggtctaagaatcagattataacaacgattacctgattaagcgccaaaatgcaattcttcggctatctcagcggcaactaaaataaggaagacgactagcaacccccaaaacttgtacacatgtgctttcgctcttaatatgtggccttcgacaccgattattgataatattgcgttagtttagttaatccacttatcttaaaagtacttagtaagcaattcaaataatttgtttagcgaatgattgagtaagcgcttagatttccgagttatctatctgaatattagttaaactgtttgccttaacactagaatgaaagcaattgcacaattgcatgtatgtcatagtttacatatttatttgtataaaactagggagccagaagtgctcgagaattgaacccaacctaaccgactattgttaaatagaagcgaaaatgcaatgcttatttatgtgtacgattatttaaactagcgactaatagatgtatcaccctaacagaaatacttgacaattcaaacacaacagaactccattgcgagttcgatgataaggctgtgattctacactcatgaaggatatacctaagcatatgatatatatatacatacacaaacctatagaccttagatgttagttgcattgattcaagtattgacagaattgtttctcaccttctgtttcttagtttgttgtgtaaacaagaacattttttacttttttattgagaccatgcaatgacaagttgtaataatcgattgttgtaatctattagttgtactaaaccaattaatctacttgtagtcctcttcaaaaagaatacaataagataaactctaaatgcaattcgaaattaactgggtttgttaagagaatgaataccagagagcaaaaattgttagctgaatatttacattgttgaaaagcaagaaatcattaaatgaaataaatgtatatttacctacaaaaaaaaaaccgtaaaaatgtgtttatttaatgagttacatttatgaacaaattgtattgattggaacattcggtgatctaaggaattatatcaacgaatctcagcattgcctaaattcggaatgttttccttttaaccatatatatatcttgataaacattatgtatttctacaagcatttaaaaaatggaatctacatgtgtatatgttttaggctgtcgaattatgtgggtttgtgcatccactatatgtcaaaaacaaggtttgagta

SEQ ID NO: 7304 - DNA, 3744 bp, DROSOPHILA
atggtgaaggagaaaactccagcaaccactcgccgcctcctcatcgtcatcttctttttgtcaagagaaacggagcggtacaagaaggtgaaatggcaggagttgcgtgttggggacattgtccacttgtccaacaacgagacggtgccggcggacatcctgctattgcgaacaagcgatccccaaggggtgtgctacatagacacctgcgatttggacggtgaaacgaatctgaagcggcgcgaggttgtacgtggcttcgaggaaatgcagagcatttttgtgcccagcaagtttgttagtcgcgtggaagcggatgcgccgaccacgaagctatatagattccatggggccttaatacatccaactggtgagcgtgtgcccatatcgaccgagtgccttttgctgagagagagcagactgaagaatacggactatatcgaaggtattgtagtctatgcgggacatgaaacgaagtctatgctgaataatagtggtccaaggtacaagcgatcccaggtggaacagcaaatgaatattgatgtgatatggtgtgtgataattttgttgatattgtgcgttgttggcgctattggatgcagaatgtggttgagctcgtttacccatttcccggtgccctatttgcccccgaataaactgactgccaatatggagagcatgtggattttctggacgtacatcgtcatcctgcaggtgatgattccactgtcgctctacgtgaccatcgagctgtgcaaaatcctgcaggtctttcacatccacaacaatgtcgatttattcgatgcggagactaacaagcaaacggaatgccgggcgatgaacataaccgaggagttgggacagatccagcatatatttacagataaaacaggtactctcacagagaacaagatgatctttcgacgatgcgttgtcaatggatcggattacaatcatccgccatcggagcttgaaaagatatactctaagccaggcgcaccagcgccaccactgattccgaatgataatctaaatagcgacatggcacaacttacacaaggaacatatctcacacctcatgcgcagcgcattcaagaatttctcgtggtactggccatctgcaacacggttatcgtgggtgccgcccctcatcgagatatgatgaatgccagtgggattatcgaagtgcagcaaataggaaacagtccggcgaatcttaagcacggcaagcagcgacagaagctgctggccagtagcacaagtacgaccacgacgacgactataataaatggacctacgacacagccgcaggtagtgtccattccagcggatcgttatatcaggctggctgagtcacgatcggtgactccttctccacctcccaatctgctttttgcgttgccggctcagagccatcagccaacgctttcgcctatcagcagctctgctgaatcgtcaccgaattccgagtctgaatcaccatcaccgccgatgaaaaacaagtccctttccaacagtatttcgcccaccggcagggccaaggcagtcattaactccaagattaccagtatagcaacctttctgaatgccaaaactcagggaaagcgaatgaagttgccttcatccaaaacgggaacgatttacagaaccgccgatgggcgaccgctctacgaagccgagagtcctgatgagttggccctcgtgaatgcagcctatagctatgattgctgcctacttaatcgcagtcccaatcagattttggtcagcatgccaatggcgggagccacaagagagtacgagatactcaaggtgctgccctttgattccagtcgcaagtgcatgtcaattgtggttcgacagattggcagtcaggagattgtgctgtacaccaagggcgcagatagctctatcatgcccgtcttggtgccttgctcgcataacagtcccgaaggcatattgcgagaacagacccagcaactgctagatcggtatgcccgcgaaggtttgcgcatcctagtaatggccaaacggactctgaactctgccgactatacggattggtgggcgcggcatcaggaaatcgagatgtcgttggagaaccgcgaacgaagattacgtgattcattcgcgaagctggaaagcaatctgactctgttgggagcaacaggcatcgaagatcgcctacaggatggagtgccggagacgatagcctcgcttctctccgcggggatttcagtttgggttctgactggtgacaagcccgaaacggccataaatattgcctactctgcaaagctatttacccagcaaatggagctcataaggttaacagcacgatcccgcgatgctgctgaaacagccataaatttctatctgactgatatggagaatgacaagacaacatccacgttaggctatggccagtcgttaagaaagaaacaacgcgcattggtagtggatggaaagaccttaacatttatccttgatccaaaatccaaactaatcctgccttttctgcggctgtctaagcggtgcgcttcggtactctgctgccgatccactccgctgcaaaaggcctacctagtcaaagtggttaaggaggagctcaatctgcgaaccctggccatcggggatggcgccaacgatgtgtccatgatccagatggcagacgtgggcgttggaatctctggtcaagaaggcatgcaggccgtcatggccgccgatttcacattaccccgctttcgttacttggagcgcctactcttggcgcacggctattggtgctacgatcgattgtcccgcatgattttatactttttctataagaatgctgcctttgtctttctgatattctggtaccagttgtactgtggattttctggccaagtgatgatggatcagatgtacttgatgctgtataatttaatattcacctcgctgccaccattggccattggagtgtacgacaagcgtgtggccgaagatctcctgctaaaaaatccatatctctataaaaatggtcgactgggcgtagcttatagaccacacgacttttggctaatactactggatgccctctatcagagcctggtcatattcttcgtggcgctgtgcgcctatgcggagagtgatgtaggaatctgggagtttggtacgacgataacggcatcctgtctcttcgccaacctcgtacactgtgccattgaaatacgttcctggactgtgctgcatgtcttatccatagtgcttagtctaggttccttctacctctttgcgatcgtttacgattctgtgtgcatgaattgcttcggagtccggtcgtcatactgggtcatctttgtgtgctttgcctccgctgttcactggctagtgataatgctctccacagtggtggcagttctgccacgcctgctcctaacaacagtgcgcatttcgttgtgtcccgacgacagcaccaaagttattctgcaaagcaaacgggagcgcagcaagaatcaccgattatgggtctaagaatcagattataacaacgattacctgattaagcgccaaaatgcaattcttcggctatctcagcggcaactaaaataaggaagacgactagcaacccccaaaacttgtacacatgtgctttcgctcttaatatgtggccttcgacaccgattattgataatattgcgttagtttagttaatccacttatcttaaaagtacttagtaagcaattcaaataatttgtttagcg

SEQ ID NO: 7305 - protein, 1170 aa, DROSOPHILA
MVKEKTPATTRRLLIVIFFLSRETERYKKVKWQELRVGDIVHLSNNETVPADILLLRTSDPQGVCYIDTCDLDGETNLKRREVVRGFEEMQSIFVPSKFVSRVEADAPTTKLYRFHGALIHPTGERVPISTECLLLRESRLKNTDYIEGIVVYAGHETKSMLNNSGPRYKRSQVEQQMNIDVIWCVIILLILCVVGAIGCRMWLSSFTHFPVPYLPPNKLTANMESMWIFWTYIVILQVMIPLSLYVTIELCKILQVFHIHNNVDLFDAETNKQTECRAMNITEELGQIQHIFTDKTGTLTENKMIFRRCVVNGSDYNHPPSELEKIYSKPGAPAPPLIPNDNLNSDMAQLTQGTYLTPHAQRIQEFLVVLAICNTVIVGAAPHRDMMNASGIIEVQQIGNSPANLKHGKQRQKLLASSTSTTTTTTIINGPTTQPQVVSIPADRYIRLAESRSVTPSPPPNLLFALPAQSHQPTLSPISSSAESSPNSESESPSPPMKNKSLSNSISPTGRAKAVINSKITSIATFLNAKTQGKRMKLPSSKTGTIYRTADGRPLYEAESPDELALVNAAYSYDCCLLNRSPNQILVSMPMAGATREYEILKVLPFDSSRKCMSIVVRQIGSQEIVLYTKGADSSIMPVLVPCSHNSPEGILREQTQQLLDRYAREGLRILVMAKRTLNSADYTDWWARHQEIEMSLENRERRLRDSFAKLESNLTLLGATGIEDRLQDGVPETIASLLSAGISVWVLTGDKPETAINIAYSAKLFTQQMELIRLTARSRDAAETAINFYLTDMENDKTTSTLGYGQSLRKKQRALVVDGKTLTFILDPKSKLILPFLRLSKRCASVLCCRSTPLQKAYLVKVVKEELNLRTLAIGDGANDVSMIQMADVGVGISGQEGMQAVMAADFTLPRFRYLERLLLAHGYWCYDRLSRMILYFFYKNAAFVFLIFWYQLYCGFSGQVMMDQMYLMLYNLIFTSLPPLAIGVYDKRVAEDLLLKNPYLYKNGRLGVAYRPHDFWLILLDALYQSLVIFFVALCAYAESDVGIWEFGTTITASCLFANLVHCAIEIRSWTVLHVLSIVLSLGSFYLFAIVYDSVCMNCFGVRSSYWVIFVCFASAVHWLVIMLSTVVAVLPRLLLTTVRISLCPDDSTKVILQSKRERSKNHRLWV

SEQ ID NO: 7306 - DNA, 3242 bp, DROSOPHILA
atgccacaagtgcggatggcgtccagaatgcgcaacgtgcccacggcgtccacctcggccgtgtactcactgagatcgaaggagaccttgacatgggattgtgctgccaaattgtaaatctccgtgggcttcaccatattgatgatcttcaccaggctgctgctgtccgtcatgtcgccatagtggagcttcatacgcccacctttgtgcgcctttggatcggcatatagatgctcaatgcgggtggtgttgaaggtgctggcccgccgaataatgccgtgcacctcgtagtccttcttgagcagaaactctgccaaataggagccatcctgggcgatagggaacaagtaagaatcgagcactttgaacacgtaagcacggaatgaaggagatgcccctgaaacagccgtgactaattcatcaattacacacctggcccgttatgcctgttatcagcgccactttatcacgggagtcgccttcggcgccggcttccgttccgttttggtccttgctgccgttgctgctgctttcaggacgttgcttcttggtttccggggccccatcggaagtcgacatagcaattagccgggtatttagcatttactgacgctagttttaattttcacgccgacgcagcccggataataaacaaacttttgtctacagcactcaggtagaggtgaataaataatcgattggttatcgatacatcgcaatcgaagcacttgtacgggacagtggggcaatctatttaagacagcctaaattattttcaataagcaaaaagtaaatattttatcacaaaaaacaaattatgtatggaataacattttaaataagaattcagcgcaaatttaaaattaaaaccaaatctggttgaataacactttatttactttactgccaatgttgcactttttttcgattttgttccactttgtggcagtgttgagtagcaggaaaacccacgtagcgatttttagcgcatacctttcagcgaaagccggacgaaaataacataacgttggcacaaccacctatcttatcattcctcctccactcccaagccgattcgccaccgggcatcaatatcttcttcggcggaacccgcattacgtgtgcgtaaacggcggctttcaatttcattctcggagcgaccggccggccagcttgataacaccggtgcatagtgaaaccagcgccgcttactaattaagtacgaccacgacctccgagataaacagaagtcaattgttcgcagcacaaaaatgacggatcttatcaggcagggtgctctgttccttatgagcgagaagtgctatgataactacttcctctatcacaactttttagatggtgagtggctgctaattcaaaaaggtatgtgcctattaagtatcaattaacatttctcgtagttccgtgcttcaaggctttgctgagcaagggcttgggattggcaattatcgcaggttccgtgctggtcaaagtaccacaagtgctgaagatccttaacagcaagtctggcgagggcatcaacattgtgggcgtagtgttggacttgctggccatctccttccacctgtcgtacaactttatgcatggctatccgtttagtgcctggggcgacagtaccttcctggccatccagaccgtcacaatcgccgtcttggtcttgttcttcaacgggcgcaaggcgcagtcgggactctttctagtgggatatgtcgtgctgatgtatgttctcaattcggggctaacgcccatgtcggtgctgttcaccatccagagctgcaacattcccatcctgctggtgggcaagctgtctcaggcgtataccaactaccaggctggatccactggtcagttgtcagccgccactgtgatcatgatgtttgcaggatcggtggcccgcatcttcacctccatccaggagactggtgactttatgatcatcctcactttcattgcctctacctttgccaattcggttattctgggccagctgatctactactggaacaaacccgctggcgtcaaggtgaaggattcaaaggccaagaagccgaagaccaagaaggatgactaagcagtgcggatagaagtaacaaaagtagaaacagatatacatagagagatttgaactcgaaacataggttgcaacaacttctcgacaatgtagaacaaatatgcgatgtttaaataattgaattgaataattaaattaaattgagtcctagtttattaacttgtcctgtttctcgaagtgctgccgcagtagagctaaagcgcggtagcgatgggaaatggtgttcttctcggacttgggcagttcggcgtaggtcttatcgtagccactgggctggaaaaccggatccctgcggcaatgatagagaatttaataagcaagagccattttatcagacttcttacgcaagtgactcaccatccaaagtcccgggggccgcgaggttcgacgataacgccctcggtgatgcccttaaagattagaggctcggcatccacaccgtcgcagtagccaaaggtgcaaatagcctgagcgcttttgttctcccaaccatggagcagacggtgtaacccctccggctgcagcttctccaggaaccatttgatgtacggacccggcaagccctccagcgcattgaagcacagactagtgtcctccaccagcacgggtccattcacctgacgcgctgcctccttgcacttcttgatggcaatctcgtcgatgtcgcctgacattaaacatacgtagttttagtactacatcattcagatgatggctgttattcaccttgcaattccggaagatcaatcttctttgacacaatggtgcgcgggaaactgggtcccaggatggcaaccaactcttccagcttcttggcgttgccggtgacaaaggtaattggtttcgacatgacggtacagattaaattgtcgccctcaatttaaacaattggccgcagtattcaacgccatttgcaagactaaagcatgcggccaaatcagctgttttctgcttagcttgggcgcgaaataaaagacagggtggttattactcaaaaatattcaaaaagctggaattaaaaatacatacatatataattaaggtaacttaaataagttggtgaattaaattgtaacacagagaagaaaacgcatgtggtgtctaaaagccttgacaatagcatttctagttgatttattcaacataactt

SEQ ID NO: 7307 - DNA, 1180 bp, DROSOPHILA
cgaaagccggacgaaaataacataacgttggcacaaccacctatcttatcattcctcctccactcccaagccgattcgccaccgggcatcaatatcttcttcggcggaacccgcattacgtgtgcgtaaacggcggctttcaatttcattctcggagcgaccggccggccagcttgataacaccggtgcatagtgaaaccagcgccgcttactaattaagtacgaccacgacctccgagataaacagaagtcaattgttcgcagcacaaaaatgacggatcttatcaggcagggtgctctgttccttatgagcgagaagtgctatgataactacttcctctatcacaactttttagatgttccgtgcttcaaggctttgctgagcaagggcttgggattggcaattatcgcaggttccgtgctggtcaaagtaccacaagtgctgaagatccttaacagcaagtctggcgagggcatcaacattgtgggcgtagtgttggacttgctggccatctccttccacctgtcgtacaactttatgcatggctatccgtttagtgcctggggcgacagtaccttcctggccatccagaccgtcacaatcgccgtcttggtcttgttcttcaacgggcgcaaggcgcagtcgggactctttctagtgggatatgtcgtgctgatgtatgttctcaattcggggctaacgcccatgtcggtgctgttcaccatccagagctgcaacattcccatcctgctggtgggcaagctgtctcaggcgtataccaactaccaggctggatccactggtcagttgtcagccgccactgtgatcatgatgtttgcaggatcggtggcccgcatcttcacctccatccaggagactggtgactttatgatcatcctcactttcattgcctctacctttgccaattcggttattctgggccagctgatctactactggaacaaacccgctggcgtcaaggtgaaggattcaaaggccaagaagccgaagaccaagaaggatgactaagcagtgcggatagaagtaacaaaagtagaaacagatatacatagagagatttgaactcgaaacataggttgcaacaacttctcgacaatgtagaacaaatatgcgatgtttaaataattgaattgaataattaaattaaattgagtccta

SEQ ID NO: 7308 - protein, 252 aa, DROSOPHILA
MTDLIRQGALFLMSEKCYDNYFLYHNFLDVPCFKALLSKGLGLAIIAGSVLVKVPQVLKILNSKSGEGINIVGVVLDLLAISFHLSYNFMHGYPFSAWGDSTFLAIQTVTIAVLVLFFNGRKAQSGLFLVGYVVLMYVLNSGLTPMSVLFTIQSCNIPILLVGKLSQAYTNYQAGSTGQLSAATVIMMFAGSVARIFTSIQETGDFMIILTFIASTFANSVILGQLIYYWNKPAGVKVKDSKAKKPKTKKDD

SEQ ID NO: 7309 - DNA, 5621 bp, DROSOPHILA
acatacgcctataagcacggcatttcgaaacccgctctgtgaacaaccgcaaaaaaaaaaaattattttcaaaatctcttttgtgaattttatgttcatagttgcacccacttttatgccattatttcaaaaactgtgcataatttattaatgcacttttcccgaaatttccctaaagataaatgaaatcatgttcgaagacaaaaagagtcaagtaaaatttcattactagattttgtaatactaaaaaatttgtttcaatgcatttcttatggcccagttaccaaagtcgccgggcactacaaaataatattttagactcattagagtgttcctctccacggaaatctttagtaaaaggcgaaagatttattcgacaattgaagagaaaccagagtgactttaaatcggaaattctttgccgtaccactaagaaattgcttgaacgtgttgggaatcataatgtttgttaaacgtaagcaacccttaaattatgtttatagtagaaatattcctcatattaaactactatatccaactatgattttatttattttattttgcattaatttttcgaatttatacgaatgtgtgaatatggcacccatatatagatttcgatatagtagtcagatttataatatatgttttcaaaaagattatatatttatttataataaccaatgcatgttttattaaaatcctggcagcacaataataattaaaatcaactactttgcccattttgcgctgctttttgcctgacagaagctgccattatattattactatatatatatctacatgttattagtcttcgaattaaattcgaatataccaatcatatttccataataaagtacaacataatttctaactattataatttattttcttttatttgaactaattcaaaaatagcttaatttcccctcaaaatagacagacggtcttcactgacgatggtcggcagaatcgataaccatgtctatcgcgttatcgggccttcacatgttttgcggcgtgcgttgaaatagttcgtaaaaattatacagtaaattccgcttaaggcatggatatagaagagctgttcgactgttttgatgaagtgacgccgtcggtgccgccaccagcacttaaccaggaggagaagccatcgggaagcagtgcctccaagaaaggaaataagcgccaagcggatggcaccactgcatcgaaagaagctacatcctccaaaggagcggagggcgatgacaaaggagacgtcactgaggagcccaccaagcgtctgaagcaggaggcgtcaacggttgcggtggatgacgataataatgcagatgacgaacccactcgtaccctcgacatagacgattccgcgactctggaggccctgcggaccaggattgtcacgcacttgttggacgctcccaagtcatgcacccacgaggttgccgcccatcccgaccaggagtacatacccctaaagccgttcagcggcgtgcctgcaaaggagtatcccttcgtcctcgatccgttccagcgccaggcgattctgtgcattgacaacagccagagtgtgctggtttccgcccacacgtcagccggtaagacggtggtggcggagtatgccattgcaaaatcattggccgccaagcagcgggttatatacaccactcccatcaaggctctgtccaaccagaagtttcgcgaattcaccgacgagtttaaggacgtgggcttggtcaccggtgatgtgaccataaatccatcggcctcctgtttgatcatgaccaccgagattctgcgaaacatgttgtaccgcggtagcgagatcatgcgcgaggtgggctgggtggtcttcgatgagattcactacatgcgcgacaaggagcgcggcgtcgtctgggaagaaacgctcatccttctgccggacaacgtgcgatatgtctttctttcggccaccattcccaatgctcgacaattcgccgagtgggtctgccacctgcacaagcagccatgtcacgtggtctacaccgattatcgtcccactcctctgcagcactacatctttccggccggtggcgatggcattcatcttatcgtcgatgaaaaggggcagttcaaggaggacaacttcaccacagcaatggcagtgctggccaatgcaggtaaatcatgtgtaaagcaaattcaaacttagtttaatttccatgttttgcaggtgaggccggcaagggagatcagaaaggacgccatgggggcattaagggaaccaatgccggacaaacgaatatctttaaaatagtcaagatgataatggagcgcaattttgcaccggtcatcattttttcgttcagcaaaaaggactgcgagatctacgccatgcagatggccaagttggacttcaacactcccgacgaaaagaaactagtggacgaagtgttcaacaatgccatggacgtgctcaccgaggaggatcgtcgcctgccacaggtggaaaacgtgttgccgttgttgcgtcgcggcattggcatccatcacggcggtctgttgcccattctgaaggagaccattgagattctgttcggcgaaggtctgatcaaggccttattcgccaccgaaacctttgcaatgggccttaatatgccggctcgaactgtgctgtttacggctccgcgtaagttcgatggcaagaaattccgatggatcagctctggcgagtacatccagatggcgggacgtgccggtcgacgtggattggatgacaagggcatcgtcattctcatgatcgatgaaaaagtttcgccggctgttggtcgtgacattgttcagggcaaggcagatcccatcaattcggccttccatcttacatacaatatggtgctgaatctgcttcgtgtggaggaaatcaatccggaatacatgctggaacgcagtttctatcagttccaaaatcaagctgcactgcccggcctgcatgaccaggtggagcagaagacgctggagctgaataagctgactatcaaggacgagcacaacattgcctcctaccatcacatacgctctcagctggatcaacacggcaagcagttccgtcaatggataacgaagccgcaatacctattgcccttcctacagcctggtaggttggtcaaggtggccgccggctcacaggagtacgattggggcattgtgctgaacttcaagaaacaagaccaaagccgcaagaaccctttaaaggcggagcccagcgtcacgattgatgttttgctgcacgttagtgaagcggccgccaaaaccggcgacacggagccatgcaaaccgaacgaacgtggatgcatggaggtggtgcccgtggcccacaccctcatcacccagatcagctcaatccgcgtgtacttccccaacgatctacgcagtgctgacaatcggcgagccgtgctcaagactatccaggaggccaagaaacgattccccctgggaccaccggtcctcaatcccatcgatgacatgaacatcaaggatcgagagttccgcgatattgtcaataccatttcccaatttgaaaagcgattggaggagcatccgctgcacaagtcaccggaattggagcgcatccaccggcggtaccaggacaaggtgacgctacaaaagcagctgcaagacctaaaggccgagctaaaggctgcccgcagtctgctgcaaatggatgaactgaagcatcgcaagcgtgtgcttcggcgcatgggctactgcaagcctggcgacgttatcgagttcaagggtcgtgttgcctgcgaactgagctcggcggatgagcttctcatgaccgagatgatcttcaacggagtatttaacgacctcaccgctccgcaagccgtggctctactctcctgctttgtttgcgacgagaagtccagcgagtcggtgaaaagcgccacggagctatcgggcccactacgttcgatgcaggatctggcgcggcgcattgccaaggtgtccacggaatgcaaactcgatctggacgccgatacgtatgtggacaagtttaagcccttcctaatggacgtggtgctggcgtggtgcaagggctccagtttccttgccgtctgcaagatgaccgacatcttcgaaggctccatcatccgctgcatgaggcgactggaggagcttctgcgccagatgtgccaggcctcgaagaccattggcaacacggacctggagaacaagttctccgaaggaataaggctgctcaagcgtgacattgtctttgccgcgtcgttgtatctgtaagattctaggaaaatctattttaaggcctaacttccacttccgttccaatcgtattttattgaaatcggatttgttctttagatccattaagctattttctagcttgatgtttggttatagatttagttttgaaacacaaacacgaataactctgctataagatttccgaaccttgcaattattccttgatttaacatatcgactcaaaaggtcgaaatatttgaaccctaacaacctttgtaaatttatttaatgataaaatgttaattttatccacggttaataaaataaatatgaccatgagatctaacatctatttacttagaaatcacgtttgttttatttcaaagccacaacagtgaattcaaatttgtcataattgataatgtggatattcaaagcatttgcgaaaacaacattgagtaatgtaaaaatatttatttatggacaaatacataaaacttatctaaagtacatataaacatataatgtggtaaaaacaatatgctttcaatcgtgtaacaaatgatgatatatacaggaaaaacaatgtacacttttgaaaacataagttattggacggttcacactgattttgtatggtcattttgcttatatgcgacacacagaacatatagaacatatatagtatataactaggagtacatttatgtatgtatgaaaggcacacttagttggtacatcatggatggggtgggtgggtccatcgaggacaattaccaaatattattaaggcactgtaggtgtattgctcttgatgatgtgtgggagtggctacgatctaatggtattctaatgatattcttataatacgggacgtgacaatgttatgagtttgttatcaaataatagcaggtcttaaataatgtaatgcattattttttataaggttaatttatttttgtattttaatatttgatttaaaagatatactctctttacaatttcattcgatattactgccactaaaagtgagttttaaaaatttaagctcagcatttgttataaaaatacttgtattatatagctaatttccttcagttaaggcaggcaatttcctagatttaaataattcttattatacatttaaattctatatatacacgtaaaggccgatgataaggctatggaatgtcattgatatggatttgtattcgttgggttatcaaacttacgaacaatttaacttaaagtaaggcattagaaatacaggtttgcctaaactacaactcaaaactgagatctcaaagatctgtttacaaacctatcataaatacaaaacataaactacttttttcgaaaataac

SEQ ID NO: 7310 - DNA, 3568 bp, DROSOPHILA
cgggccttcacatgttttgcggcgtgcgttgaaatagttcgtaaaaattatacagtaaattccgcttaaggcatggatatagaagagctgttcgactgttttgatgaagtgacgccgtcggtgccgccaccagcacttaaccaggaggagaagccatcgggaagcagtgcctccaagaaaggaaataagcgccaagcggatggcaccactgcatcgaaagaagctacatcctccaaaggagcggagggcgatgacaaaggagacgtcactgaggagcccaccaagcgtctgaagcaggaggcgtcaacggttgcggtggatgacgataataatgcagatgacgaacccactcgtaccctcgacatagacgattccgcgactctggaggccctgcggaccaggattgtcacgcacttgttggacgctcccaagtcatgcacccacgaggttgccgcccatcccgaccaggagtacatacccctaaagccgttcagcggcgtgcctgcaaaggagtatcccttcgtcctcgatccgttccagcgccaggcgattctgtgcattgacaacagccagagtgtgctggtttccgcccacacgtcagccggtaagacggtggtggcggagtatgccattgcaaaatcattggccgccaagcagcgggttatatacaccactcccatcaaggctctgtccaaccagaagtttcgcgaattcaccgacgagtttaaggacgtgggcttggtcaccggtgatgtgaccataaatccatcggcctcctgtttgatcatgaccaccgagattctgcgaaacatgttgtaccgcggtagcgagatcatgcgcgaggtgggctgggtggtcttcgatgagattcactacatgcgcgacaaggagcgcggcgtcgtctgggaagaaacgctcatccttctgccggacaacgtgcgatatgtctttctttcggccaccattcccaatgctcgacaattcgccgagtgggtctgccacctgcacaagcagccatgtcacgtggtctacaccgattatcgtcccactcctctgcagcactacatctttccggccggtggcgatggcattcatcttatcgtcgatgaaaaggggcagttcaaggaggacaacttcaccacagcaatggcagtgctggccaatgcaggtgaggccggcaagggagatcagaaaggacgccatgggggcattaagggaaccaatgccggacaaacgaatatctttaaaatagtcaagatgataatggagcgcaattttgcaccggtcatcattttttcgttcagcaaaaaggactgcgagatctacgccatgcagatggccaagttggacttcaacactcccgacgaaaagaaactagtggacgaagtgttcaacaatgccatggacgtgctcaccgaggaggatcgtcgcctgccacaggtggaaaacgtgttgccgttgttgcgtcgcggcattggcatccatcacggcggtctgttgcccattctgaaggagaccattgagattctgttcggcgaaggtctgatcaaggccttattcgccaccgaaacctttgcaatgggccttaatatgccggctcgaactgtgctgtttacggctccgcgtaagttcgatggcaagaaattccgatggatcagctctggcgagtacatccagatggcgggacgtgccggtcgacgtggattggatgacaagggcatcgtcattctcatgatcgatgaaaaagtttcgccggctgttggtcgtgacattgttcagggcaaggcagatcccatcaattcggccttccatcttacatacaatatggtgctgaatctgcttcgtgtggaggaaatcaatccggaatacatgctggaacgcagtttctatcagttccaaaatcaagctgcactgcccggcctgcatgaccaggtggagcagaagacgctggagctgaataagctgactatcaaggacgagcacaacattgcctcctaccatcacatacgctctcagctggatcaacacggcaagcagttccgtcaatggataacgaagccgcaatacctattgcccttcctacagcctggtaggttggtcaaggtggccgccggctcacaggagtacgattggggcattgtgctgaacttcaagaaacaagaccaaagccgcaagaaccctttaaaggcggagcccagcgtcacgattgatgttttgctgcacgttagtgaagcggccgccaaaaccggcgacacggagccatgcaaaccgaacgaacgtggatgcatggaggtggtgcccgtggcccacaccctcatcacccagatcagctcaatccgcgtgtacttccccaacgatctacgcagtgctgacaatcggcgagccgtgctcaagactatccaggaggccaagaaacgattccccctgggaccaccggtcctcaatcccatcgatgacatgaacatcaaggatcgagagttccgcgatattgtcaataccatttcccaatttgaaaagcgattggaggagcatccgctgcacaagtcaccggaattggagcgcatccaccggcggtaccaggacaaggtgacgctacaaaagcagctgcaagacctaaaggccgagctaaaggctgcccgcagtctgctgcaaatggatgaactgaagcatcgcaagcgtgtgcttcggcgcatgggctactgcaagcctggcgacgttatcgagttcaagggtcgtgttgcctgcgaactgagctcggcggatgagcttctcatgaccgagatgatcttcaacggagtatttaacgacctcaccgctccgcaagccgtggctctactctcctgctttgtttgcgacgagaagtccagcgagtcggtgaaaagcgccacggagctatcgggcccactacgttcgatgcaggatctggcgcggcgcattgccaaggtgtccacggaatgcaaactcgatctggacgccgatacgtatgtggacaagtttaagcccttcctaatggacgtggtgctggcgtggtgcaagggctccagtttccttgccgtctgcaagatgaccgacatcttcgaaggctccatcatccgctgcatgaggcgactggaggagcttctgcgccagatgtgccaggcctcgaagaccattggcaacacggacctggagaacaagttctccgaaggaataaggctgctcaagcgtgacattgtctttgccgcgtcgttgtatctgtaagattctaggaaaatctattttaaggcctaacttccacttccgttccaatcgtattttattgaaatcggatttgttctttagatccattaagctattttctagcttgatgtttggttatagatttagttttgaaacacaaacacgaataactctgctataagatttccgaaccttgcaattattccttgatttaacatatcgactcaaaaggtcgaaatatttgaaccctaacaacctttgtaaatttatttaatgataaaatgttaattttatccacggttaataaaataaatatgaccatgagatctaacatctatttacttagaaa

SEQ ID NO: 7311 - protein, 1055 aa, DROSOPHILA
MDIEELFDCFDEVTPSVPPPALNQEEKPSGSSASKKGNKRQADGTTASKEATSSKGAEGDDKGDVTEEPTKRLKQEASTVAVDDDNNADDEPTRTLDIDDSATLEALRTRIVTHLLDAPKSCTHEVAAHPDQEYIPLKPFSGVPAKEYPFVLDPFQRQAILCIDNSQSVLVSAHTSAGKTVVAEYAIAKSLAAKQRVIYTTPIKALSNQKFREFTDEFKDVGLVTGDVTINPSASCLIMTTEILRNMLYRGSEIMREVGWVVFDEIHYMRDKERGVVWEETLILLPDNVRYVFLSATIPNARQFAEWVCHLHKQPCHVVYTDYRPTPLQHYIFPAGGDGIHLIVDEKGQFKEDNFTTAMAVLANAGEAGKGDQKGRHGGIKGTNAGQTNIFKIVKMIMERNFAPVIIFSFSKKDCEIYAMQMAKLDFNTPDEKKLVDEVFNNAMDVLTEEDRRLPQVENVLPLLRRGIGIHHGGLLPILKETIEILFGEGLIKALFATETFAMGLNMPARTVLFTAPRKFDGKKFRWISSGEYIQMAGRAGRRGLDDKGIVILMIDEKVSPAVGRDIVQGKADPINSAFHLTYNMVLNLLRVEEINPEYMLERSFYQFQNQAALPGLHDQVEQKTLELNKLTIKDEHNIASYHHIRSQLDQHGKQFRQWITKPQYLLPFLQPGRLVKVAAGSQEYDWGIVLNFKKQDQSRKNPLKAEPSVTIDVLLHVSEAAAKTGDTEPCKPNERGCMEVVPVAHTLITQISSIRVYFPNDLRSADNRRAVLKTIQEAKKRFPLGPPVLNPIDDMNIKDREFRDIVNTISQFEKRLEEHPLHKSPELERIHRRYQDKVTLQKQLQDLKAELKAARSLLQMDELKHRKRVLRRMGYCKPGDVIEFKGRVACELSSADELLMTEMIFNGVFNDLTAPQAVALLSCFVCDEKSSESVKSATELSGPLRSMQDLARRIAKVSTECKLDLDADTYVDKFKPFLMDVVLAWCKGSSFLAVCKMTDIFEGSIIRCMRRLEELLRQMCQASKTIGNTDLENKFSEGIRLLKRDIVFAASLYL

SEQ ID NO: 7312 - DNA, 3869 bp, DROSOPHILA
gctgatcactttcggttttgttagcgtatttacgttctcgaaagcttcgcaggaatgggtgcaaaaaaatccggcactgttttggatagccttggtaagtttttacgacttttatgctaaatattgaatacaaatatatccaatttttaaactcaggccgttcttatcgtgaccatgatctgtatggcctgctgcgaaagtgtacgccgtaagacgcctcttaacttcatctttcttttcctgttcaccgtggcggagtcgttccttctgggtatggtcgccggacagtttgaggctgatgaggtcctgatggcagtgggaattacggccgcggtggccctgggactcaccctgtttgccctgcagaccaaatacgattttacgatgtgcggaggagtgttggtggcctgtctggtggtcttcatcatttttggtataatcgctatcttcataccgggcaaggtgatcggactggtctatgcctccttgggagcattgctcttctccgtttacttggtgtacgatacccagttgatgctgggtggtaatcataagtactccatcagtcctgaggaatacatcttcgccgctctaaacctctacctggacattattaacatcttcatgtacatactgaccattatcggattgtctcgcaattagactggtcattatgatccatagcttctattccagttttagaaatgtaacttaattttatgtgcccagtgccaccttagccggaaagaaatacaagacgactaactaatccaacattgtcgagtgctcgctttggtttgggattttggctgggattggggcgcgctcaactagttcgaaccttgtccacaccgcggtgtccaattaattaatgcgcacgagaggccgtaatgtaattatgttcaatcagcccctgcagcgccaccagttcctggactggattgaatgtggacaaggtgatcggcgcgatcgtcagttgcgcgagcgtctggctaacgggcggacatggatttcgacgaggtgctgcgggaggtgggctcctttggtctctaccagaaggtcatcatctgttccgttctattgcccgccgcgctgccctgtgccttccacgcatataggttggtcatccttctttggtattctataataataatattgaaaaagaaatcttaatgggattttcacatccatgcgatagcatcatttggggtctaccttttcgcctcttaaaggtacctcatcagaaaattttcataattatctaaaatgattattttctagccagttgttcatagcggccacacctcagcacttttgtcgcgttcctgagctggagccctggacgcaggactatgtgcagcttgttaagaacctgagcattccgcgtaatcgcaatggagcctatgccgagtgttccatgtactcgagaaattacaccgatatagtgcgctatcttgagtatcgacctcctccggatttgttgcgacaacaggcagaggatttgctcaagttgcagccggatacgacgcaggtggtgccgtgccaacatggctggcactacgacaagtccatatactcaagtacggtggttcaagaggtggggattttccaattggatatggtatgttagaattatttcctcatatatcttgcagtggaacctggtgtgcgaccgcagcttccttgtgactttggcgcttgtggtcttcggtgttggcggattgctaggtaactatgtatttggatatctagtggatctgtggggcaggcggccatccttttacgcttatctgctgctcgagatcattgcctgtgcggccagtgcctttgcctggaactattacacttggttgggcctgcgctttgtggtgggactgacggtgccagctattctggcgagtccctatgtactggccattgagctggtgggaccggagaggagagttttttgcaccatcgtctcgaatatcgcctactccttgggcttggtggtattagccggagttatctatatcgtacgtgattggcgggaactcagtttggcagtgtccatgcctttgctgatgcttttctcctgcttcttcgtgcttccggaatcaccacgatggttaatggccgtgggaaaaaccaggagggccattaaaattctcaaagtaatggccagagtgaatggtgtgcgcgtaaatcgggattttgtggaacggttgcagcgaaaacttgtcatcacaagggctgcggaaaccaaatcttcaatgaccacccactatgggatattggacttgtttcggggacccaatatgcgtcggaagaccctgatcataacccttatttggtttgccaacaccagtgtctacgtgggactgagttattatgctcctgcgctaggaggcgatgagatctggaacttcttcctggctggggcggtggaactgccaacatatttgctactctggccgggattgagttatttcggaaggcgctggatcctgttcatatcgatgctggtgggcggagtcgcctgcgtggccacatttctgtacccagacatcacactgctgctctactgcgtgggcaagatgggcataagctcgtcctttgtagtcttgccgctcatggcatctgaactgtatcccacggtggtgcgaggactgggcatgagctttagctcggtaatatccatggtgggacctatagtgattcccatgatcaatcatatggtgagtgcggctcaggggattactgtttaccataatattcacccatttctcgttgcagggtcagcaaatgctcgtacttccgctaattgtaatgggagccctgctaatcttgggaggatttgctagtcttttgctgccagagacccgtaaccgaaatcttccacagactttggaggagggcgaggcagtgccactgagcttcctcctctgctgctgtgtggaaagcgagcgaaagccgaacaatatccgtgcgagtccgaagaaaaggattcttcctgaggccggaacaccggttttccatcgtgtagatactccggtttcagatagagtcccttgcaagatcgtttgcagcatttgtaaaaatgaaatgcgcacactttagtcagttactagttgttcaaatagagttggttaaaataaagtttgaaattgaaattaatttgttttgattttgtggcggcactgcgtctcttacatctggcaactctgtaccgcatgtacatacatacatacatacatacatgtgtcacagtggtgtgagctattaaaagctagaaaatctttagattatccttaggtcaaagttcaagaccaaaatgtgacaagattttagaatattttaataattaataattatattcctaataagctcttccaaatctttagcccataaaacatatttcagcaatctattgtaaaatattcaaaacacttacatacatacatatgtatatccgcagtattagctatgcacgcatgtttataaaacaagttggcaggacaaaaaatcaaaacaaaacccaattggaaacctaataaacatcaattaaatatatttgccacaattaaatatgagtttttaactctatttgacctcgtcactgataaaaatactagcatttgcattaaccttaatccgttataggtcgtcgaaatgtgataagaagccgcaatcgcttgtttatgtacaaatgagtggaaacttcaagaaacattccggttgaactggcctaatcgcaattttaagccaatttaaacgtgactcatttcgaagatttccgaccaaaaaccatatacatatttatatatatacatatgtgcatgtaccgcatgctacgactcccaactttggatttggacacataatttgga

SEQ ID NO: 7313 - DNA, 1648 bp, DROSOPHILA
cggacatggatttcgacgaggtgctgcgggaggtgggctcctttggtctctaccagaaggtcatcatctgttccgttctattgcccgccgcgctgccctgtgccttccacgcatatagccagttgttcatagcggccacacctcagcacttttgtcgcgttcctgagctggagccctggacgcaggactatgtgcagcttgttaagaacctgagcattccgcgtaatcgcaatggagcctatgccgagtgttccatgtactcgagaaattacaccgatatagtgcgctatcttgagtatcgacctcctccggatttgttgcgacaacaggcagaggatttgctcaagttgcagccggatacgacgcaggtggtgccgtgccaacatggctggcactacgacaagtccatatactcaagtacggtggttcaagagtggaacctggtgtgcgaccgcagcttccttgtgactttggcgcttgtggtcttcggtgttggcggattgctaggtaactatgtatttggatatctagtggatctgtggggcaggcggccatccttttacgcttatctgctgctcgagatcattgcctgtgcggccagtgcctttgcctggaactattacacttggttgggcctgcgctttgtggtgggactgacggtgccagctattctggcgagtccctatgtactggccattgagctggtgggaccggagaggagagttttttgcaccatcgtctcgaatatcgcctactccttgggcttggtggtattagccggagttatctatatcgtacgtgattggcgggaactcagtttggcagtgtccatgcctttgctgatgcttttctcctgcttcttcgtgcttccggaatcaccacgatggttaatggccgtgggaaaaaccaggagggccattaaaattctcaaagtaatggccagagtgaatggtgtgcgcgtaaatcgggattttgtggaacggttgcagcgaaaacttgtcatcacaagggctgcggaaaccaaatcttcaatgaccacccactatgggatattggacttgtttcggggacccaatatgcgtcggaagaccctgatcataacccttatttggtttgccaacaccagtgtctacgtgggactgagttattatgctcctgcgctaggaggcgatgagatctggaacttcttcctggctggggcggtggaactgccaacatatttgctactctggccgggattgagttatttcggaaggcgctggatcctgttcatatcgatgctggtgggcggagtcgcctgcgtggccacatttctgtacccagacatcacactgctgctctactgcgtgggcaagatgggcataagctcgtcctttgtagtcttgccgctcatggcatctgaactgtatcccacggtggtgcgaggactgggcatgagctttagctcggtaatatccatggtgggacctatagtgattcccatgatcaatcatatggtgagtgcggctcaggggattactgtttaccataatattcacccatttctcgttgcagggtcagcaaatgctcgtacttccgctaattgtaatgggagccctgctaatcttgggaggatttgctagtcttttgctgccagagacccgtaacc

SEQ ID NO: 7314 - protein, 538 aa, DROSOPHILA
MDFDEVLREVGSFGLYQKVIICSVLLPAALPCAFHAYSQLFIAATPQHFCRVPELEPWTQDYVQLVKNLSIPRNRNGAYAECSMYSRNYTDIVRYLEYRPPPDLLRQQAEDLLKLQPDTTQVVPCQHGWHYDKSIYSSTVVQEWNLVCDRSFLVTLALVVFGVGGLLGNYVFGYLVDLWGRRPSFYAYLLLEIIACAASAFAWNYYTWLGLRFVVGLTVPAILASPYVLAIELVGPERRVFCTIVSNIAYSLGLVVLAGVIYIVRDWRELSLAVSMPLLMLFSCFFVLPESPRWLMAVGKTRRAIKILKVMARVNGVRVNRDFVERLQRKLVITRAAETKSSMTTHYGILDLFRGPNMRRKTLIITLIWFANTSVYVGLSYYAPALGGDEIWNFFLAGAVELPTYLLLWPGLSYFGRRWILFISMLVGGVACVATFLYPDITLLLYCVGKMGISSSFVVLPLMASELYPTVVRGLGMSFSSVISMVGPIVIPMINHMVSAAQGITVYHNIHPFLVAGSANARTSANCNGSPANLGRIC

SEQ ID NO: 7315 - DNA, 3936 bp, DROSOPHILA
ctgtatctgtagttgtagttcttgtattcgattgctattatagttggttgtgtgctcaaatatctaaggcccaacagggcaagctcagaacaaatagctttggggttgaggggcaaggggcagtagcaggggcatggcgcaatgggtctagggctaaagggtctagggtcaagggttaaaggggcacggaacggaacgcgggtctaaggtcgtcgcgatgccattcaattcgaattgactggactggatcgaatttcgatactgctacactcgccgaaggaattggttgaatggttttgaataatttgtgtaaaatgaacgatgaaccaaaacactagttatgtaacaacagccaattgcaacttattcataatataaacgcacaaaatataaaccgaagactacaaacgaataaatgtaagtaatcaaaattatttcggtattcaaattttgcacagtacccaattcaaatggaaaatcaccgcctcaactcgaagtgaagtgaagagtctgatgtgggatatgcttcaatcgactctgcttccacatatgtacatacatacatgtatccataaatgtgcttatcccgctaaattcgacacattcgaggacaccgacagagagacggacagacggacggacggacggacggactcattggggaaaaagaggtttcgaagcacctacatatgtatatgataatgttcgttaagaagtatcgcaggatcgcaggatcgcagactcgggtgaaaactacgagtttcgagagaatatcagatctgatctggtgaggtggattcgaaataaaagcacagcaaactcgatatacggtaggacgaaagcaactaatctctgcgatagaaatagtggaaacaatacttttatacatatgtatatatagtcatgacacgttatggagcagtagtataatatgtatataagtatatgaaaatcgaggtgtggtcaggcctcataacgctttcttcgatttggttttgaactagctctgtgtaactgtcgcaacaccacgttctccacgttttctctccaggcacttcggatgcttcgcactcaccttgtcgggcgccgagatgtccgcggatcgtggtgtctcctcactaatagtcggctcgttcggcggcagccgttgctcctgcacgctggccaagctgtcaaatgcaaaacaaaaggacaatgagctcctcatttcgggcacggggggggcaggatgaagggcgaaggacaaaccgtttgagcgtcaccagtgtgccggtcagcttcttgcagcgacgtagcgccgactccaaacggtcgggctcttctttgaggaacttttcttctcgcaccactttctccatctcgttagacaggatgcagcgcaagccattcgacagggatgggaactttagcttcagctcggcgacggttttgctaaaaaggaacttgtttattgttcgatcctgggtcatattcgaccactcaccttgcccggctcagcaccagagccatgtcttccacggccgtcatgttgacgcgtgttcgccggttaatgacctcgccgcgcaggttctcaacagacccctccaggtcgctgaggtccttctccaggcggattacttcttgcttgtagagctcctcctcccgcgaaatgcgtgtggcgtcctggtcgccctggtgatcccagaagctgccgctgctcgccagcagagtagcgcgaatccgcatgaaggttcccttgatgtcttcgcgcacggcaacagcctgggcctgcgagaggcgcctcagggtgcgcacctccatgcgcaggtccttggccttcttctgcaggccgcgcaaatggttgtacacctcaggagccagggcaatgtccgcccggtagttgggatgagcggtctgggctagcacgatcggcttggggggcggaggaggctttagtcggtcacgctctgtggagggagggaagatggtcaggagagcactcggcgaattggggaacttgttaatggacaaatgtggctgatgcaggcgtgccgtgttcttaccttgggacgaggtgcgtggaagagtggacgacttgattgccggcttggttggcttcgtttcggctgtaaagaccacgcccatttcggaggcagtgagttgcagtggtgagaaagggaaacgaatggcttgcattgtgtctaggaagcgtttcacccacaccaatcaaccgcactcagaataaaattcgctctaactttaataatcgccacggtttattatcactttttttttgtaaattttctttctttctagtatgctcgtccatgggattatctcagtttttgattgatttttattctgagtgcaaggctgtacatataaataaattaccggcatgtaggggattgtgagactttggtattccctgtatgtcatcgctaaatgacacggacttctcaaaggacacggatttttctgcaagacaaggacaagacaatatgtgacggcttttcagaggctgcaaaggattgggcctccggttccggcgacacttacggcacgagtttttgcccagcttgggagctttctcccgaatgtacagctcatccccggagccgttggctgcgcggcgtgcggaagagagaacaaattagacatgtagttagaggggagagaccgggtgcaaggagtctggaagttgggccatgtctttagatctacaaagcggtgctacaagccaagcgagtgccgtggacaacattcagggattgcagggactcatattcgtaccttgcatctgcgacggcacgaccagatagtttgggtccagagtgggcacggccagcggggcaatctgggggttctggttaacgagggccttctgcactagtcccgtcaggttggccagctgcctttccatgtgctccacacgaatccgatgcaagtcttcgggcctgcaagtgcgtaagcaaaaagtcaccaaatcagtacaaaactcaaaaacttgtctccaggtgttgcgtgcttggcaagcagcgatcattgggccacacatccgctggcaccacatcgctccaattgcgcagccaagcctaggcatccgacatcagagcatagacaccggaattggatttggtatccaagtcgaagtcgaagtcgaaacgcgggtcgcagcacttagcgcatgggagcgtgaaccaaaacagcaagaatgcagctgcatgactgcataagctgctattcgacttctttataccctaacctgcgctgcgctgtgctgtcaggccgctcatctggtccaatataccctccgtctcgtttggccgttggaggcagcgaaaagtaagtccgtgctagcacgcaatgtcggtgccaatccgctttcgcagtcgacgagttggagctgcgcaagaaccaccaagagctgcccgcaaagacatgactacatgcagtggtatgtacgatgcaattctattcgattgggaaacccagtgtcagtggactcatgaccaatccgaacagtgaccagcacaccagcgcggtttgcccgctgcctggctaacttccaggtggacgagctgctgctgttaaagaagtccgtgatgagtatggaggcgctggataagaacgatagtctccagccgactacggaatgcccacagatggcgccggatggatcgccactgccagagcgaatggccttgatggccgcagatcggtaagcctgctttccattagttcacaacatgaagctttactagatgattgcaggggtgagcacgacaccactggctcccatggtccctggcactcccatccacacgcgccgacttcctggaccgaggaaaagccctcaaagttgcagaccctattccagatcagcattacggccctggcctttctctccttcggcggctatctactctgcctaatcgtgcaggccatcaagagcaa

SEQ ID NO: 7316 - DNA, 1192 bp, DROSOPHILA
gcccgaagacttgcatcggattcgtgtggagcacatggaaaggcagctggccaacctgacgggactagtgcagaaggccctcgttaaccagaacccccagattgccccgctggccgtgcccactctggacccaaactatctggtcgtgccgtcgcagatgcaagccaacggctccggggatgagctgtacattcgggagaaagctcccaagctgggcaaaaactcgtgccaaaaatccgtgtcctttgagaagtccgtgtcatttagcgatgacatacagggaataccaaagtctcacaatcccctacatgccgccgaaacgaagccaaccaagccggcaatcaagtcgtccactcttccacgcacctcgtcccaagagcgtgaccgactaaagcctcctccgccccccaagccgatcgtgctagcccagaccgctcatcccaactaccgggcggacattgccctggctcctgaggtgtacaaccatttgcgcggcctgcagaagaaggccaaggacctgcgcatggaggtgcgcaccctgaggcgcctctcgcaggcccaggctgttgccgtgcgcgaagacatcaagggaaccttcatgcggattcgcgctactctgctggcgagcagcggcagcttctgggatcaccagggcgaccaggacgccacacgcatttcgcgggaggaggagctctacaagcaagaagtaatccgcctggagaaggacctcagcgacctggaggggtctgttgagaacctgcgcggcgaggtcattaaccggcgaacacgcgtcaacatgacggccgtggaagacatggctctggtgctgagccgggcaagcaaaaccgtcgccgagctgaagctaaagttcccatccctgtcgaatggcttgcgctgcatcctgtctaacgagatggagaaagtggtgcgagaagaaaagttcctcaaagaagagcccgaccgtttggagtcggcgctacgtcgctgcaagaagctgaccggcacactggtgacgctcaaacgcttggccagcgtgcaggagcaacggctgccgccgaacgagccgactattagtgaggagacaccacgatccgcggacatctcggcgcccgacaaggtgagtgcgaagcatccgaagtgcctggagagaaaacgtggagaacgtggtgttgcgacagttacacagagctag

SEQ ID NO: 7317 - protein, 385 aa, DROSOPHILA
MERQLANLTGLVQKALVNQNPQIAPLAVPTLDPNYLVVPSQMQANGSGDELYIREKAPKLGKNSCQKSVSFEKSVSFSDDIQGIPKSHNPLHAAETKPTKPAIKSSTLPRTSSQERDRLKPPPPPKPIVLAQTAHPNYRADIALAPEVYNHLRGLQKKAKDLRMEVRTLRRLSQAQAVAVREDIKGTFMRIRATLLASSGSFWDHQGDQDATRISREEELYKQEVIRLEKDLSDLEGSVENLRGEVINRRTRVNMTAVEDMALVLSRASKTVAELKLKFPSLSNGLRCILSNEMEKVVREEKFLKEEPDRLESALRRCKKLTGTLVTLKRLASVQEQRLPPNEPTISEETPRSADISAPDKVSAKHPKCLERKRGERGVATVTQS

SEQ ID NO: 7318 - DNA, 4101 bp, DROSOPHILA
tcgtaatataaggtattttcattgttacctttattacaaaagtggacttaaaggacataagtttccaaaatcatttagtatgcctaaatttgagttacatttgtatcttcacccgtacatatggtcaccaaacatttgcagatgagtgtaagctgcgcagtactttaatagcgcccctcgtaggcctaactaaatgcggcgattacttggacgacccgcgatcgcaccgcacttaagtatggagaagcgcaaaaagtgaccaaaccggcttgccaaccgctctctgcttcttgcccatccgcatgcggctccagaaactcggagcgcagctttcgcgaagccaccgtcgcgtcacggccgccgtcgtggtcgtcacacatgcgcagcagctgatgcgcgagcgctgaccttgaccctcaattggagtcgcagtcgcttgcagacttgttgccaagtgcagccggcaaagttgaagttgccaccccaccccgggaccgctctctcttcctcttgctctctgcctgctttttcgcacagccagttttcaccattagcggcgactgtacctcgcagcacgctgtacgtccatacatacgtatgtatgcattcacttagcgcgcgcgtatgtacgcatgcatgtgtgtgtgtgttgtgtgtgctggtacgcgaactgcacacagaaaagaacagggcaggagagcaaagaaagcggcgtgagcacatagcgaaaagagagcccccagccccatattccatccagccatcgccatcagctgcctgcgccatgtgttcccgcagctgcagttgtgaaaatcgccggtaaactggttgcgcgagcgagatggagagagtgcgaaagcgggcgatcgctctctcccgctcaggggcggagatgcctcaaattggcagggggcctaatgaaagatgttaccctggaagacgctgcaagaattaccccaaagacataacacatggtgcgggattatttttttttttgtctcaaatcagcagctccagcattttaatttacaattaaaaaacaatcacagtgatatttgaattttcatttccttcatcgtacgtaggtttcggtctcgcatcttttgtgtcccgtccgtccaactgaactgaactgaaggtgtgtgtgtgccgttgtcttcttcatctgcccactgagtgttctgagtgccgcttgcttgtctgcttctttaaccgcttagctcatcctctccagcgttgcgttccgttttcaaagtcgtcgtgtatgtctaccattgttgatgttctcttcttgttatttgtctgcttctctgttcttgtttgctgccccctttggctccacagctatgagctacatagcatgctaccccgcttgagagatcttgccaggcgtcttggctgatgggtgtgtggtatggtatggatgtggatggagttaatggtataggggtgggatactggttactgtctacagatcctgtcttacagtcttagatcctggataattcccaaggctcgccggcagcagctggatggagtggagttgagtggagtcgagtggtaacgtggcctgatcttctagccgcctgattcttcgctttttcattggtttttataatttttatttacgtttttctttcggttgtttctggctgtggaactcctaataggatcatttgctttaaatagtattctttaaggtatttttctttatataatcttatatagtttcattccattcgttataatgtaattagtaaattcaaacacttgcagcataatcatataatcatataggtataattatagtagagtggtttgcttggtgatttcttttgttgttgctgttgtggtttagtctcatcttacaaattgggtcgtcgtgtcttcttcctcatcttctacctcatcctcttcctcgtcgtcggtgtcatctgctctctcggctgcacagctgccgttggctatcgtcttctggttctgctcctccgacccccgctcgaggagcctttgccctcttcctcctccgtgattccttttctggcggctttccctcggaaagccaatacttcttgtcttctttcagttctcgggacgttggcaccgcgctgcaggctcggcttttggaatcagcgatggttactggatgatgttcaggattatggattcatatgctgcatgtgttaatggagggatgtggatgtggttgtgggttctttattttgaaggggttgatcttgacttgggtgctgctgctatcgcttctagatgttgttgctgttggctggctttgtgaatgttgtagcaaattgatttttcgtttttttttcattttttttcgttctcatcttttcttctggttgttcttcgtgtgttgaattattactcatattcctccttcgatgattacatttatgaggtgccacgggtgggtggtggcgcctagttccgtccgcccttctcgtcgcactcgcgcctcagatgtccgctcttgccgcagccgtagcaagtcttcgaggtctccgggcagttcttggagatgtgtccggtgcggttgcacttgtagcacgacacattggtcggtccacgttcgttgacggcctctgggcagttgcgcacccagtgtccggtcttgttgcaacggtagcaggtcgggttgtccgcctgggtgcagtccttcgagatgtgcccgatgccgttgcagcggtagcagcgctcggcctcctcagggcaggcacgtgcgaagtgcccaaattggttgcatttgtagcacttctcgcggttgcgacgcatgccgccgccatcgttgccgcgcataccgccgccgccgccaccaccgcctcctccaacgccgcccggacctccgccgccgccgagactgcagtcccgggcaaagtggcccggccggttgcacttgtagcacgtggcagacatcgacatctttgcttcggttttggttagactactgatccgcaaatccgactccgcttcttaaactcaacttctcaacttcctcacacactcactggtaaccacgggccctcgagcactacacactgcttgcgctggatgcgaaaaaatcacacagaccaacaggatctccggcttcctcagatttcctcgccgtattttcgacgccaaaagttaaaatggctgccgctgagcgaatgagtaccgatttgctgtggtatcgactactcgccagagttgcttcggctacgcttgaatacaacactgaccctccacgcggtgcacattggttcgaggatatgcgatggtgaggcgaaatgtcagtctggaattgtgtagtgtgctggtgtcgtactacttccactcggcgtgctttgtctcacagaatctacatttccattttgctttctcacttggcgtgtttagcttttgtctcgtgtcctccatatttaggaggcactacataacccaattttgcgaactcgattttgccactttataaccacacgtaaccagtgtgtccgtggtgatggactgcaacttatcggctcagtcgttaggagtacccctggcaaagggctatcgaaatatatatctttaaatttataaggaagtccattcaaataattgttttattttaattgtttggacacaacatacgttcacctttttgaaattggctatttgcagaaattgatatcgattgacacattaggggtgcttagcaaagaatagctaactgaagacttcataagagaaaacgtaatactctaataatagaaaagcactcagattacgtaacaactaataaaatattttatgtgcatatatataaaacgatttatcaaaagaacctggctttgtcaaaaaatcgatatttcatagtggtgtacatttttaaggactttcacaaataatacgctgagtacacttatattattgttatattatcccaaatattgggcagcacgattttttgaaatctgggtgacatcgattactatatgaaaagggtattcctgcttatcagtatttgcagagaaaaggaattatgaataatatttacctcaaaagctataaattagataaagtcataataatttactttactatttattaactatattaatt

SEQ ID NO: 7319 - DNA, 2101 bp, DROSOPHILA
agatcctgttggtctgtgtgattttttcgcatccagcgcaagcagtgtgtagtgctcgagggcccgtggttaccagtgagtgtgtgaggaagttgagaagttgagtttaagaagcggagtcggatttgcggatcagtagtctaaccaaaaccgaagcaaagatgtcgatgtctgccacgtgctacaagtgcaaccggccgggccactttgcccgggactgcagtctcggcggcggcggaggtccgggcggcgttggaggaggcggtggtggcggcggcggcggtatgcgcggcaacgatggcggcggcatgcgtcgcaaccgcgagaagtgctacaaatgcaaccaatttgggcacttcgcacgtgcctgccctgaggaggccgagcgctgctaccgctgcaacggcatcgggcacatctcgaaggactgcacccaggcggacaacccgacctgctaccgttgcaacaagaccggacactgggtgcgcaactgcccagaggccgtcaacgaacgtggaccgaccaatgtgtcgtgctacaagtgcaaccgcaccggacacatctccaagaactgcccggagacctcgaagacttgctacggctgcggcaagagcggacatctgaggcgcgagtgcgacgagaagggcggacggaactaggcgccaccacccacccgtggcacctcataaatgtaatcatcgaaggaggaatatgagtaataattcaacacacgaagaacaaccagaagaaaagatgagaacgaaaaaaaatgaaaaaaaaacgaaaaatcaatttgctacaacattcacaaagccagccaacagcaacaacatctagaagcgatagcagcagcacccaagtcaagatcaaccccttcaaaataaagaacccacaaccacatccacatccctccattaacacatgcagcatatgaatccataatcctgaacatcatccagtaaccatcgctgattccaaaagccgagcctgcagcgcggtgccaacgtcccgagaactgaaagaagacaagaagtattggctttccgagggaaagccgccagaaaaggaatcacggaggaggaagagggcaaaggctcctcgagcgggggtcggaggagcagaaccagaagacgatagccaacggcagctgtgcagccgagagagcagatgacaccgacgacgaggaagaggatgaggtagaagatgaggaagaagacacgacgacccaatttgtaagatgagactaaaccacaacagcaacaacaaaagaaatcaccaagcaaaccactctactataattatacctatatgattatatgattatgctgcaagtgtttgaatttactaattacattataacgaatggaatgaaactatataagattatataaagaaaaataccttaaagaatactatttaaagcaaatgatcctattaggagttccacagccagaaacaaccgaaagaaaaacgtaaataaaaattataaaaaccaatgaaaaagcgaagaatcaggcggctagaagatcaggccacgttaccactcgactccactcaactccactccatccagctgctgccggcgagccttgggaattatccaggatctaagactgtaagacaggatctgtagacagtaaccagtatcccacccctataccattaactccatccacatccataccataccacacacccatcagccaagacgcctggcaagatctctcaagcggggtagcatgctatgtagctcatagctgtggagccaaagggggcagcaaacaagaacagagaagcagacaaataacaagaagagaacatcaacaatggtagacatacacgacgactttgaaaacggaacgcaacgctggagaggatgagctaagcggttaaagaagcagacaagcaagcggcactcagaacactcagtgggcagatgaagaagacaacggcacacacacaccttcagttcagttcagttggacggacgggacacaaaagatgcgagaccgaaacctacgtacgatgaaggaaatgaaaattcaaatatcactgtgattgttttttaattgtaaattaaaatgctggagctgctgatttg

SEQ ID NO: 7320 - protein, 124 aa, DROSOPHILA
MRGNDGGGMRRNREKCYKCNQFGHFARACPEEAERCYRCNGIGHISKDCTQADNPTCYRCNKTGHWVRNCPEAVNERGPTNVSCYKCNRTGHISKNCPETSKTCYGCGKSGHLRRECDEKGGRN

SEQ ID NO: 7321 - DNA, 3888 bp, DROSOPHILA
tttcctttctttttcgaaatttagcctgctcattgaaatgaattattaacttgcttatttttggcaagctaaattattgatcagctggcctttgcagctattatttgtgttttacttttttttttgctagcaaaactattgattgaaaaacacaagagagatatatgttgcttgtagttaacaaatgcgtttacattaagaccgctgaataattgattttgaaactcaggagattcattgagtttttttttctcatttaaatccataacaaattgactttaagtgctgacattaaggcaactgcattattgattttaaataactggggatctctttggacgaatatacactgtaataggcagatttattgccgactcaccggcgccttagaaattggagtgtttgcaaccttcgatatatgcaaatttcgcaggagaaaaaaaaagggaaaatattcaagcgaaggcaggctgacattgttatgggagcatttctgacagtttcatttcctctttctttattttttttttaatttctatgtagcttcctacaacaaaattcattttgtgcaaaacgaaaagcggaacgcaaatgttattcctggataatcgcgtcattagagggcattaaaactgattcgacgaagcggtgctaacgaagaaatgcaaatgtgttcattagtttcttctgtcgtgggcatatgtgtcggatacgtgatatagccaaatatatcactcatacgcactggtgacagcgcgttgttgatacgcagttgcagtgttgcagtgactacaaccccttaaatactcaaagataatggacaaatatctggcaagtgtattgcggatccatcatgattatatccctaatttatagtgctataaattaaatgctaattacctgtaaaggggctgaggcagcccagcaggcatagggccaaaatcagctgggcgagatagtcagttggcagccaaagcaacgacgtcattggtggcggccacgcccccagtcgaccggccgccttaaggcgttgcaagtacgattgttgctgttgcttttgcttttgctgctgcatgtttcgtattgctgctgttgttgttgttgtgcagcagcctcgttgacgtcgccatgtcgtttggggcccattgattgttattgctttggttgctgctgctgttttgattggtgttgctgccgctgttgttgttgctgttgctgttgctgctgctgctgctgcctttgtcattgtcaggcgttgattttgaacttggcggcggcgatggctgtgggagctgcacttgcagcaaatgttgctgttgcagttgcctggcttacttcttatgtttgctgttgcaattatcctttttgtactgctgcttcttcttggcctgtccttgcactctgtgtgcgtgtgtgtttcggtgtgtggagaaaggtgatatattattggaaacttcaatcaatttcatgttgtaaaacagtgtcttaaatgtactagttacaattcagttttatattatttgaatatggttgaaaaaaatatccaaaacaaagtgtttgaatgaatgcaattccttttagactgatttattgatagatcgcatagttggctgcatttattaattgtgtgcctcagagatttttgattgaatttagttgattttgttcgatataaaataaaataccatgctctagtgtttacattatatcagcaaattctgcccactgttctgttggccaaaaagtttctctgcattgtgtcgacagacagtttttggcagcaatttcacctctgcctctttgtgtgtgtgtgtgtgtgtttttgcgtttgatggtgggcattttgcagggggtggttgcagggggcggcggatcagctgttcggcagttccgtgtttggcagccgaattgcttgtttacaaagcttcttggggcattttcattttcatttttttttgccatattttttggctctttgcggctgccaaaaacagaaaagtgcacacacacacacacacccacatacatccagtgcttaattcgaatcgtgtaatttattatttgcatgtcctgtgcgccaaaagagagcgacaagttcgagtttcacttcacgccgttttatggattttcttacaaacacacactcatacacacacacacacgcacacacaggggcacacgcgtacccgcattgattttcccttttctatttcgttttttttttgtttttttttttttgctatttttgctcttttcaaggctctgctacttacatctcacgtaaattgtttaactttgacaccaacaaaatttcgcacgcaagcactaaaaatacttgaaaaaaaaaaatgaagggaaatgtgaaaacaaaacacagcacgaatttcccagccagcgagcagcagtggcaagcagctagcctacacaccagcccaccgcgcccccttcccacgattttcccattttccgagtcctttttacaaccgactgtttgctgattgctttttgcccaccgtcttttgtgttgccttttgttgattttgttgatttttgctgctgccactacgctgctgctgctgctgctgctgctgctgcaactgcaactgcaagtgtgacgaaccactctctcactcccagtacgctctatgcaatccgggcaagattccgattccgattccgattcggattgcgattccgataccgattccgattccggttctgattccggccagagccaccgactgcagcgtgggagagtcaagagccaactgacggcgcgtcgacgaggctgcgccccaacaaatgttgctggcgttgggcggtagcaacatcggctcgccactatagcaacattgacgttccaacagcaacatttccgtggacaacacaacgtgttgtaagcttttgctcgattcgaaagggttcatagcttttgggaaacattcttagtgttctttcgaaccagccaagagctttttagttctgaattagacacatgatttgattccggttttaaggagggcttgagcttttgcaaaagcttaatagcgtagctcagaaacacagcaccggaaataacgttagctttcaaagagaaaaaatcccgccaaggatcacatttaaattaaataaaaaagtgaatcttatggctgacttatgagtaataattcaacaatacaatttatgtacatgtaatgaagaattttttatataaatggaattatttcaactataaattataacactaaaaactgaaaaatgaagggaattccgaaatttaaaaattattttgcaaacttataaagattaatattttcaaaatattcagctttactcagctctttgtcccaataaaagcgtacagaacattttttaataagtagtttggaaatgattttatttcaatatatttcatattcattcattagttcatattttctgttttatacttttacacaaaaatacttgtgtgtgtgtgtgtgtgtgagtgtgtccgtgtgttcgtgtttgtctcgtaggttcttctattggtattggtgtgtccttgagtagtcctttgctatctcggtctgtctgtctctgtgtgtttattttttttctgtatgtattgtagttgtcttatatgccattaatctgagttggacataactaagtgttaaatacaagttgagttatctcatttaaatatttgtttaccatttaaatgcattttcggaaaagtttcattgaatttctcgcttcttagctgatttattagttgtatacccatgttgacttttctgtgtgggtgactcagcgatatttgattcatttatttagggggtgccaagagctttttacatctaaatctttttaggcttgtatataggtgtgtatgtatatatatat

SEQ ID NO: 7322 - DNA, 769 bp, DROSOPHILA
atgaaccctttcgaatcgagcaaaagcttacaacacgttgtgttgtccacggaaatgttgctgttggaacgtcaatgttgctatagtggcgagccgatgttgctaccgcccaacgccagcaacatttgttggggcgcagcctcgtcgacgcgccgtcagttggctcttgactctcccacgctgcagtcggtggctctggccggaatcagaaccggaatcggaatcggtatcggaatcgcaatccgaatcggaatcggaatcggaatcttgcccggattgcatagagcgtactgggagtgagagagtgtatttttagtgcttgcgtgcgaaattttgttggtgtcaaagttaaacaatttacgtgagatagtgcaaggacaggccaagaagaagcagcagtacaaaaaggataattgcaacagcaaacataagaagtaagccaggcaactgcaacagcaacatttgctgcaagtgcagctcccacagccatcgccgccgccaagttcaaaatcaacgcctgacaatgacaaaggcagcagcagcagcagcaacagcaacagcaacaacaacagcggcagcaacaccaatcaaaacagcagcagcaaccaaagcaataacaatcaatgggccccaaacgacatggcgacgtcaacgaggctgctgcacaacaacaacaacagcagcaatacgaaacatgcagcagcaaaagcaaaagcaacagcaacaatcgtacttgcaacgccttaaggcggccggtcgactgggggcg

SEQ ID NO: 7323 - protein, 99 aa, DROSOPHILA
MNPFESSKSLQHVVLSTEMLLLERQCCYSGEPMLLPPNASNICWGAASSTRRQLALDSPTLQSVALAGIRTGIGIGIGIAIRIGIGIGILPGLHRAYWE

SEQ ID NO: 7324 - DNA, 3404 bp, DROSOPHILA
gcctacagtggtcgcccagcaatcgatacttggccagcggtggcagcgacaaccgcctgttggtttggaccgacgattggccggagcccatttacgccttcgacgagcacaaggcggtggtcaaggcgctgggctggtcgccacataagtccggtcttctggccagtggcggtgggtccgccgatcgctgcttgcgcttttggaacgtcctcaccgggaagctggtgaagtgcatcaacaccggcgcccagatcagcaacctggcctgggccagggattcccgagagctggttaccacccacggacacgcgcagccacaggtcattgcctggcgctatccctcgctgaagcagatggccaggctgtccgggcacacacagcgggtactccacctgtcagtgagtccggataacgagtccatagtgactggcggcgcagatgagacgcttcgcttctggaccgtttttaccaaacagaaaatatccaaagagccaaactccgtgctccgtttgtttaaaggcataagatgaggacaaaattgcgacgtattctttgtgctacgataaattatatttgttaccatctaaagtcttatatggtttcttaatttaagatcgtggttttcgtcttatgcatttcaggatggacagaatgctgcttcgctcacgctggccgagcagtacattggagccttcaagaagctggccaagacgaataacaccatgatcttgccctcgaatcccggggatgttaatggcttcgtggcccaggccctggcggtgtacaaccacgtttccaactctaaccaggccaccaagtcatcggaaaacgtgaagggtgtgggcgcctgcctgaacgcaaagagtgttgagtacaaggagttgcaggaggataaaagcagtgtgaaaatgaatattgaataggaatgaataaacggttgttgctattacatttgccccactcatagttgttattatcaaggcgaggatattaaatttttggttcaacaaataaacgcctatttatttacttcggaaggtacttcaacagtcgaacctcgtgcgacagccacaatgcgaaactcagcagaataagcgagcccgactggtgggccgttgccagaggcacgggcacgtagttaagcaaggtggttacgccaagcgtggcctgcgtccaggccatagccaccacggcgttgatggcccagttggcgcgcttgggcaactgcatccttctggtgaccagccacagagcggtggtcagcgttactgtgctaataccaaggatgcggtgattgaactgcaccgtcgtcggattctcggtgatgttcttctgtatgggcgcaaacgtccacatgtcatcgggaatccacttgtcgcccatcttcgggaacgagttgtacacgagtccggcgtctagtccggctacaaaggctccagaaatggcagtcagcaggaccattgccttcgtcaaatgcgtcagccccttgatattaaatgctttcttggcttggatcacgaatgtgttcgtggggatgagcagggacatggcctttgacagggagagtgagtacaggacgaaggcagctgccaggtgggaggccaatctatactgggatacccgtggcacgtcgttgggatcctggaacctgtcttccagcccggacttgaccatgtaccatcccatcagaccttgcaggccaatcagtgtgcccagcagcaggacgctcttcttggtcttcgcacagaagtatccctttctccagaagtaaacagcgggcaaaaggaagaacccgccgatggcacgaccccacatcctgtgcatgtactccatcatgaaaatgaacttgaactcctccacggtcatattcacattctttctgaaagcagaagtttgcatgtagttcctggcgttggatgaatctggggagtactcacagcttgtactctgggtattgctggtagagattgaactcctgcacccattcctcctgggttcggggcatacgttcacccgtcagcttccaagtgaccatggacagtccggactctgtcagtcgggttactccgcctggaagagattcactttcgcaaggaactacaaactttacattttgttattggttacctagaccaacggccacgaagaccatgccgctgactcccaggaaccatcttccgacggtcttgtcgcttttcggagtgctgatgggctttatcactgggatttcctgaaaggtgcggcattaacaaatattactttataaataaaaacatatttttatatgtaatcagtgggatattaatgcaacctttatcgctgtttgcgcaatcgtctggtgaagtcgggggccgggtactactagctttatgagattggttctcttctggagcaatcgcagcattgtgttatttcaagtttggagagattaacttaagcttacagcaaatattaaaggatatattttgttttttaactatatttacaaagccgctaccaagtgtgaccgcagcagtggggtatgcgcatatactaaaatcattttgaaaagtaccggcgaatgttatcgactcgatagcctggccacattatatcagttttgttaataaaaacaacttttgcggcttctgatttacaatttcgccaaataaaatggaaacaatattgaacacgcagttcgatcagctgcaaaaggccatagagggaattaaggaggcgaagagcaaggtaagtccgatttccgtgccagagtacagctctaaatccgtccacatccgtcacgagcaggggcaatcgacggatgaggctcgcattgccaccaccttgatgttcgtggctctgaagcacgccaaccgcgaggtgaagcacaagatcaaagcggggcgcgacaagctgcacctggaaaagtgcaaggtggacctcagccggctgcagctgcagaatcttctgtacgaagtgagccacctgaagaaggagattgtgcgctgccagaagttcaagagcagggacaccagcttggagctgctctcggaagccgagtactccagcgagctgccagacatgcccaacgacgcggaggagctgtccagccacaagcagcaccttcatcgcctcgactgcgagctgcgtctgcggaaggcactcgacaagcagtacagcgccctgctgagctccaagcaggaactgctccaggacaatcttagccacgcccagcggtacgtctccttcgcacccgccttgcgcactctgcagagcgccacaaagccgctgcacgatgcactccagctatccctggacgtggaatggaagctaagcgcagtggtcaagtacctgcccaagccgctctacgttttgttcattgtcctgcaatcgctgcagcgggtcagcgaggagcagtccttcac

SEQ ID NO: 7325 - DNA, 1208 bp, DROSOPHILA
atgctgcgattgctccagaagagaaccaatctcataaagctagtagtacccggcccccgacttcaccagacgattgcgcaaacagcgataaaggaaatcccagtgataaagcccatcagcactccgaaaagcgacaagaccgtcggaagatggttcctgggagtcagcggcatggtcttcgtggccgttggtctaggcggagtaacccgactgacagagtccggactgtccatggtcacttggaagctgacgggtgaacgtatgccccgaacccaggaggaatgggtgcaggagttcaatctctaccagcaatacccagagtacaagctaaagaatgtgaatatgaccgtggaggagttcaagttcattttcatgatggagtacatgcacaggatgtggggtcgtgccatcggcgggttcttccttttgcccgctgtttacttctggagaaagggatacttctgtgcgaagaccaagaagagcgtcctgctgctgggcacactgattggcctgcaaggtctgatgggatggtacatggtcaagtccgggctggaagacaggttccaggatcccaacgacgtgccacgggtatcccagtatagattggcctcccacctggcagctgccttcgtcctgtactcactctccctgtcaaaggccatgtccctgctcatccccacgaacacattcgtgatccaagccaagaaagcatttaatatcaaggggctgacgcatttgacgaaggcaatggtcctgctgactgccatttctggagcctttgtagccggactagacgccggactcgtgtacaactcgttcccgaagatgggcgacaagtggattcccgatgacatgtggacgtttgcgcccatacagaagaacatcaccgagaatccgacgacggtgcagttcaatcaccgcatccttggtattagcacagtaacgctgaccaccgctctgtggctggtcaccagaaggatgcagttgcccaagcgcgccaactgggccatcaacgccgtggtggctatggcctggacgcaggccacgcttggcgtaaccaccttgcttaactacgtgcccgtgcctctggcaacggcccaccagtcgggctcgcttattctgctgagtttcgcattgtggctgtcgcacgaggttcgactgttgaagtaccttccgaagtaaataaataggcgtttatttgttgaacc

SEQ ID NO: 7326 - protein, 393 aa, DROSOPHILA
MLRLLQKRTNLIKLVVPGPRLHQTIAQTAIKEIPVIKPISTPKSDKTVGRWFLGVSGMVFVAVGLGGVTRLTESGLSMVTWKLTGERMPRTQEEWVQEFNLYQQYPEYKLKNVNMTVEEFKFIFMMEYMHRMWGRAIGGFFLLPAVYFWRKGYFCAKTKKSVLLLGTLIGLQGLMGWYMVKSGLEDRFQDPNDVPRVSQYRLASHLAAAFVLYSLSLSKAMSLLIPTNTFVIQAKKAFNIKGLTHLTKAMVLLTAISGAFVAGLDAGLVYNSFPKMGDKWIPDDMWTFAPIQKNITENPTTVQFNHRILGISTVTLTTALWLVTRRMQLPKRANWAINAVVAMAWTQATLGVTTLLNYVPVPLATAHQSGSLILLSFALWLSHEVRLLKYLPK

SEQ ID NO: 7327 - DNA, 3866 bp, DROSOPHILA
ttgaacaaaatattatgacaaaagtctgaattaatgccaactatgttaaatcattccttaaactgaatcaatcttaaaagagtccggtgcaattaaaacataacttcaagtataaagtttgcaacaagagataagttttcgtaataagatgttaccatctcacgtatattaaagtttatattttagttaaataaagtcagtaattataaggaaatagaagtcttgtcatccaaaacaagacgttctgaataaagcagtaatgagttatctttgcatgacaaaacggaatacaattttgcataatttctaattgaattctattatataggacgcagcccagacgatggatggatggatggatggatggatggatggattgatggatggatgggtcgtgattcacgcttagagctccgcacggcgaagccaattggcgatcggatcacattttgaccccgacttattgagcgggttgctgggcgtagctgctaattttaattataaccaaagcggcggagcttccgatgtcaaagatgcgggaagcaattaaagcacttgagcactgagacgctttgtttacaatgttgacccttactttattaatgaagtgcttaagtcaattaggttaaagaaaaactgcattcgtactacggaggagcaaaaaattgaaaattaactcgaaagcgagttacaagaatacttgtcaaattgggattgagatctatttgtgtattcggttttttgacccaattattgatctttaataataataataataataattataatattaatattaataataataataatggattttaatataactttaataaagttgttatattcacattattctttttaatttcttaattttcgccctaatctgtatgtgttatatttaaaatgctcgcgccaaactaaaactaatcgagttattggtcgccttcttatcgtacaggctccaagggctattcaacactgcacactgttatcgtctatcggttcctgcagctgttttcaagcgagaaaaaattcggaacaagaaaacaaggattctggaacttgtgctcgccgcaggagctgattgtaaataaggatccaagtggaaaccgccgagtacaccagtcgcagagccatggagccgccagcgtcggccggaatcgccggctcgacgcacaagttccatccgtgcgacgaggctgtgatagccaccaacgacgatgccagcgattgcaagcgatgtgcggtgcgcttgggctactggaaggacgactacatcgggtactttgtgcgcaaccaagagcgcaaggcgccggagatcaatcgcggctactttgcccgtgtcaagggcgtggagatgtgcgtcgagaagtttctaaaggtcagttcatctgccgcggcgcccaactgtctggcacgtgccaaggtcatcctgttgcattgcagcaccaaggccgtgcccgtcatgccctccacaccgcgcatgtccattccagtttgaccttgctctaaccgtcttccacccattgtccgtccatacagaaaacctcgggcaactgccagatcatcaatttgggctgcggcttcgacacactctacttccggctgagggacaccgcccaccaggtgaagaacttcattgagctggacttccccacggtcaccgcccgcaagtgctacacaattaagcgcaacaaggccctgctggccaggattcacgacgaggatggtgaggtgcggctcagtcccacggatctgcatggaccaagctaccacctgatgggcgttgacctgcgcaacctcgacgaggtggacagcaagctgcagcaggcagaagttgattactccctgcccaccatatttctcgccgagtgcgttctggtctatatcgaggcgcaaaactgccgtaacctgctcaaatggattgcgcaaaagttccaagcagccgtctttgtcaactacgaacaggtgagcatgtgccacctctgtgtttcccatccaactagtgcattgaatcctttgctcgccgcaggtcaacatgaacgaccgtttcggcgatgtgatgctcaacaatctgcgcggacgcggctgcagcctggccggcgttgaatcctgcttgtcgctggatacgcagaggaaccgcttcaaggacagcggctggactggcgcccgcgcctgggacatggtccaggtgtacgagagcatctcggcggccgagaggcagcgaatcgagcggctggaaatgctggacgagggtgaactgctgctccagcttttccagcactactgcctggtggtcgcctggctgggcgtggcctttcaggatatagatatcacgtgcgtgccagtgtaaacattcgtgcctaaccgacagcggtctcttgcgattcccgtttaatcaacatgattttttctttcctctatttccatgcagcgtcgaagagttaatgtcctcgctgaacattgactaggagtgagtgaaggtggaagggatagagagccaacctacttggatgcactatttattgactctgctcggtttggaggaaggccatgccaaaatattttgcttctcaacgtgttaacctaaacagcaagtaattaaagagaaaccatcgaaatcaaaacatgtttagatatttatcctacacagagacccactcacaaatgatctaatttgtattaatttagttgttccttatatttttttctcttgttacatttttattatttaatcgcttaatatttactattttatcaccgagttgtggcacaaaatattgataggtgatcaatatgccattcattcattccccaatttaagtgtgcgtttaaattgtaaatgtattttgaaattattaaaaaaaaaaccaacttaaatgcaaaaagggccgttgtgtgtttaattaggtgtcaatgtatctggtgttagcacgaagcatttacatttgctgagttataatttcaaactgattttattgtgaataagcccttggaattatctacagaccaacttgtcgcaatctagtgaaccatgcgtgggagttctatgaatagcgctcatctttaaaatatgctgcaaccgctcacaggagtttcaattgagtgtttcaaagtgtacgcataatttggtgtcacaaattacaattgttatttttaaatctacattgtgagtcaaacaattattatcttttatacaatgtcattttcatgtgtgaacacatttcccaatttaagtgtgcgtttaaaaagtgaatttattttgaaacttattaaaaaccaatttaaatgcaaaaagggcagttgtgtgtttaattaagtgtaaatgtaaatgtctctgggataaaattttactgcgcactgctatttatacatttttgtcaaccaacatggtctaatcctgtttggccttggccatctcgcgagttctgcaaaccaaaaatttagtacaatagtaagctaataataataatatgcatgactatagcttacatcgctctcagttcttccaatgttggcactggaacacgtgaagattcggtttcatcctccttggacgccagttccggatgttttttccatttgtgggagcgacagttggtgttgctggcgaacgcctttccgcagtacttgcatacgtagggtctgaggccggtgtgtccaaggagatggatcttcaaggccgtggagttcttacagccgctgccacaaacctcgcacttgaagcgccgctcatccgtgtgcacatacttgtgcttgttaagaatcgcccgtgtctgcagctttttgccgcagacattgcactcaaacttgggctcaccatgtgtctgactgtgcacctggaaattgtatacaaatttcaa

SEQ ID NO: 7328 - DNA, 1544 bp, DROSOPHILA
atcggttcctgcagctgttttcaagcgagaaaaaattcggaacaagaaaacaaggattctggaacttgtgctcgccgcaggagctgattgtaaataaggatccaagtggaaaccgccgagtacaccagtcgcagagccatggagccgccagcgtcggccggaatcgccggctcgacgcacaagttccatccgtgcgacgaggctgtgatagccaccaacgacgatgccagcgattgcaagcgatgtgcggtgcgcttgggctactggaaggacgactacatcgggtactttgtgcgcaaccaagagcgcaaggcgccggagatcaatcgcggctactttgcccgtgtcaagggcgtggagatgtgcgtcgagaagtttctaaagaaaacctcgggcaactgccagatcatcaatttgggctgcggcttcgacacactctacttccggctgagggacaccgcccaccaggtgaagaacttcattgagctggacttccccacggtcaccgcccgcaagtgctacacaattaagcgcaacaaggccctgctggccaggattcacgacgaggatggtgaggtgcggctcagtcccacggatctgcatggaccaagctaccacctgatgggcgttgacctgcgcaacctcgacgaggtggacagcaagctgcagcaggcagaagttgattactccctgcccaccatatttctcgccgagtgcgttctggtctatatcgaggcgcaaaactgccgtaacctgctcaaatggattgcgcaaaagttccaagcagccgtctttgtcaactacgaacaggtcaacatgaacgaccgtttcggcgatgtgatgctcaacaatctgcgcggacgcggctgcagcctggccggcgttgaatcctgcttgtcgctggatacgcagaggaaccgcttcaaggacagcggctggactggcgcccgcgcctgggacatggtccaggtgtacgagagcatctcggcggccgagaggcagcgaatcgagcggctggaaatgctggacgagggtgaactgctgctccagcttttccagcactactgcctggtggtcgcctggctgggcgtggcctttcaggatatagatatcaccgtcgaagagttaatgtcctcgctgaacattgactaggagtgagtgaaggtggaagggatagagagccaacctacttggatgcactatttattgactctgctcggtttggaggaaggccatgccaaaatattttgcttctcaacgtgttaacctaaacagcaagtaattaaagagaaaccatcgaaatcaaaacatgtttagatatttatcctacacagagacccactcacaaatgatctaatttgtattaatttagttgttccttatatttttttctcttgttacatttttattatttaatcgcttaatatttactattttatcaccgagttgtggcacaaaatattgataggtgatcaatatgccattcattcattccccaatttaagtgtgcgtttaaattgtaaatgtattttgaaattattaaa

SEQ ID NO: 7329 - protein, 337 aa, DROSOPHILA
MEPPASAGIAGSTHKFHPCDEAVIATNDDASDCKRCAVRLGYWKDDYIGYFVRNQERKAPEINRGYFARVKGVEMCVEKFLKKTSGNCQIINLGCGFDTLYFRLRDTAHQVKNFIELDFPTVTARKCYTIKRNKALLARIHDEDGEVRLSPTDLHGPSYHLMGVDLRNLDEVDSKLQQAEVDYSLPTIFLAECVLVYIEAQNCRNLLKWIAQKFQAAVFVNYEQVNMNDRFGDVMLNNLRGRGCSLAGVESCLSLDTQRNRFKDSGWTGARAWDMVQVYESISAAERQRIERLEMLDEGELLLQLFQHYCLVVAWLGVAFQDIDITVEELMSSLNID

SEQ ID NO: 7330 - DNA, 4700 bp, DROSOPHILA
catcttggaatgcacaaaaacggctgtaaggaagggagggttgtatattttacaagagggtcacaaaaccagaacgtagaccacacagtttcgataagcgagcaacaggcgaaaaaggaggagtattgtgtgcgttgcgtcatggttttataaatagcacttggctgatgaagtgccccatttgcgaataagtgatattgtcttccggactgcagttcagtcacccagtctcctcctccaatagccatatgtccacaaatatttccggggacagagaaacactctttgtctagcggctcgcacataacctaaactttgcggtcttttatctgatcatttaccgattctattcacttcctgtctcttcccctattggttatttcaatggtgcattcgagtgcactcgacttaccagctagatcttgcccttttaatacacaaacgaattgatttcacgagcgtcgtgtactattgcacatgccaccagcgcggtgcagtctagaggatttctatcgcggctatcgatatatatcgattgttccatgtgtgcttcagggtggcgcatttctgattttgtgacgtcacatgtccagcatcctatgaattaagttgcgcttagctagtgctgaaaaataatattagtaaataaggagtatagtatagtataagagttagtaagtgcagaataatctcaaaaataatgagcataagaaaatctacagaagtgccgtagttgagaagcttaaaaaacaaaagcatctgtagcatttctcaacatctggtgaagcattcttagtttaattacaatactctgtatgttttaaacatatataaacgatagtatataatttacagaaaatgcgccatagtgtggtacgtgtcaaataaaatttaaacgcaataatgtttaagccgagtttaatgtagtctgtaaatgtaccactttctaaaaaaattagttacaccaccatcgataattacagctgcgttccgatagcagtcagcaggcacatctctgttaatttatagcaaaaaaaaaaaacaaatattcagaaaaacaacattcaattgtttgttttgatcaaatagcaacgtaatccagaggtaattagtcatccaaagagcataatttgaataatgggaagatagtaggtcacgtcaaagaaaattataatagtgtggtttcccggtaatttcgagaagctggcaatttccaaaagtgagtcaccacttttcctacaccgagctgctgtgtatgtattatttgcgctggtggtgctccggctgaactaatttaatagctgcgactacgttaaagcgcttaagctcgcagttcagcgtgtaggtaaggttcataaatggccccagctattttcagagaacccacacaagaaagcttgagaggtacacgtcatgggggccacaacaaacgaaacggtgccgaagtttctcaggcattactatagtggcaaattgattgataattaaagttgcatgccaccaaaggtgtgcacatttcttagacactaattaaattagctaatgattgcttatcatcgtgtctttgcaggtaaaacaacaacgaaacaatgcaaggtgagtggaataaggacaagccgtactaacacattctttttggatctaagtttactccacagcggtttcggaattacatagaaatcagagcgaagtccctcgagaatgtcctggcaaagtgttccccagtatccccaataccaaggttcaatcttcttaacttctaagcgagtgttacagcttacccgttttctgatcgcatgcttttgttcgtcccggggcttgtcgacccgttgaatgctcagtaattgcccagagctgattcatttccattacctctctctctttacacatcgtacttgtcccttcttatcatggttgtatgtacatatttgctcgagattgtttcttggtttaccgcatctcttcgtcacggcgaagcgtttcatttagattttacagttcttggtagacagattgctgtagcgaacgcgttggtagcaccgttttagatgacaaactaaaacgagatgtcttatttcgcagatcccaaccagcagtacaactatggcggcggtaatcccccgcagggaggatatggtggatatccacctcagggcggctatccacctcaaggaccgccgcaaggctacccaccctatgcacaaggaggtgctcaaccctatccacagccctacggacaggggcctccaccgggaggttatgctccccagccgggatttatccaaccaccaccatctgctggcggctacggagcctacgatgatccggagagccagcccaagaacttctcgtttgacgaccaaagcatccgtcgcggattcatacgtaaggtgtacctgattctaatggtgagctttagataattctgcatagaaggcatgtacaataagttatcatttctgtgtcattagggacaactaatcgtcacttttggagctgttgccctgtttgtataccacgagggcactaaaacctttgccaggaataacatgtggctcttttgggttgccctcggcgtaatgttagtaaccatgctgtctatggcttgctgcgaaagtgtgcgccgccaaacaccgacgaacttcatattcttgggtctgtttacagcagctcagtcgttcttaatgggagtttccgcaaccaaatatgctccgaaagaggtgagtacttcgatttaattacgatatgtagtaaagtgatacgatatctgttttccaggttctcatggcggtgggcataacagcagcggtttgcttggccctaacgatcttcgccttgcagacaaagtacgactttactatgatgggcggtattttgatcgcctgcatggtggtgttcctgatcttcggcatcgtggccatctttgtaaagggaaagatcataacactggtgtacgcctcgattggagcgctgctcttctccgtttatctcatctacgacacacagttaatgatgggcggcgagcacaaatactctatcagtcccgaggagtacatctttgcggcactaaacctctacctggacatcatcaatatcttcatgtacattctgactataatcggcgcatcgcgcgactaagttccgctctatttccaaatattgtttgcagcttaatcgggttattcagtaacctggaatacacgaatattgttgtcgcgtaatctcatcggtgtgctcccccagtggaggtaatcttcaactaacgaattactcaaatacttacaaatctatctacttcgtgttgtgtttgcccattttccccgtttccttctagttctaaatgtcaactaaggctatatgaactacttactttttgttatgtatgttttattgttgcttaagttgaggcgcaaaccaagtggatatttccaaatttaaaaataaaaaaattatatatatgtatgtataccaaatgatatgccattcagataaacgaaacaacaataaatagtcacgtataaacatatttatgtaaaaatatacatataagcaagttggcttgcagttgttaacacataaaacttaaccgtgtgtaataaccaaggaatcccgattttcaactatgaatcaagtaccgaacattgtaatccctgcagcgacactgagtttaaagtcaacaataaagcgcatctatttattaaagccacagacccctgcattgtagggcttccgtcagtggttcatccagttcaaccagccagccaccaccagatgcaactttagtctgcgacttcagagcgacgccgttggttggattacttctacactccagaccattatcgtctgcatttttgctttatcattgcttaagttaactttgttatctgcaccaccacagaaagaagtccgggtgttttaatttcgggttggccccatatcatgcgtttgacccggccacctgttcagtagttcgtgtgaattccagcagggcgtagctataaaatgtatcactaccagcaaggtaagtaccgcccggattgggctgaaaccaaaccaaattggctacggaaaggtgctttagattagataatcgatttggctattgtataaagcttattgactgcatcgttttctctcagtaagagccaacaaaatatatctctctcggcgcattttcatctgataagacagctgaaaaggtttcgttatgagcccaaaaacagtgattcacccaatcgaagggagagtgaacaaccattttgaaattgtatggtggcaatatcagttactcaccgacatcaatacacaaatcttatctagagtagaagtgtggggctgtgataagagccggtaaccggctaatctcaactcatacgtccatatgggaacacctagaaagggcgattcggttccattaagctgaaacactagcacgctgccggcagtcgggcaaagagagcaccgtaacttaagtgactaaagtttagtcatagcaatttagccatgagcagcgacaatcattttcagtacggttagtcattgcattaactttcctgcttccttgaattgtcttccaaccacacaggcgatgaaactggcgcatacacagatgcggaagcggacaagagcttcgccttcgatgaccagagcatccggaagggatttattcgaaaggtctacttgatattgatggtaagtgc

SEQ ID NO: 7331 - DNA, 1696 bp, DROSOPHILA
tcagcaggcacatctctgttaatttatagcaaaaaaaaaaaacaaatattcagaaaaacaacattcaattgtttgttttgatcaaatagcaacgtaatccagagtttactccacagcggtttcggaattacatagaaatcagagcgaagtccctcgagaatgtcctggcaaagtgttccccagtatccccaataccaagatcccaaccagcagtacaactatggcggcggtaatcccccgcagggaggatatggtggatatccacctcagggcggctatccacctcaaggaccgccgcaaggctacccaccctatgcacaaggaggtgctcaaccctatccacagccctacggacaggggcctccaccgggaggttatgctccccagccgggatttatccaaccaccaccatctgctggcggctacggagcctacgatgatccggagagccagcccaagaacttctcgtttgacgaccaaagcatccgtcgcggattcatacgtaaggtgtacctgattctaatgggacaactaatcgtcacttttggagctgttgccctgtttgtataccacgagggcactaaaacctttgccaggaataacatgtggctcttttgggttgccctcggcgtaatgttagtaaccatgctgtctatggcttgctgcgaaagtgtgcgccgccaaacaccgacgaacttcatattcttgggtctgtttacagcagctcagtcgttcttaatgggagtttccgcaaccaaatatgctccgaaagaggttctcatggcggtgggcataacagcagcggtttgcttggccctaacgatcttcgccttgcagacaaagtacgactttactatgatgggcggtattttgatcgcctgcatggtggtgttcctgatcttcggcatcgtggccatctttgtaaagggaaagatcataacactggtgtacgcctcgattggagcgctgctcttctccgtttatctcatctacgacacacagttaatgatgggcggcgagcacaaatactctatcagtcccgaggagtacatctttgcggcactaaacctctacctggacatcatcaatatcttcatgtacattctgactataatcggcgcatcgcgcgactaagttccgctctatttccaaatattgtttgcagcttaatcgggttattcagtaacctggaatacacgaatattgttgtcgcgtaatctcatcggtgtgctcccccagtggaggtaatcttcaactaacgaattactcaaatacttacaaatctatctacttcgtgttgtgtttgcccattttccccgtttccttctagttctaaatgtcaactaaggctatatgaactacttactttttgttatgtatgttttattgttgcttaagttgaggcgcaaaccaagtggatatttccaaatttaaaaataaaaaaattatatatatgtatgtataccaaatgatatgccattcagataaacgaaacaacaataaatagtcacgtataaacatatttatgtaaaaatatacatataagcaagttggcttgcagttgttaacacataaaacttaaccgtgtgtaataaccaaggaatcccgattttcaactatgaatcaagtaccgaacattgtaatccctgcagcgacactgagtttaaagtcaacaataaagcgcatctatttatta

SEQ ID NO: 7332 - protein, 324 aa, DROSOPHILA
MSWQSVPQYPQYQDPNQQYNYGGGNPPQGGYGGYPPQGGYPPQGPPQGYPPYAQGGAQPYPQPYGQGPPPGGYAPQPGFIQPPPSAGGYGAYDDPESQPKNFSFDDQSIRRGFIRKVYLILMGQLIVTFGAVALFVYHEGTKTFARNNMWLFWVALGVMLVTMLSMACCESVRRQTPTNFIFLGLFTAAQSFLMGVSATKYAPKEVLMAVGITAAVCLALTIFALQTKYDFTMMGGILIACMVVFLIFGIVAIFVKGKIITLVYASIGALLFSVYLIYDTQLMMGGEHKYSISPEEYIFAALNLYLDIINIFMYILTIIGASRD

SEQ ID NO: 7333 - DNA, 4009 bp, DROSOPHILA
ctctggtgtggtcttgtatggcatggtatggtatggtctggtctggtctggtttggtctggtctggtctggcctggcctctgggcgagatggtgtagtcagctggggcttgtccctcggagtcccacatcaattcagcattgttttgtcgtctggcggcgagcctgaacgggtcctagctactctgagaacgggacacgttcgtgacttgtgtggctgaggactccaccaccgtctccagcttctggcttctggctcctggcttttcccacgtactttctgtgccagtgattggagtgtgcgtgtgcgattactaattgcattgctgatattaaatcaacatgcttccgcactgatttctaaccgagattcgttcggtgcacgggcttgggacatgggccatggtcacctggcatccagaaggccacacgatatcaggagcagtcccaaacccgttggcagacaattggctgcccctaattggtctaatcaacagttggcgagtgcccaaactaaccaacgcgaattgttgcatattgtcttcgctgccagatgcgtatgccctgtggccggttaccgggcgggggaaagagtcctcggcggtgatgcgataattgctgtcacaaacagtggatgtggatctgcatcagcatctgcttaaccataaaccgtgcgcccacccagcggcaagtgcgtttgtgtgcacgtgtgcgcgggtaatggcgcggcatgcaccacaattcgccattcaccattcgccatggcctcgtttggccatcgcctttgctgcctgccttcacatccgcatccccattcccattcccattcccatacacatccacattcacatccatggatgacaggtcatgcccgctggttttagtcaattttggtttgtcgtatgcaggctcggaggtttgcaggctggcaggttaactagttgtaccagccggctaaccgaccagcaccgcccgtggaacgaatcgcggagcaggcgggcgctaggatatcccagtgagcaggagcagcagcagcagaaacagcgtccacacggaccgtgtgcctagggggcaggagttctcggtgatccaatcccggaagtggtagacatcggtgtagatcccagccgaatcaggctcgccgcaacccattccgaaggacacgatgcccgtcaccatgttgtcacagatgaggggcccgcccgagtcgccctggcagctgtccacatcggagtcgtgcttgtcattggcgcagagcatgccagcgttggaccagcccagcagcttctcgcagaaggtgtccggcaggatctgcatatcgccgttgatggcctcatctggcagtggtccgaactgcggaaggggatgggagcttaaggactcgaagttccacaagttactcggtaatcgatgctcacctgaatgaccgtgccccagccgacgatggagcacggggccccggccaccggaaccttgttgtacagaggtattttggcaacggcatcacccagactgagatccgcctccaacagaatcaatcctatgtcgtacttctgcgacttgcccttcttgtacttgggatgcggcaatagctcctcggcctcaataatctgtgttgtactgctcttgagcagcctccttggcgtcccggcaacgaccatcaacttcttggccttcagctttcgccgactggtggagtccactgatcagcactgatccccataaacacacacactgcacctgccgctactcacttgctgaacatgcaatgggccgccgtgagaatggcccgctcgctgaagatcgttcccgcgcaaaagtggttatcgccgaagaacttcttcggcttgcccatgcgcagcgaaaccgtgtacttgaccaggtcgttggtatccggtcgatagccaccagtgaccaggaactgaaagtccgatggtcggtcctgcctctgactgggcgccgaatgcagctggcccgcctgtgattccgagttcgaattggcgcttacggaaatcagcagtatgtagacaacaaattttgacggacacatttctaatcgttttccaatagaaatctgacactaaagtgacttacatgtgtacatatgtacatataggagtattatttttcgatgaaatgggggccagaagcagaggccgggaaatggacgcactgtcgctggaagatagcgtttggcagccatctgatagctgatgaaaaagtctccttcataaataactggctatcacaagtgtgcgtgtggagtgtgtggagtgtggggagtgtggagcaacaggaagcgttttttcctttatcccggctgcgaactgcagtcgctagagtcaagtcagcccggccgaaacggagccccacgaccatgtgcttatgtacatgtgtacttttcgcaggcaagtcgagtttttcccctgcacactaagtagttggttgtttcatgtcacttagggatgcctccctccgagagtcctgtgtggcgggcactcggcggcctggggtgaaggtgtcgaccgggtcgttatcattaatttgcagcctgctttttgcaataatttacaagacgctcccctactccgcttagccttggccaccccccaacccagttcaccatggaacccttctgtggtggatggttcgagtagtcagtcgagcagcaggcgaccttaagaactccgagcagcgagcacactggtgccgtgccactagcacgtagcacttgggcatatttaaagctaagtaaccaatttccttccatccaacttgggtttgggcccagtgtgcgctaacttccggctgccttggccaagtttttaagttgacttgtcatttcgcccgcttactaaagacaaatttgtgcggcagaacaaaaaatggtgcccatttctcaccctgcgacccacttcttcagaccacttcccactgcccacttcgcgcctgcgagtggagcttggagcttggagctcgaggatgtaggcgaactcgagtcggctccacatttttactcggcaattaaaagccccgacaaagtgcactgcgtgcgtgtgtgtgtgtgagcaagaaatggcaaaacaccgaaatttattcgatgagcagttggcggcaaatctgaatcggatttcgagacgaggagggagcaggagtagcagctgcacaagttccccaggagcccggttgggtggtgatggtcgggggaaggcagctgggagcagttgtcaccggccaaacaattatggcacctgaatgccctcagatagcagaccgccagacaagccacacagacgtgcacagacatgcagagacgtgcggagacttgcacggacatgggcgggcatgcaggagtgtgctcttcgtattacttatcgccacagacgatgccgagcattgattattgttgccttttgcagttttaactaaaacgcactcggtcgtggagctgtgaagttgcggagcaactgcatccagcgctgtgctatggtaatcgtaatccccttggccatccacacacccctttccccctgcatttgtttgcatacattgattgaatttgtttacgccattaaatttgcaaattgctatcggcaattttgcataaactgcagtgtaagactttaccgcacaactctaccgccccaccgccaatgctccattgtccgtggcccgtccgtgtcggtggcttcggcaaggacaaggccagcgccgtccatgccaaccctcgtgtgagtctggcgtacgagtcattaactattcatatggcagaccgagcagcaggaccagcaaaccaacaaagcagcaggcagcacggggcagagccacttgatgacacatttgattccgcctgtcaacggccgacagccattgcaagtccgggttagtccggggtaattgtcgccacttcagtattcagtatccagtatccagtatgcaaaatccagtatccagtatccagtgtacagtgtccaagcaacagactgcagactccggaatccaaaatccgga

SEQ ID NO: 7334 - DNA, 972 bp, DROSOPHILA
atgtggagccgactcgagttcgcctacatcctcgagctccaagctccaagctccactcgcaggcgcgaagtgggcagtgggaagtggtctgaagaagtgggtcgcagggcgggccagctgcattcggcgcccagtcagaggcaggaccgaccatcggactttcagttcctggtcactggtggctatcgaccggataccaacgacctggtcaagtacacggtttcgctgcgcatgggcaagccgaagaagttcttcggcgataaccacttttgcgcgggaacgatcttcagcgagcgggccattctcacggcggcccattgcatgttcagcaatcggcgaaagctgaaggccaagaagttgatggtcgttgccgggacgccaaggaggctgctcaagagcagtacaacacagattattgaggccgaggagctattgccgcatcccaagtacaagaagggcaagtcgcagaagtacgacataggattgattctgttggaggcggatctcagtctgggtgatgccgttgccaaaatacctctgtacaacaaggttccggtggccggggccccgtgctccatcgtcggctggggcacggtcattcaggtgagcatcgattaccgattcggaccactgccagatgaggccatcaacggcgatatgcagatcctgccggacaccttctgcgagaagctgctgggctggtccaacgctggcatgctctgcgccaatgacaagcacgactccgatgtggacagctgccagggcgactcgggcgggcccctcatctgtgacaacatggtgacgggcatcgtgtccttcggaatgggttgcggcgagcctgattcggctgggatctacaccgatgtctaccacttccgggattggatcaccgagaactcctgccccctaggcacacggtccgtgtggacgctgtttctgctgctgctgctcctgctcactgggatatcctag

SEQ ID NO: 7335 - protein, 323 aa, DROSOPHILA
MWSRLEFAYILELQAPSSTRRREVGSGKWSEEVGRRAGQLHSAPSQRQDRPSDFQFLVTGGYRPDTNDLVKYTVSLRMGKPKKFFGDNHFCAGTIFSERAILTAAHCMFSNRRKLKAKKLMVVAGTPRRLLKSSTTQIIEAEELLPHPKYKKGKSQKYDIGLILLEADLSLGDAVAKIPLYNKVPVAGAPCSIVGWGTVIQVSIDYRFGPLPDEAINGDMQILPDTFCEKLLGWSNAGMLCANDKHDSDVDSCQGDSGGPLICDNMVTGIVSFGMGCGEPDSAGIYTDVYHFRDWITENSCPLGTRSVWTLFLLLLLLLTGIS

SEQ ID NO: 7336 - DNA, 4674 bp, DROSOPHILA
tgtgtatgtattcacttgaatgctcaatatattcgatattcgtgggagcccatataaagtggtggttttgatttgattcttacttgatacctgcgacattttggctgctgatccaattgcctaactgcttgtaatttgtaattgcgagcggcttacgtaagcagtaactttcagctgttgccggtttatggcggcttgcttttgttattgttgttgttttggccgcttgcgcttttgggcagattctcaccttatgtgtttgcttagggccgatttaacagcaaatgattcgttttagccacgcacctgatccgccagctgttcaattcacttttctgcctcgtaatgcggttcaaatgttcactttttatgtcgctctccgttttttttggcactcttccaattggaaaaaaagttgttttgtttgccgctctctgtttgtcttttttcgctctgagtttgtgcatccacaagtacttgctgtgctcgccgcaacctctcaatttagcacttcttttgttgtgcaatttgccgaatgattcgcaaactcagtcgcgtataaatgcaattttcaaattgtttactgcgatggtaaggaagaagaagcaatgtggcggggtgggggtggctttgcacaatagtgggaccgtgcgtagatcaggcgggaaaagccacaggcaagcagtggaaggtgccatggcttcaagcaagcagttcatgttcgcataaaaatatgcagtaatctctagaaattcaataatgtaatgtaatgtataattcagtaactttattattaatcatgttaaaagtaaggtattcagagcacgagtgttttttccatggcacaagttttgtatactcgccaactgcttgctattaagacacgctttaaatttcagatgttaacgcggcatcgctaatgcttctttcagctgcaaaatagctagatttgccggtctgaacagctagccggacatctctgaatgccattcgcaggagacgacgacaaagccgcagttgttgctgctgttcttttcactttcgttgcgttttgcactgcattttatttggcaatttgtgtgcatttttcaacagctgtgatattttgccatcgcatcgtggcggcaagatgatgaaaatcggcgaaaaaagcgggagcagaagcagcagataataatagaagccacgtacttgtgcgtgtgtgtgcgttgtgtatgggctgagcgccagtgtttgtgtgtgtttttgcaaaaaaaaaaaaaaccggaaaagcagaaacacagacacgaatgcggatgcggatgtagaagcggatgcaaaggccactgcggatataatccacaaacacaaaatgcaaatcctgcaagtgtttctgggcacgctgctctgcggcatcgtcctgggcgccaatgtactgacagtttttcccagtgtctggaaatcccactatctctttggccggagattgcttcaggagctggtggagagttcgggcaaccactccgtaactctgatcagtccacatgccgcgcaggaaggtgtggatgcggaaatacccaaaatcagggagctgcgcatcgaagggctgcgggaaaactggctcgacatgggcatgagttttgaggccgaggaaatgcgggcccagagtgtgatggaaaggttcacccggctgatctacgctggcaccaccaatgtggacattttgctgtcggatccccaggtccggaagctcctgaccagcggcgaaaagttcgacttactcatagtggacctgttcttaagcgatgctctgctagggtgagtccgaaagccaaaaacgggtttccttggtatatatttcaaatggaaatctgttctcttttagcttggccttctactatggcatacccaccgttgcagtcagtcccactggcgcgaattcctggctgaataacatgtttggcaatccgcaatcgtcctcactggatcccagcaatttcctgcccttcacggagagaatgaacacgaggcagaggattctaaactcgcttatgagcacctttgagcgcttgacctacaagtacgatcttactgcagtataacttgtataattgtgtagcatttcgagacaagttaatcatcagcaatttatattatcaataggaaaataatctttctttacattcagtttaacaggatccgtttttttgtattttgcagctttttccacttgatctcccagcaatccgtgtacacaaatcacttcgaactgctcgttaaggagctgccgctttatagagatctgacaaagaatctcagtttggccttgattaactcgcatccaggcctacattatccccgtgcatatttgcccaacatggtggaagtgggcggcctgcacttaagccacttaaatgatgacaatttgccaaaagtatgtctaaatgcattcattcataaattcaaatcacttactttaattgtttttagcatcttctgtcgttcatggaatcggctcccagtggggttatctattttagcctgggcgccgatgtggaaacagctcaactgcctcaggaaaagttggccattattctggatgtgtttggccacctcaaggagtttcacttcttgctgaagtgggaaaaggaggagtttacggcggaacaggtgctgccagagaacgttatgattgctgactggtggccacaacaggccatccttcaccatccgcaggtcaagatgtttattagcagctgcggtcagttgagcgtttgggaatcgattagtggacaaaagccagtacttgccatacccattctagccgaacaagaggtgatggctaagcgcttgcagcgacatggagtctccgtgaccgttggctacgactcgttagcttacgattcgctgctccacggcataagacagctcaccctgaataccagctatgtggagaagttgggtcaactcaaagaacgactgattagccgcgattccacgccagttggaaaagctgtgcgaaagatacagcttatattggagtctggaggagctgactttcttaagtcgcacgccaataccttaaacttttggagagctgaaggtgtggatgttctgcttataatagcagtgggcttttttggaattttaaccattcctttcctggccatttgctttatactaagaaaatcctaccacagccaagccgcgcaggatcagccaccatacagaaccaacctgaaagtggttggcagagtgcacagctatggtgaccaggggagtagtagatctcccaagggaacagagtcgctcagaagaacgcgatccgctcaatctttatcggcgcggtccagctcttcgagcatgagctccaattcaccgacgagtccatcgacagcgtccactacgccactggacctaactcccccacctccgattcagctgctcgggcaggtgccgcccttgcagttgtacgtgaatcagcagcggatatactcaagcgatcgaaagacatcacaggaggaagcagaacgcaggttctcataatgatatatctccacacgaaatatattactaaacttacggtggatcacatagaaaggatgctcgtctcggtttcacatcctcatgttaggactagcaaaactgtaagatcgtctaacaagccagccggaggatgggaaagcagagcttagagcgggaaaataatcattggtcaatctattactagtttcaactagatctcttaaagatccattaaagttgcacagttgccaactataatgccctcgattgtccaccgagtacattccgcatctataatccgtgtcacaaaatcgatccaccatgcctatataaacctatacataaaaatatcgtctagtgttaagtgtgattttttgttaatacatgtggttttatatttcgataagttttaaaatttataaattgtatatatcttgaatatttgtattgtgtgtaaacgaacgttcacactttgaacataggatatttgtactgacaaagtataacaataaattgggtacttgaaattgattttatgttctgatattaatgtcgaaaaccctttacagctatttcattcaattaatatttcaattcaaagactgacaacacctttcgtatgtttttaaaaagacaaagcttgatagaaacacaagcgcttagactgcaattgttcagctcaaaaaagcaactgagtattgataaaatatctatgtatgtccgtttgttaatttcgagctgaaattaaaattgttaatgtttttataataataaaacatataatgcggtcaccttttttacaatgggaaaactagatgcagttttcaattcggtttagttgttctgaatactttaaattaaggatattttataatgccatgtatgaattgttgaataaaatatataaaatagcctatagaattggaatttcctatatttctttgaatagttgtaaatattttcccaatttaaatggcttaattatatagcatctatctttgtttgcattctacttaaattcccatgccgtgcaagttgtatttcacattttgtttgaactctccttgaacaaattcaaaattcttttagttggcatagagcagttagcgttaattatggtttaatatggcgtctcgggggcaaggggcgtgtctaattagttgactgcac

SEQ ID NO: 7337 - DNA, 2411 bp, DROSOPHILA
cgacgacaaagccgcagttgttgctgctgttcttttcactttcgttgcgttttgcactgcattttatttggcaatttgtgtgcatttttcaacagctgtgatattttgccatcgcatcgtggcggcaagatgatgaaaatcggcgaaaaaagcgggagcagaagcagcagataataatagaagccacgtacttgtgcgtgtgtgtgcgttgtgtatgggctgagcgccagtgtttgtgtgtgtttttgcaaaaaaaaaaaaaaccggaaaagcagaaacacagacacgaatgcggatgcggatgtagaagcggatgcaaaggccactgcggatataatccacaaacacaaaatgcaaatcctgcaagtgtttctgggcacgctgctctgcggcatcgtcctgggcgccaatgtactgacagtttttcccagtgtctggaaatcccactatctctttggccggagattgcttcaggagctggtggagagttcgggcaaccactccgtaactctgatcagtccacatgccgcgcaggaaggtgtggatgcggaaatacccaaaatcagggagctgcgcatcgaagggctgcgggaaaactggctcgacatgggcatgagttttgaggccgaggaaatgcgggcccagagtgtgatggaaaggttcacccggctgatctacgctggcaccaccaatgtggacattttgctgtcggatccccaggtccggaagctcctgaccagcggcgaaaagttcgacttactcatagtggacctgttcttaagcgatgctctgctaggcttggccttctactatggcatacccaccgttgcagtcagtcccactggcgcgaattcctggctgaataacatgtttggcaatccgcaatcgtcctcactggatcccagcaatttcctgcccttcacggagagaatgaacacgaggcagaggattctaaactcgcttatgagcacctttgagcgcttgacctacaactttttccacttgatctcccagcaatccgtgtacacaaatcacttcgaactgctcgttaaggagctgccgctttatagagatctgacaaagaatctcagtttggccttgattaactcgcatccaggcctacattatccccgtgcatatttgcccaacatggtggaagtgggcggcctgcacttaagccacttaaatgatgacaatttgccaaaacatcttctgtcgttcatggaatcggctcccagtggggttatctattttagcctgggcgccgatgtggaaacagctcaactgcctcaggaaaagttggccattattctggatgtgtttggccacctcaaggagtttcacttcttgctgaagtgggaaaaggaggagtttacggcggaacaggtgctgccagagaacgttatgattgctgactggtggccacaacaggccatccttcaccatccgcaggtcaagatgtttattagcagctgcggtcagttgagcgtttgggaatcgattagtggacaaaagccagtacttgccatacccattctagccgaacaagaggtgatggctaagcgcttgcagcgacatggagtctccgtgaccgttggctacgactcgttagcttacgattcgctgctccacggcataagacagctcaccctgaataccagctatgtggagaagttgggtcaactcaaagaacgactgattagccgcgattccacgccagttggaaaagctgtgcgaaagatacagcttatattggagtctggaggagctgactttcttaagtcgcacgccaataccttaaacttttggagagctgaaggtgtggatgttctgcttataatagcagtgggcttttttggaattttaaccattcctttcctggccatttgctttatactaagaaaatcctaccacagccaagccgcgcaggatcagccaccatacagaaccaacctgaaagtggttggcagagtgcacagctatggtgaccaggggagtagtagatctcccaagggaacagagtcgctcagaagaacgcgatccgctcaatctttatcggcgcggtccagctcttcgagcatgagctccaattcaccgacgagtccatcgacagcgtccactacgccactggacctaactcccccacctccgattcagctgctcgggcaggtgccgcccttgcagttgtacgtgaatcagcagcggatatactcaagcgatcgaaagacatcacaggaggaagcagaacgcaggttctcataatgatatatctccacacgaaatatattactaaacttacggtggatcacatagaaaggatgctcgtctcggtttcacatcctcatgttaggactagcaaaactgtaagatcgtctaacaagccagccggaggatgggaaagcagagcttag

SEQ ID NO: 7338 - protein, 636 aa, DROSOPHILA
MQILQVFLGTLLCGIVLGANVLTVFPSVWKSHYLFGRRLLQELVESSGNHSVTLISPHAAQEGVDAEIPKIRELRIEGLRENWLDMGMSFEAEEMRAQSVMERFTRLIYAGTTNVDILLSDPQVRKLLTSGEKFDLLIVDLFLSDALLGLAFYYGIPTVAVSPTGANSWLNNMFGNPQSSSLDPSNFLPFTERMNTRQRILNSLMSTFERLTYNFFHLISQQSVYTNHFELLVKELPLYRDLTKNLSLALINSHPGLHYPRAYLPNMVEVGGLHLSHLNDDNLPKHLLSFMESAPSGVIYFSLGADVETAQLPQEKLAIILDVFGHLKEFHFLLKWEKEEFTAEQVLPENVMIADWWPQQAILHHPQVKMFISSCGQLSVWESISGQKPVLAIPILAEQEVMAKRLQRHGVSVTVGYDSLAYDSLLHGIRQLTLNTSYVEKLGQLKERLISRDSTPVGKAVRKIQLILESGGADFLKSHANTLNFWRAEGVDVLLIIAVGFFGILTIPFLAICFILRKSYHSQAAQDQPPYRTNLKVVGRVHSYGDQGSSRSPKGTESLRRTRSAQSLSARSSSSSMSSNSPTSPSTASTTPLDLTPPPPIQLLGQVPPLQLYVNQQRIYSSDRKTSQEEAERRFS

SEQ ID NO: 7339 - DNA, 4298 bp, DROSOPHILA
ttgtctcttcttcaactctctttagttttatggttaagtgactcacaaactaactaccgaacgatctccataccgtgagctcttcgatctaactaacacaatcacacgaccctagttaatgtctaactcacacgtagttgccaccgatatcgtgttgttcttttagccccaacccagatactaacaccccccatcactgagctcaccagagttactagaatcctgctaggaaccagttaacacttgccgctgtaattgtcgcttacaaattgtatcttttctttaacaattgttatgcgtttaggctgggcacctaggaccattgacacttcatttaggtgatgttccactgaagccatttggaagtggaatcatatgattcattactcatttgactttcgtccacatggcatcggataaacactccttataaatatctcgcatgtctttttgtactaagtaactaaccaaagcagcaattttagtgcatatctaatattgtaaagtgatcgtaatccttgatatgtgatcaatatttccaaataacactaataaatcccaactaggcggcaacatcacctggccaacaccaccgcctttggaccagctaaagagcaatactttcggcagcgtggaaacaccatctccggtgaccaatgaaccgcccttcgacaatggcatacacatttccaatcctaacacgcatgggtaagatcaattcgatcaattcgtccaattcgcagttcattaaactaatttctcttttcgttgcagctataatgttcagatacagagtacacccacgatggcgtcttctacggccagccaaggatctcgtccggatacgggtatatccacgcaatcccagtcccaaacgcaatcgatctcgtccgcctcgaagagtgccaagagtgcagctgctcgatcgggggcaactgacaccgtgcccagtctcaccaaggagatcaactctggtctgctgtccatgaagaagggcttctccagcttcatgacttccattgactcggccatcaagtcgggcacgcccaatgacgatgccagtgataccttctccatacagagcgacattagctccgattcggataattttgccaatgttcttggcgatgacaagaccatggattgcatggatgttatgttccgacttaatcccttcaccacggacaatatgaaggcttctcccgtggaggtggccagtgaagtgtatgaggagcaaccgagtagctacaaaacaaacatgtcttccccatccgagccatcggaaggcagcacctggcggcgacgcgatctggtgtccatggccaccttcaggttgattcagtgcattgaattactttacacatcagttaacaatttgcttatccacattcagattgaccaccgtggagcttattcgtcagcaggagggccccaaatcttctgttcgcttgcaggtggccgccgtttcctgtgacgaatgtggagccattccctgggatgagttgcaggtagactttatcgagggtttaccttttcttttgctggaatcttttcagttatttgtcattcattttttttttgtgttcgatttgtaaatacgaaaacggacattaattctatcgagattctttagttcctctaaagattttgctcaattcaatgtttgcgcttaactttttgcatgtttcgatatattttatctgaacattttccagtaaaatcacttttgaagtttatatatttttcaatctgttggggaatcccccgaaatgtttatttaaagccaaagaagtctttctgtaagataacttatcataaaatcatattctcattatattttctctctctctcttaaaacaaatgttaaatttactcaaaatcaatctcaatgtgtgctaatcaaaaccaaaaacaaactcaaaatcaattgttgtgctcaactctttataatcaacatgaaacgaacacttgtaaattaatttatgacaatccttacatgacacaactttcaacaattacaacaaccaacaacactccaacaataaaaagatcgcgcgtcaagcaaacaaggtatagaatatacaaaatttgaaatttttaaattagttaattattaagtattttattttggcgctttgtatatactacccaaattattatttattaacataatttaatggtttttggtgcgacatttttccttttaacgtagtgaacttttggcttgctcgcaaacgcattttggcgttactggcctctagttgagtagttatgagtttatcgtgggttcattcatagctggtagccactgggaatacctctgaaagtacgttgatcaaacattctgccctcatagcaatcgagatgctcttgcggaacttgtttgaaaatggtttactcattcgaatgttatttttgagcatgatgccggttagagaacagctatctccaactattttctagacctacccacacaataagtacatacctagatccccacctgaattccatttgattttataatttcattgttattggtattgctttgttgatgacttatgatttgcaacgaattggtttcttcagaaatatacgtttttttttcgaaagcgtacacatactgcataggcaaatacggccaaaagaagtacagtagaacaaaaaatagagcacccactgactaaaacattggcgtcctacacgactaacaactgtactggtaaaactaactaagtaactaaaaacacccgctgcttcaacaaaaataaacccattttccatctctcccataacacctacatcaacaccatcgaaacccacacaatcaaaaaacccacattgcatgatgttgcctctagcttagcatgttgttccttagctgtttccattccaaagtagctgatcacgagcacagatttatgagacttaaatctaacgcacgatatgctttctaaccccttcacttagacgaagttcggagcacgctgcaaggcttggaatctggcgccatataatccagaggctccaccgtgcatccggatgcgcttggaggagactttgaatatgccaaaggaaattgagggcatcatcgatcgcaaacgcatccagaggtaggtgatttatgcagtatctatttattgctcttaacttcttaatcaattttagctggatcactcaccacgccgagattcgtgtgaaagatatcaatatggatctgtccatgagcaccgtaattggactgggtgatctggccgaggatgaggtcatttccccgcccatgccactgaccgtaagatgatgtccccacatacgcatttctttcagatacttattacttggtaaatgtcataggtaaatctggaaaatgtgcggatcaacttgcttgaggaccgcccacccgtaaatattacctcaccgggtcccatccccataaatctgtgcattggtcgcatgcgtttggagcgtgaccagagcggattgctcaacattcagcctataggtgggatacgactatttacgaaaccaataattgatggccaaatataattatgctgtttaaaccaatagataccaacatgagtgacgcacagcatcaggcgttgggcagtgccttatttggagcacctcgtgaacgcgatcgggagctgttgtccatgcagctggtgatgcagcagatgaagctagacaacgatcaactgcgccgccagcttgtggactccaaagtgaacacggataattataggtgaacgtttatagttgtattgatctcatgcatttactcatgattgtcggaattctctataggcacaagaccaaacaggaggcggatgtgctgcgatcgtatttgaaagccgcccaggacgatataagcatattgttggaggagaagaaggctttgctggacaccatccgctccttgcaggtaattaaatgggtcggagttctttttgcctaaaaagactttctcaccagtttcactgtctctaactttgttgactgttatgatcaccttaccacctcttgctgttgttgttgtgcgtaaagttaaaacacgttaagcttaagaacactacaaataataatgcaaggatcaaaggtcagttaatgcccagcacgctagagccctgcctgcacgccttttgaacttttcacacgccttgctttagtttccacatcaacttccttgcaatgttctaatgagctgcactattttcttataggtacaactgacctcatcgaatatgagtcgaaagagtgatggaaataggtagcacaactgcatggactgcatacaatgc

SEQ ID NO: 7340 - DNA, 744 bp, DROSOPHILA
tccagcttcatgacttccattgactcggccatcaagtcgggcacgcccaatgacgatgccagtgataccttctccatacagagcgacattagctccgattcggataattttgccaatgttcttggcgatgacaagaccatggattgcatggatgttatgttccgacttaatcccttcaccacggacaatatgaaggcttctcccgtggaggtggccagtgaagtgtatgaggagcaaccgagtagctacaaaacaaacatgtcttccccatccgagccatcggaaggcagcacctggcggcgacgcgatctggtgtccatggccaccttcagattgaccaccgtggagcttattcgtcagcaggagggccccaaatcttctgttcgcttgcaggtggccgccgtttcctgtgacgaatgtggagccattccctgggatgagttgcagatcgcgcgtcaagcaaacaagacgaagttcggagcacgctgcaaggcttggaatctggcgccatataatccagaggctccaccgtgcatccggatgcgcttggaggagactttgaatatgccaaaggaaattgagggcatcatcgatcgcaaacgcatccagagctggatcactcaccacgccgagattcgtgtgaaagatatcaatatggatctgtccatgagcaccgtaattggactgggtgatctggccgaggatgaggtcatttccccgcccatgccactgaccgtaagatga

SEQ ID NO: 7341 - protein, 244 aa, DROSOPHILA
MTSIDSAIKSGTPNDDASDTFSIQSDISSDSDNFANVLGDDKTMDCMDVMFRLNPFTTDNMKASPVEVASEVYEEQPSSYKTNMSSPSEPSEGSTWRRRDLVSMATFRLTTVELIRQQEGPKSSVRLQVAAVSCDECGAIPWDELQIARQANKTKFGARCKAWNLAPYNPEAPPCIRMRLEETLNMPKEIEGIIDRKRIQSWITHHAEIRVKDINMDLSMSTVIGLGDLAEDEVISPPMPLTVR

SEQ ID NO: 7342 - DNA, 2847 bp, DROSOPHILA
agttgccggccaagtgttgccaggcaaatccggtggcatttcttagaatcggaaacgatttaagagttatggcaaaacgggcgtatcttatgacagccgttgtttggtttgtatattaaatgtacttctagtatcgattcgtgtttgagttttatggattgcaggctgctttggggcttcaatcaacgtttttttttaggggccacatgttgttcgccgttgtcctattttgctatttgtatattctttagttcaaagttcgacttttattagactaataaaactttatatttaccatttgcttgggtttgagcttggttgcttgtggtatctgttgctacaatacttcgttagtttgtttcaaaaagtaacccgtatttcaaattgttcagtatgtgattttagtgtgattgattgatcacaattacaacgttatccatgtggtaagttccattccgtttcagtttgtttcattgatgcggatctgtttaatgttttcttctcatcttgtttatactgcactggatcaacaaaagttggggctaataaaatgttcgctttgctttgttatctccacttgccgaattgttttcacttgttgtcagccagtaaattcgaatcgcttttcattcatcaaagagtctggagcagaatttaatggggcccaccctgatttaagatgaacgcgtaagcaaagtagaaataatcaaggcaatacatggaaacacgtctagcatttagttatctatgtgtgtcaataattttctagacttaagtgtggattgttagttcaattgtacattcgaaatgttcccatttgtatatcaagaggtgggttcaaactaaagccattgaaatctgtgcgccctccttctgatccttgttcttatgatgggtctggctatccgaaggctaatttcaaaacaaatcacgcacaaagaataaataacgttacagaactggattgggtggggtgttctgtagtggttccattagcttcctagtcccggatgaagacgaactcattgtagtggttccagcgattttcctctgtgtccacgcccggcttgggttccgctgccgagccggcagttccggatccgcagcttccggccatgcggtatccgtggtcgtgcagattgtcgaaagcctgctcgatgtagcagtgcttcaggaagaaccgcgaggtgtaccgatccgtgccaccatgatccggatcccgggactcgttcagcgtatcgccgaacacctcgcggcactgggccactcggccgcagaccaggatgcgcgacagcttccggaacttaacgtcggccagtccgtctttgccgaactggaagctgccacggtaaccgatggtgatgcatccgggtggtcgagcgtcccgctcgctgcggatgcactcgagcatggcggtcagcttaaagtgctccgcctcccgcagcagccgctgtcgctcgcggaatccttcgggaaggtgcagcgccttgtcgcgcaggaagtccaggatgtagcggaagaggacgccgtcacggtccaggaagtagcgacccttgctgtccttggccagcgaatcgcgaccctcgccaaagagttccgccagcagcgtgctcttatcctgcagcagtgtggccagtgtggtcgtgtagctcacgccgccgacgttcagctcgatgatttcgggcatgatgtatgccgtttaaggatcgaattagttatatccaacgaaactaatcacacatatggacactcgcgaacgtgggcccctatatgggtttgtttacagcttgtgtggtactggctgctgttgctttcctttcgttttctgtccgccaaacgcgtccgcactcgttcaggtctcgtgtcgaactgacggtgcttttggcctggccaaaatcagaacgcttttcactcgctcgttggtgtacatttgtgtgtatgcattgtggaagaggagagatttctctctggactcctctgaggaagtgtgccactctcagtttcattctctggcctgcgcactcgctggacgtgttttgatattggatattattgtttaacaagtggttaaatttctaaaatgtgcacggatacttctggcatatgtatatagccgctcgaagggttgcccgccgacttttgccgcccgcatgttattaatttgacgagggtccgcagtgcgtatacttaatggccaatatgctggattactctgttgtttaatgccagagatgctgctgcctaaattgtgcgtttgaaaagacgatttagcattagcattcagctggcgtaaggtgggtacccctatttggggcaaagttcgctgccatgtcatagcaaattatggcacatggcatactttaaggcgtcgcacatactttgtgcctcggcatgccaactatcctggttgattttttcgcaatgtatgtgtgtgctggcggaaggaagggaagggagggcttccccgagtggcaacaggccgctgacaatttgacaccgtgacactgacattaacatgccacagcagaccatgcaactggttgggctgccttggccagccagccagccagttttggcctcgtgccaaatgggccactctgccctcggtttgggcgacatcaacgccagactgcttggtgtcctgttagcagcctcacctgtttgctgttaacattccacgaaatgtcctttgtttgccaggacatgcgtgccactcgctgcaattgaatcaacaacagcgggacgcaacgaatacgcagtctctggcctactccccctacaagagtacatgtgcaccccctactgcgttagccctttgattcgtccgagacgagctggagatacaca

SEQ ID NO: 7343 - DNA, 847 bp, DROSOPHILA
tgcggacgcgtttggcggacagaaaacgaaaggaaagcaacagcagccagtaccacacaagctgtaaacaaacccatataggggcccacgttcgcgagtgtccatatgtgtgattagtttcgttggatataactaattcgatccttaaacggcatacatcatgcccgaaatcatcgagctgaacgtcggcggcgtgagctacacgaccacactggccacactgctgcaggataagagcacgctgctggcggaactctttggcgagggtcgcgattcgctggccaaggacagcaagggtcgctacttcctggaccgtgacggcgtcctcttccgctacatcctggacttcctgcgcgacaaggcgctgcaccttcccgaaggattccgcgagcgacagcggctgctgcgggaggcggagcactttaagctgaccgccatgctcgagtgcatccgcagcgagcgggacgctcgaccacccggatgcatcaccatcggttaccgtggcagcttccagttcggcaaagacggactggccgacgttaagttccggaagctgtcgcgcatcctggtctgcggccgagtggcccagtgccgcgaggtgttcggcgatacgctgaacgagtcccgggatccggatcatggtggcacggatcggtacacctcgcggttcttcctgaagcactgctacatcgagcaggctttcgacaatctgcacgaccacggataccgcatggccggaagctgcggatccggaactgccggctcggcagcggaacccaagccgggcgtggacacagaggaaaatcgctggaaccactacaatgagttcgtcttcatccgggactag

SEQ ID NO: 7344 - protein, 228 aa, DROSOPHILA
MPEIIELNVGGVSYTTTLATLLQDKSTLLAELFGEGRDSLAKDSKGRYFLDRDGVLFRYILDFLRDKALHLPEGFRERQRLLREAEHFKLTAMLECIRSERDARPPGCITIGYRGSFQFGKDGLADVKFRKLSRILVCGRVAQCREVFGDTLNESRDPDHGGTDRYTSRFFLKHCYIEQAFDNLHDHGYRMAGSCGSGTAGSAAEPKPGVDTEENRWNHYNEFVFIRD

SEQ ID NO: 7345 - DNA, 3236 bp, DROSOPHILA
ggatgcagaaattaatgtcttttggttgtatgtcaatcgatttccacacactatgtctgtgattactttcaaaccgaggacatcttgtaaatcgcattaaattattcattgctgcgaaataaattatttatatatttcctttccaaaatgttcatatgtatgtttaaacttatgattgttggataagccattgatatagcaattgtaaatatattatgtgcaattctccttattttctaagacattcttaataatataatgcgaactaaggttacattccatctgcgcatgcgtgagtccttttgctcagcaggaacgaaagtacaacgggtcgtatgagttatggcaatcgaatgggcacacgtggccgccggtccaatggccagtaaatcaaactttttggcagggcgtgtaaacagtgttataaatcagaaaaccacaaggcagccaccaggcagcgaccatattgtccatggaggaaagcagacagttggcagacttaagtcggacgaaaagacatccacccacgcggacggattgcaatgtgccaggatgcaagtgacgcatagtgctattaacatattaccaggcggaaagtgggtggataacacattcagtcggtggatggaagtgcgtgcatagaacatagagctgccagcgaacattggagcaattggagcactgggtgctaaatatgagcacttgatgaaaacataacactgactaaacaagatatttctctgcggctgaatttatctagcgaaagcacgccataagttagtttgtatatatgaggtggcgaatttacgacgatttactaagattttaatgtactcttccttggttagaggatagaaagcatgaaattgaatagcagtgcaataaatccgtactaatttccattcgtttttgcgtattatccaatatcttaagggtcattccccttgtgtgtatatataggaacaaagttagtttaagaagctcattggggctgtggaaaatgggcaaccatcaagtaatattcttagtactgtgcacgtcgctcctctttcaaaatacaatacaacaaaatgtatcatttcaactgataagggaaatcgatagatacacaccagagaattttgtactatcagtgttgaatatagaaatgattctttttgagatccatgccgctaaggcagttgaaagtaataacgatttggaaaggagcttgatcataaactttggatactccgaagcaaggcaggaagtactggattggggattgagatataagaaagcctcgagcgccaagttccagatggccaacaaggtggcagtgtctcagaaactgcccctatcgcaaaagctgcgtctggtaaacgaggtgctgatgacgagcgccaagaagtatgatgtaacaaaggatgtcagaccatcaaaattaatggatgaatggttgtcctcccatttggatggtgtactcgccaattttgtacaagagaagaagttaaacgcgggcgaaaacattgtagccatcagcggaatgacagtcactcccctttgggcatctcatttccaatcagagattaatagatactttgtcaataatcctggcactggatatgcttcgaaagacccaacatgtgtgcccatgatgcactcattgtcctcgtttgaaaccatgtccacggacgaggccaaaggtatatacattccattctcatcggcaaacttgggtatgttgatcctcctgccgaggaaaggtgtcacctgcaaggacattttggataatttaaacaaccagatcaatgtggaatataatgatcacaaggatgttcacttgctactgcccatattcaaggagaaattcgactacaatattgccaaattctttaacggaattaacattgaagacacgtttaaagattcggcgtttaaatcgaaagccaaaatcaaaatcaacaacttccgagtcaaccatggcatacgatttcaacccattctccgtttaggtaatcgaaatactcgtactatttactgttctttacattaacattaatatattttattccacattttagaagtagttgatgatattgatactggaaagaccgaaacgtttgaagtaaatcgcccattcgtctttgtcataaaggataagattaacgtatacgcagttggtcgaattgaaaacctagatggacttactgacaaagtgaattgctccaagaaatacgctgatctcaagtcgtaaaatatccataatatatttcgaagcataataaagcaaaaaaatataaataaaaaggttttattttacatgtggatattgatccttacataactccttccataataataatgacattagtccgtttattttttaattagttactattttgtaatcacactttttaaagaccgtgtcaaatcgattttaatttcatttcattttccttttaaaagataaaaggtaagtttattttctatattacaagtcagataatttccataattttttttttttgctgagatcatttatgtgagaaggaaattgcgatctttaatgtctgcctgcaaaagttatgttataacattgaatatttgttatggtttaatttatcatttaatcattccgagtatacaaattataaaaatccgctgtttaaaattaataatatgagagatgcgagacagtaataaatttaaaagtgtgtcagtaattcgattagagttggtgctgagatgcagacgatgatgaatatggatatgacttggatgggcacagtctggaaatggaacagggttctcggatggaattgagtgcattggtatatataccatatatgtatgtatatacgaagtacatgcagagtgtgcgttgagtgatgtgcgcatggataatgaagcaatgacggcatgactgacaaaatgaggcggcaacctctatatagaatcggcggggaaggtttctctcaaaggggcagccgcccatgcacgactccacccgaacccactccactccgccggcggcttgagctgcgcttgcggcttgagcgtttaattaaaaggcaacaaaaagaggaaaaacacgaaataaaggaaaatatatacatatatactcgtacagatatgtaaaagtataaagaaaaaggcggcagctgaggcgtcggccagcagttgatcattatcagatacggcagcgtagataatgcagatacaatctcggggtttcgcgggggtaatggatgcag

SEQ ID NO: 7346 - DNA, 1167 bp, DROSOPHILA
atgggcaaccatcaagtaatattcttagtactgtgcacgtcgctcctctttcaaaatacaatacaacaaaatgtatcatttcaactgataagggaaatcgatagatacacaccagagaattttgtactatcagtgttgaatatagaaatgattctttttgagatccatgccgctaaggcagttgaaagtaataacgatttggaaaggagcttgatcataaactttggatactccgaagcaaggcaggaagtactggattggggattgagatataagaaagcctcgagcgccaagttccagatggccaacaaggtggcagtgtctcagaaactgcccctatcgcaaaagctgcgtctggtaaacgaggtgctgatgacgagcgccaagaagtatgatgtaacaaaggatgtcagaccatcaaaattaatggatgaatggttgtcctcccatttggatggtgtactcgccaattttgtacaagagaagaagttaaacgcgggcgaaaacattgtagccatcagcggaatgacagtcactcccctttgggcatctcatttccaatcagagattaatagatactttgtcaataatcctggcactggatatgcttcgaaagacccaacatgtgtgcccatgatgcactcattgtcctcgtttgaaaccatgtccacggacgaggccaaaggtatatacattccattctcatcggcaaacttgggtatgttgatcctcctgccgaggaaaggtgtcacctgcaaggacattttggataatttaaacaaccagatcaatgtggaatataatgatcacaaggatgttcacttgctactgcccatattcaaggagaaattcgactacaatattgccaaattctttaacggaattaacattgaagacacgtttaaagattcggcgtttaaatcgaaagccaaaatcaaaatcaacaacttccgagtcaaccatggcatacgatttcaacccattctccgtttagaagtagttgatgatattgatactggaaagaccgaaacgtttgaagtaaatcgcccattcgtctttgtcataaaggataagattaacgtatacgcagttggtcgaattgaaaacctagatggacttactgacaaagtgaattgctccaagaaatacgctgatctcaagtcgtaa

SEQ ID NO: 7347 - protein, 388 aa, DROSOPHILA
MGNHQVIFLVLCTSLLFQNTIQQNVSFQLIREIDRYTPENFVLSVLNIEMILFEIHAAKAVESNNDLERSLIINFGYSEARQEVLDWGLRYKKASSAKFQMANKVAVSQKLPLSQKLRLVNEVLMTSAKKYDVTKDVRPSKLMDEWLSSHLDGVLANFVQEKKLNAGENIVAISGMTVTPLWASHFQSEINRYFVNNPGTGYASKDPTCVPMMHSLSSFETMSTDEAKGIYIPFSSANLGMLILLPRKGVTCKDILDNLNNQINVEYNDHKDVHLLLPIFKEKFDYNIAKFFNGINIEDTFKDSAFKSKAKIKINNFRVNHGIRFQPILRLEVVDDIDTGKTETFEVNRPFVFVIKDKINVYAVGRIENLDGLTDKVNCSKKYADLKS

SEQ ID NO: 7348 - DNA, 7740 bp, DROSOPHILA
tccggaaggtacaccagcgcatatctgcttctcactgggataaacagacaattccatatagcactcttcacgatccaaatgattaaggatgattgtctgaagtatatcggatgtcttgttgccgcgtaatgttccccatccaaaggctttaaaggtccgcatgttgcgcatatggttggccatactcttgttcaaaacgatgcagattggacgaataagggctggaaatagtaaggtatggtttgtaacactttctggggggacgaacaaatcaatcacttgccattaaagataacgtcgctggacagctttagcaggccaatgtcattttcataggaagcacgaacgtcaaacgaactatgcactactgctgttatgacgtctttccgatctgcaggatcactcttgttgtaggcacccaaactcactgatctgttaatatcggaatgagaatcatcttcacttcaaagtaaatcaaattatactcactggacgtcttggtcaactatgcaatgcgcagctgtcaaaacgaatcctaagaaagcaatatttgtattattaattaatctcgttccgttgaaatatacaaacgcttatgaatcagcgtgccaccgcagataaaatgtgtccgattgtgtacagctgccatccagacagaattttgaaatgctgcattatgcccgccggtgattttgagtgcgatattgattccacagatctggtccaagaagattgaagcacccacatctttgaggaaccaaaaaatgacgggaatccaagccagacgtgtctgcatctcatgagatgttcgaatgaaataggtgataaccttagcatgagcataataccatagcaagtatttcataaaaaaagaaacccttatcatactagactataaatactaaataaagttcagtacacacatttcgcgtgaagtaaaaacacagtttttttttttttaattttaataaagatttaagatttaagatttttaattttaactggtattcttatttcatgaaaactgaacaagcaaaactattgagttatgcaacacatttattatgaactcaacgataattcataaagctcgatctgaaatagtaaaatttaatatttcgttagtcgtatgcattcttggaaatacttatataagtatgcatatgtatgtatgtcggtcgaacttacccgccaaacgctggtttctgtgcatttgagtttccagtctgtgctagatttccgaaagagagtcccgattcctgtccccccaacgtttcaaaaatgtttccctgtgccggctttgcagcagcaccaaagggtggaggggaggctactgggctggcaccgccaaatccaccgaaacccttcggactgccaaaggtggcacctcccccaaaagtggggctagctccaaaggccggggatccaccgaaaacgggcttggctccaaacccacctggtgtcgtagtttgctgctgcggggcttgtggtgagccaaaacctgtctgggccacagatccacccccgccctggccaaatccaccaccgaagcccccctgagctggtgtcgtctgcgtgaaggagccaaatccaccagagctgctgccacccccaaagatcgatccgccagatgcgggcggagctgttgctggtgatccgaaaatagagtttcctccgccaccaaaaggagaagcttgcggactgccgacgggattggagaatatattcccacctgctgccggtgcagccgctgatgattgaccaaacactttttggccaaaaattgaagtacttcctgcagccggagcgccgactgcgccctgcgtattacctcctccaaaaattgagctggatccaaaaggtgtactggcggatccgccaccaaaaatagatcctccgctatcgcctgcttgtgctggttgtccaaagacacttggcttaacagcctgaccaaaaatgttaccgccagaggctggtgctctagtcgtgggactaccaaacggcgaagggttactaatcgcggccgatgcaaagagacccgctggtggtgcatctggtgttgccgcagccgtggtgtttgaaggagcagttgtagctcctccgaaaacgctggtctccgccttaggtatactgccaaaaatgtttgcactcgaaactggactttttgcagctgactgaaagggactagccactggagccgctgttgatgttgctactgcgaagccaccaccaaacactgaattcgacgagttattgcctgtagatgtagcggttgggcttttggcagctaagggagctgaagcgctggtagttggagctgcagcacctcccgcacttagggtgctaaatgcgtttgagaaggagaacgcactgccgggaacagcagtgctagatgttaccgttgtgctcgatgttgccggaactgctgcggtaactgccgcaggaactactgctggactagacacagtcgtcgtagcagtagtagtcgaaatggctgatggggtggttgaaataggatcagttttgttgttcgcctccgtcacacttgtgggagctgttgccactggtttggtactgccgaataatccctttgaggcatcaatcgttccgccaaatgaaaagctaccagcggataaacctcctccaaaaatgttggctggtttggtggtatctgcaaagtaaaagacatatatagccgtttagagtttatgccaaataagcgtatacatttatgcgtaaggtatattgataaaggaaactatagcttacctgcaggagtgttgggcttgcagatagtcacagagctaaagaggcctccaataggatccgtgctgctggtcactgcatttgttgtggtgacggaaggagcatcagttacgctgctcgaagcaattacattcgtaggcttgctggtgatggtggttgtgttgctagtgaccgtggtgatcggttcagagttggatggtttcgccaaagctgctgagaagatgccaaatggtgcagttgaagctgatgtggctacactagtggttgctgtgctggaaggttcagattttggcacagcagcggctgttcctccgaagcctagagatgaacccagtccgccaaagctgaacggggagctggaagtatttccgacagtacctccagttcctgtaaatcctccaaatccaaaggatttgttttccgtctctgcctttggtttttggggtacttttgactcttctgtttcgggttgtaccgccttgaattctttgctttctgctgctttctgctctttgggcttagtcggctcgggtgttggtttttcgaccgctgacaacgggtttggttttggtgtaggagctgccacggctggcgatcctgttccgaatgagagtgccgacttggcagcaccaccaccaaaactaaagctggaaatagtactgccgccgaaaatggataaacccggcttggctgcttcgccaggagtcacagtatttgtcgttggcgtcacagtagatgtcttcacaaatgggatgctttggctgaaggaaaatggcgtagccactggagttgtcggatgtgtgggcactccaggcttttccacaacggacggtatagatggcattggtttaggcagcggaggagccactgtaacagttgcttgtggcatgggtgcaacagctggcgtgggtgcaacatctggtggtgaaggcggagcgactgctgcttgggtgtatttgttggctgttgcaggcttggctgctgcccttttaatttgctccgccctacgtttcgtttccaaaataacctccgacttgagccccactcgatctggtcgctggggacaaataacattgatcttctgcagctgaacaatattacggattttttgtagtctttctcgagtgagcttggctgcattagagtccactacctggctaagactcatcgtgagaatggagtcggtcaatgtatccactctaaataaaaaagttatagtcgcataaagagagaggtcacaataacttctactaacgcttcgttggtgcgggtgcgacttttctcctggtcgagcagtgcggcctgaagcaatccgcgctccttcagtttggacttgatgttgttctgtacaattcgctggttagaagttagattttgtagtcttgtcagtcgttgatagattccctctaggcaaggcatgtgcatgcgagacttcgaattgcgccgcacaacatcctgaaactgttcccactgcaaatcgacatgctgctgggcaagacgcagctgggcctcattggcagccacgtagctctgaagacgagctagcatgcgacggccagagggatcacaggagcttgagttcattaaacgcgtaatcctaaacgaaaattacgggttttaaatagcttatatattcaaagagtcctttacccactctggttttctataaatctccagtttcccgcggcactctgctacgatggcataggcctcattaagaccctgtcgcaatccctgtacatctaactcgaactccacatccttggcttgttcattgagctcttggaggtcatccagtctctttgcgtatgccctcaaagcagatggtgctgcaatctgcggaataacaactttaatacatgaagcagtgtaataccaacactacttacgcctttgaggagttccttcgtctgttccttttgcttttggatatccttgctaaaggcttcgatttgtagggcaatcatgtccttgataataggctcagtgtcatcaggcttaagactttcatctgcgatttgtggaggagctgaagtggctggttttgtgtccactggtgtgaatgttaaaggaaccgtgtacagtggtttgtttgctggagcagaagcaggagttgcgggtactgttgacccaggtgccgctgttcggggtgtcacactggcaatagccggtttattcaatgccattcccccaaaggcatttgctcctgaagccgaaaacatgcttcccatggcagtagtcgttgcctgcgtgccaaacccaccaaacggtgttgttggcttggctgcattggtagttggagcaccaaacgaaaccggactagaagtcggagcagtaccaaaagatagttgcggagcaggtgccttagctgcagctgctccaaagccagaaaacaatgatggttgcttatccttcgagggagctggggttgaagtaacggtattcggtgtaaatgcaaaggatatgtccgaggaagcagcaggagttgcagctggagccttggagggactggctgcccaagctggctgctcttcttcctcactagcaagcagcatattcaacggcttgaactgcccagaagtatcggccactggaggaggtggcgaacaaacagacaccgccgtcggcagcacattaagaaagttgaacgagagcaattctccatccgaactcaaaacatgaaccatgggcatagtctgcagcttcttctcatttatcgtcagctggtgcgttgtagaagtgtcgaaggcaaagcccagcgggaaggtctcatccttgtcctcacttaggggcatttcaatgcgtgcctcatccagcaatgtaagctgctgccaagcgggtgtatcgccggcctcggttgaccgcatgatgcccacctctacgccattggccgagactacgagcagcagattccactggggcacatggctaaatacgaactgatgattcctcgggccgttcatgctatagcagatgtcatagtagtttatgtagctgggcgcaccagccttgggagcatttagaatgtaaagcgaggggctacagtcctcgccatgctggagaaagatcactgcaaactggaaagtcgacagccactgtatagcaatggtgtcaaagggggcatcatgtatattcggaggacacaaaagcgtcttggccagagtcagatccggcttgaactgcttcaccgtgccgccgggaaaaccaagaacgatctgtttgcccttgggcgaccagcagccgcacttaacttgttgatttttgtccagcgagtgcatttcaaagtttcccccctccttcagggcatacatcgcgagcgctccgttgctcaaaacaacggccaggctgttgggcagcacgggattccagaggagctggacgccgtgcacgtgatcctcggcggcgaggcgaatattataaacaggacgtacatcaggggtcatgaacgatagcaccgcatatatgctgagcaggctggtgccgttctgggtgtgattcacggccagcaggttgccatcggagctgcaggcaatgtaattcggaatactgggcagtggcaccagacgcgcctgcggctgttgggctgtgctcttcgcattgaccaaatcctttacaataatcactgcaaggagtgccaggataaatttatatatttagcctagctaactcaagctacattacctttgagttccggctgcgttggactcccggcaaagagcaatccccggctactggagaccgccagcaggttcacattgctgcggggctcaccgcattttttgaacgcaacaatcttgtggtgcagtttgaattgaaagtcctgcgaccaaaaccaatggaatgtttgacatctcagtgctatgcaattgtgcttacctgcgtgtcctcgcagtctggtgcattctgcgccatttttgtctgttttcgctcctatttcgccaaattttttgcggcttgtcgatttcccaatcgagtcgatggtgtggctgcaagttgagatcgttggaaacgttggcaagcaaaaagcgcgccacttgcagtacggtcactttcaggaaactcaccacaaaaactcaccaccaaaaaatccaacaacatatacaatacaatctgatttaaatttcatagatgttcctttaaaaagaaaatgggataaaatcttatataaaaatagttttctcctataactaactgatgaacttgttaactaaaagaaaccaacttagcttgaattaagtattcaccaatcttgtcttagcggttgaccatatggcaattgcactttgttggtattttttcagacggtattttgttttggacagtatgtgcgagaacgaaaatttcagcacatcgctagcgcagcagccttgttgttgttcgtctgtctctgtcctacaagcgtttctttttgtttgctgagaattaaacaaaagcgatttgttcgcgggcaatgcgaatgcatttgcaaagcagggcacaaagcatcggctgtttcgactgtgattgcacaaagccatgtagtagaggtcgagctggcgattcgcaattatccacaggcgacgcaacacggtgctaaaaattgcgtagccaattaatctcgaaatccttcgaattcaatcgcagttaccaaaaagtaaatgaaatttaaatcgacttaaacagaaatctgtggattttatttcgatattgcccataaagtaccccaaatcacataatttacggaaaagtcaaggaaattccaggtgaaaattggggttggaaaggaggccaggataacggagtggactctaattaaataccctacagttttcccctagagcagccaggcgacgctcaagatgatcagcagcctgttttcgcggcttataatgtgagtaataaccgattactactatagcaaatcccgacttcatagccaccgcaagtgagtgtgagtgcgagtgagagcgctacagctgctgacccccaaaaaaa

SEQ ID NO: 7349 - DNA, 5269 bp, DROSOPHILA
ctcgattgggaaatcgacaagccgcaaaaaatttggcgaaataggagcgaaaacagacaaaaatggcgcagaatgcaccagactgcgaggacacgcaggactttcaattcaaactgcaccacaagattgttgcgttcaaaaaatgcggtgagccccgcagcaatgtgaacctgctggcggtctccagtagccggggattgctctttgccgggagtccaacgcagccggaactcaaagtgattattgtaaaggatttggtcaatgcgaagagcacagcccaacagccgcaggcgcgtctggtgccactgcccagtattccgaattacattgcctgcagctccgatggcaacctgctggccgtgaatcacacccagaacggcaccagcctgctcagcatatatgcggtgctatcgttcatgacccctgatgtacgtcctgtttataatattcgcctcgccgccgaggatcacgtgcacggcgtccagctcctctggaatcccgtgctgcccaacagcctggccgttgttttgagcaacggagcgctcgcgatgtatgccctgaaggaggggggaaactttgaaatgcactcgctggacaaaaatcaacaagttaagtgcggctgctggtcgcccaagggcaaacagatcgttcttggttttcccggcggcacggtgaagcagttcaagccggatctgactctggccaagacgcttttgtgtcctccgaatatacatgatgccccctttgacaccattgctatacagtggctgtcgactttccagtttgcagtgatctttctccagcatggcgaggactgtagcccctcgctttacattctaaatgctcccaaggctggtgcgcccagctacataaactactatgacatctgctatagcatgaacggcccgaggaatcatcagttcgtatttagccatgtgccccagtggaatctgctgctcgtagtctcggccaatggcgtagaggtgggcatcatgcggtcaaccgaggccggcgatacacccgcttggcagcagcttacattgctggatgaggcacgcattgaaatgcccctaagtgaggacaaggatgagaccttcccgctgggctttgccttcgacacttctacaacgcaccagctgacgataaatgagaagaagctgcagactatgcccatggttcatgttttgagttcggatggagaattgctctcgttcaactttcttaatgtgctgccgacggcggtgtctgtttgttcgccacctcctccagtggccgatacttctgggcagttcaagccgttgaatatgctgcttgctagtgaggaagaagagcagccagcttgggcagccagtccctccaaggctccagctgcaactcctgctgcttcctcggacatatcctttgcatttacaccgaataccgttacttcaaccccagctccctcgaaggataagcaaccatcattgttttctggctttggagcagctgcagctaaggcacctgctccgcaactatcttttggtactgctccgacttctagtccggtttcgtttggtgctccaactaccaatgcagccaagccaacaacaccgtttggtgggtttggcacgcaggcaacgactactgccatgggaagcatgttttcggcttcaggagcaaatgcctttgggggaatggcattgaataaaccggctattgccagtgtgacaccccgaacagcggcacctgggtcaacagtacccgcaactcctgcttctgctccagcaaacaaaccactgtacacggttcctttaacattcacaccagtggacacaaaaccagccacttcagctcctccacaaatcgcagatgaaagtcttaagcctgatgacactgagcctattatcaaggacatgattgccctacaaatcgaagcctttagcaaggatatccaaaagcaaaaggaacagacgaaggaactcctcaaaggcattgcagcaccatctgctttgagggcatacgcaaagagactggatgacctccaagagctcaatgaacaagccaaggatgtggagttcgagttagatgtacagggattgcgacagggtcttaatgaggcctatgccatcgtagcagagtgccgcgggaaactggagatttatagaaaaccagagattacgcgtttaatgaactcaagctcctgtgatccctctggccgtcgcatgctagctcgtcttcagagctacgtggctgccaatgaggcccagctgcgtcttgcccagcagcatgtcgatttgcagtgggaacagtttcaggatgttgtgcggcgcaattcgaagtctcgcatgcacatgccttgcctagagggaatctatcaacgactgacaagactacaaaatctaacttctaaccagcgaattgtacagaacaacatcaagtccaaactgaaggagcgcggattgcttcaggccgcactgctcgaccaggagaaaagtcgcacccgcaccaacgaagcagtggatacattgaccgactccattctcacgatgagtcttagccaggtagtggactctaatgcagccaagctcactcgagaaagactacaaaaaatccgtaatattgttcagctgcagaagatcaatgttatttgtccccagcgaccagatcgagtggggctcaagtcggaggttattttggaaacgaaacgtagggcggagcaaattaaaagggcagcagccaagcctgcaacagccaacaaatacacccaagcagcagtcgctccgccttcaccaccagatgttgcacccacgccagctgttgcacccatgccacaagcaactgttacagtggctcctccgctgcctaaaccaatgccatctataccgtccgttgtggaaaagcctggagtgcccacacatccgacaactccagtggctacgccattttccttcagccaaagcatcccatttgtgaagacatctactgtgacgccaacgacaaatactgtgactcctggcgaagcagccaagccgggtttatccattttcggcggcagtactatttccagctttagttttggtggtggtgctgccaagtcggcactctcattcggaacaggatcgccagccgtggcagctcctacaccaaaaccaaacccgttgtcagcggtcgaaaaaccaacacccgagccgactaagcccaaagagcagaaagcagcagaaagcaaagaattcaaggcggtacaacccgaaacagaagagtcaaaagtaccccaaaaaccaaaggcagagacggaaaacaaatcctttggatttggaggatttacaggaactggaggtactgtcggaaatacttccagctccccgttcagctttggcggactgggttcatctctaggcttcggaggaacagccgctgctgtgccaaaatctgaaccttccagcacagcaaccactagtgtagccacatcagcttcaactgcaccatttggcatcttctcagcagctttggcgaaaccatccaactctgaaccgatcaccacggtcactagcaacacaaccaccatcaccagcaagcctacgaatgtaattgcttcgagcagcgtaactgatgctccttccgtcaccacaacaaatgcagtgaccagcagcacggatcctattggaggcctctttagctctgtgactatctgcaagcccaacactcctgcagataccaccaaaccagccaacatttttggaggaggtttatccgctggtagcttttcatttggcggaacgattgatgcctcaaagggattattcggcagtaccaaaccagtggcaacagctcccacaagtgtgacggaggcgaacaacaaaactgatcctatttcaaccaccccatcagccatttcgactactactgctacgacgactgtgtctagtccagcagtagttcctgcggcagttaccgcagcagttccggcaacatcgagcacaacggtaacatctagcactgctgttcccggcagtgcgttctccttctcaaacgcatttagcaccctaagtgcgggaggtgctgcagctccaactaccagcgcttcagctcccttagctgccaaaagcccaaccgctacatctacaggcaataactcgtcgaattcagtgtttggtggtggcttcgcagtagcaacatcaacagcggctccagtggctagtccctttcagtcagctgcaaaaagtccagtttcgagtgcaaacatttttggcagtatacctaaggcggagaccagcgttttcggaggagctacaactgctccttcaaacaccacggctgcggcaacaccagatgcaccaccagcgggtctctttgcatcggccgcgattagtaacccttcgccgtttggtagtcccacgactagagcaccagcctctggcggtaacatttttggtcaggctgttaagccaagtgtctttggacaaccagcacaagcaggcgatagcggaggatctatttttggtggcggatccgccagtacaccttttggatccagctcaatttttggaggaggtaatacgcagggcgcagtcggcgctccggctgcaggaagtacttcaatttttggccaaaaagtgtttggtcaatcatcagcggctgcaccggcagcaggtgggaatatattctccaatcccgtcggcagtccgcaagcttctccttttggtggcggaggaaactctattttcggatcaccagcaacagctccgcccgcatctggcggatcgatctttgggggtggcagcagctctggtggatttggctccttcacgcagacgacaccagctcaggggggcttcggtggtggatttggccagggcgggggtggatctgtggcccagacaggttttggctcaccacaagccccgcagcagcaaactacgacaccaggtgggtttggagccaagcccgttttcggtggatccccggcctttggagctagccccacttttgggggaggtgccacctttggcagtccgaagggtttcggtggatttggcggtgccagcccagtagcctcccctccaccctttggtgctgctgcaaagccggcacagggaaacatttttgaaacgttggggggacaggaatcgggactctctttcggaaatctagcacagactggaaactcaaatgcacagaaaccagcgtttggcgggatcgagctttatgaattatcgttgagttcataataaatgtgttgcataactcaatagttttgcttgttcagttttcatgaaataagaataccagt

SEQ ID NO: 7350 - protein, 1714 aa, DROSOPHILA
MAQNAPDCEDTQDFQFKLHHKIVAFKKCGEPRSNVNLLAVSSSRGLLFAGSPTQPELKVIIVKDLVNAKSTAQQPQARLVPLPSIPNYIACSSDGNLLAVNHTQNGTSLLSIYAVLSFMTPDVRPVYNIRLAAEDHVHGVQLLWNPVLPNSLAVVLSNGALAMYALKEGGNFEMHSLDKNQQVKCGCWSPKGKQIVLGFPGGTVKQFKPDLTLAKTLLCPPNIHDAPFDTIAIQWLSTFQFAVIFLQHGEDCSPSLYILNAPKAGAPSYINYYDICYSMNGPRNHQFVFSHVPQWNLLLVVSANGVEVGIMRSTEAGDTPAWQQLTLLDEARIEMPLSEDKDETFPLGFAFDTSTTHQLTINEKKLQTMPMVHVLSSDGELLSFNFLNVLPTAVSVCSPPPPVADTSGQFKPLNMLLASEEEEQPAWAASPSKAPAATPAASSDISFAFTPNTVTSTPAPSKDKQPSLFSGFGAAAAKAPAPQLSFGTAPTSSPVSFGAPTTNAAKPTTPFGGFGTQATTTAMGSMFSASGANAFGGMALNKPAIASVTPRTAAPGSTVPATPASAPANKPLYTVPLTFTPVDTKPATSAPPQIADESLKPDDTEPIIKDMIALQIEAFSKDIQKQKEQTKELLKGIAAPSALRAYAKRLDDLQELNEQAKDVEFELDVQGLRQGLNEAYAIVAECRGKLEIYRKPEITRLMNSSSCDPSGRRMLARLQSYVAANEAQLRLAQQHVDLQWEQFQDVVRRNSKSRMHMPCLEGIYQRLTRLQNLTSNQRIVQNNIKSKLKERGLLQAALLDQEKSRTRTNEAVDTLTDSILTMSLSQVVDSNAAKLTRERLQKIRNIVQLQKINVICPQRPDRVGLKSEVILETKRRAEQIKRAAAKPATANKYTQAAVAPPSPPDVAPTPAVAPMPQATVTVAPPLPKPMPSIPSVVEKPGVPTHPTTPVATPFSFSQSIPFVKTSTVTPTTNTVTPGEAAKPGLSIFGGSTISSFSFGGGAAKSALSFGTGSPAVAAPTPKPNPLSAVEKPTPEPTKPKEQKAAESKEFKAVQPETEESKVPQKPKAETENKSFGFGGFTGTGGTVGNTSSSPFSFGGLGSSLGFGGTAAAVPKSEPSSTATTSVATSASTAPFGIFSAALAKPSNSEPITTVTSNTTTITSKPTNVIASSSVTDAPSVTTTNAVTSSTDPIGGLFSSVTICKPNTPADTTKPANIFGGGLSAGSFSFGGTIDASKGLFGSTKPVATAPTSVTEANNKTDPISTTPSAISTTTATTTVSSPAVVPAAVTAAVPATSSTTVTSSTAVPGSAFSFSNAFSTLSAGGAAAPTTSASAPLAAKSPTATSTGNNSSNSVFGGGFAVATSTAAPVASPFQSAAKSPVSSANIFGSIPKAETSVFGGATTAPSNTTAAATPDAPPAGLFASAAISNPSPFGSPTTRAPASGGNIFGQAVKPSVFGQPAQAGDSGGSIFGGGSASTPFGSSSIFGGGNTQGAVGAPAAGSTSIFGQKVFGQSSAAAPAAGGNIFSNPVGSPQASPFGGGGNSIFGSPATAPPASGGSIFGGGSSSGGFGSFTQTTPAQGGFGGGFGQGGGGSVAQTGFGSPQAPQQQTTTPGGFGAKPVFGGSPAFGASPTFGGGATFGSPKGFGGFGGASPVASPPPFGAAAKPAQGNIFETLGGQESGLSFGNLAQTGNSNAQKPAFGGIELYELSLSS

SEQ ID NO: 7351 - DNA, 4272 bp, DROSOPHILA
ctggcgggtcggaaaacgcagggtatgcgagccagcagcgacaagacgaggatcaggacaccgaggagcagcacctcgatctggaggagcagcacctggacccggaggagcatcacctggacctggaggagcagcacctggacccggaggagcagcacctggacctggaggagcaccacctggaactggaggagcagcacctggacccggaggagcagtcactcaatccggctgtgaccgaggacacgcagatcaccattgagtcgatgaaggaatccgatgaggagtttcaatcggccgccgagaccgaggaggacgacatggtcggcctgatcatggaagaagaggaggaagaggagtttgtgtacgataaggatctgtagaggactaatcgatgtccaatacccgcatctttagtctcttttctacgccggcctcctggactttagcttaggtaaaagttttcgtgaaaagttttcaataatacgctgcaataggaaatttaacaaaataatccgcatagctttctgactgactatcgtttttttttttaaataccaggaaagggtttttaaaaattcaaaaagcattggtactattacacttttttaaatattgcattgactttgtaagaaagtttaataacaaatttatagcaagtcttcaataaacaagaaaatatttttttttacaaattttgaatttttctaagtggaacattttttgcgagaaatgtgaaaaaataaaaatgttcaggcttgaatgtcagtcgatttggattttaattacaagctcaacgatgcatcacacttcatctttcgccaattatttccgacgttgtggccaaaaaactagcagatttcggacgcaaagtcgaaatttggccaaaatatgtcgatgtgaattttcgagcgaccttacattaattttccatttccttagaatgagcaaggaaatgacttaaacaaatgggaataaagaataagggctacgactttgcttagtcatcgtcctcctcgtcatcatcttcttcgctggattgatccaaccaagccacgagcttggcgaggctttggcgcaggtgtgcatgctcctcctcgtccaactgcgcgtaccacgcctgaatggcactctcggacacaaagtccttgtcgtacagatagtgcacgatctgcgagatcttcccccgcactagatgattctcctcgtacacatcctgcgggaaaagggattggtaaagtgggtgtgggtttgtgtgaaaattatggggacttcacctccagcgccttgagacaatccatcatggaatcctcgctcttaatgtagttggataccacagggcccagttgtttaaaggctgcgtttatggccactagtacgttgtcgttggccggttccacgatgctctgcatgccaaaaacggccttcaccacgttgaagttgacttctttgagggacatgttgtacgcatagcgcgaggagttgatttctaggacaaggaagtcagggttggacttctcccggaagccccgtgtcaaggaatcgatgacttcgcccaggaaaactagaattggcaattggtaaacatgattagaatgactttcaactgcacttgtggacaacactcactgtttgtgtcatcgggcagtggcgttaccgctcgcgaggcatcctcgtcgtcctcgctaaaatcgctgcagtaactgatctcgtccagcggcgccagcaagtctcccattttgggtatactgagcggctgctgtggcaacaagtcctcgcactccgagtcctcgggatcacccgtcgtcaaatcgctgacaatataggcatgcggaccgatggacttcagctccactaccacctcatcatcgctacgccgtctgctgggcgttctggtgataagggtcttcgccagcgttttcttggcaggcagcacgcttttagcaccgagcacacagcccgcgctcacgtcgcaatcctcgttgatgatggctccttcgcccaccacgcagtgctccagtctgcagttgtccattacggtgacgtcggccatgaggaacgcattggtcagtcgacagttcttgccgatccggcaattggcgccaatcacgctgtcactaatcactgagccactgtctacgtgactgcccgcttcgatgaccacgttctggagcaaagccactttcgagacatgcgcctcggggctcttgtagatgttgtccttgtggaagacgtactcctgctgcagcttgtaaaggcctatgtccggaacgaaggggtaggcccaccggttgataatgtcccgactaaccagctggtaggccggccagttgttcaccttgtgcgcgtactgggctgccgggagcagtgccacatatatcctgctgtccagcagttcctcgtttatcaacaaacccctgacgaagtcatcacgcgtctgaaagtcaaagttgtcgttgaacagggacagcattgagggcgagccaatggcaatctgcggatctaggaggttgtggtgcagcgccacacacgagttgcccagaaagacatctagtggtagttggtagcgattctccttgtggtgcatccgcagccgctggtggtagtgcagccggtcgttgcgacggtccacggcgatcagcacctcgttgccagtgcgcacattgttggcacactccttgaacaccagcgtggcggccgtgcccttgtcgaacttggcctgccgcttgtgctgctccagcactgggcgcagatcggcattggtcaccgtatcggcgccgagcagaatgaagtggccacggatcagcgccttattgtccaaatcacgcatggcatcgccgaagcagcgacaaccctcgccgccaatcacatggacggtcatcttgaatgaccaggctgcgtccgtggcaatgccggccctgcaaaaaacgcgaatcgagcgtttagcacccataattgcatcatcctgccagctgccgcaactgaacccacctgatgtgctcccggatgctcgagcgatagaggctggtgtacacgaacacctcctccacgccgctgcggttcagcgccatgagagcgtagtcaagcatccgcacgttgaccagcggcagcagggcctgcaaagaatccaacggtcgacagtcaatggatattcacctattccagtggcgctcactcaccgtagagccctcgtcggagaggggcttgaagttccacacattgttgtcggcgatcagcaccgcctgaacgatctccttctcgaattgggccatcttctcgcgttgcaacccagtagtttccccaaaaattcaactcgtttgctggccactggagcgattgcggcacgcggtatgcggtatgtaatggcacttgcaggctggtcacacgcttagtcgggtcgccaaccaattctgattggactcgctcgaacgccgcatttcgtagcattgccacactggtcacaccgcgaaaacggctacaagagtcgcccggaaaataattggaaataaataatgatcgcagcgcggtaattagcacgcgtgccactctgtctgtgctgtgtgtactaacacccacctctcccgcgccccatcagccggccgagcctagtaagatcgcgctggattgccaataattgtcatcgcattgccgatgaataagtgcccctgggcgcgagtgtgtgcgtgtgcgtgtgtgtgcgatacacccaccttgatggaggcaacaacaacaacaacacagcaagcgagaaaacaaacaaacggctgcgataagcactgaacacgattccacaactcaactgctcttccgccacggtcgcgctgcccaagagcagggtcaccccccggccagttgcagtgacgccctcgccaccagaaaccaagcagccagctcccagtccagcgaagacccgaagaattcccattcgcaggcgaccccgcagcagacgaagacaagtcactgggcgttcgcgccaactataaatagaaaagagcaacgacgcaaacaagcaaactgtccatacagcccatatccatatctacacgcacatttatcgacgcagaagaaaaacccctcaagtactgcccttcattcagcgattagcgcagccatctcttcgcaaacaggcggcggaggagaatccgacttggcggggaaagcgaagcgcactcgaaaaccctatcagtactcagaatccggagacaaatggacacgttgagcgaggcagtggccaatggaaccgcgactgcggccaccaggacgaccaaggac

SEQ ID NO: 7352 - DNA, 2010 bp, DROSOPHILA
atggcccaattcgagaaggagatcgttcaggcggtgctgatcgccgacaacaatgtgtggaacttcaagcccctctccgacgagggctctacggccctgctgccgctggtcaacgtgcggatgcttgactacgctctcatggcgctgaaccgcagcggcgtggaggaggtgttcgtgtacaccagcctctatcgctcgagcatccgggagcacatcagggccggcattgccacggacgcagcctggtcattcaagatgaccgtccatgtgattggcggcgagggttgtcgctgcttcggcgatgccatgcgtgatttggacaataaggcgctgatccgtggccacttcattctgctcggcgccgatacggtgaccaatgccgatctgcgcccagtgctggagcagcacaagcggcaggccaagttcgacaagggcacggccgccacgctggtgttcaaggagtgtgccaacaatgtgcgcactggcaacgaggtgctgatcgccgtggaccgtcgcaacgaccggctgcactaccaccagcggctgcggatgcaccacaaggagaatcgctaccaactaccactagatgtctttctgggcaactcgtgtgtggcgctgcaccacaacctcctagatccgcagattgccattggctcgccctcaatgctgtccctgttcaacgacaactttgactttcagacgcgtgatgacttcgtcaggggtttgttgataaacgaggaactgctggacagcaggatatatgtggcactgctcccggcagcccagtacgcgcacaaggtgaacaactggccggcctaccagctggttagtcgggacattatcaaccggtgggcctaccccttcgttccggacataggcctttacaagctgcagcaggagtacgtcttccacaaggacaacatctacaagagccccgaggcgcatgtctcgaaagtggctttgctccagaacgtggtcatcgaagcgggcagtcacgtagacagtggctcagtgattagtgacagcgtgattggcgccaattgccggatcggcaagaactgtcgactgaccaatgcgttcctcatggccgacgtcaccgtaatggacaactgcagactggagcactgcgtggtgggcgaaggagccatcatcaacgaggattgcgacgtgagcgcgggctgtgtgctcggtgctaaaagcgtgctgcctgccaagaaaacgctggcgaagacccttatcaccagaacgcccagcagacggcgtagcgatgatgaggtggtagtggagctgaagtccatcggtccgcatgcctatattgtcagcgatttgacgacgggtgatcccgaggactcggagtgcgaggacttgttgccacagcagccgctcagtatacccaaaatgggagacttgctggcgccgctggacgagatcagttactgcagcgattttagcgaggacgacgaggatgcctcgcgagcggtaacgccactgcccgatgacacaaacattttcctgggcgaagtcatcgattccttgacacggggcttccgggagaagtccaaccctgacttccttgtcctagaaatcaactcctcgcgctatgcgtacaacatgtccctcaaagaagtcaacttcaacgtggtgaaggccgtttttggcatgcagagcatcgtggaaccggccaacgacaacgtactagtggccataaacgcagcctttaaacaactgggccctgtggtatccaactacattaagagcgaggattccatgatggattgtctcaaggcgctggaggatgtgtacgaggagaatcatctagtgcgggggaagatctcgcagatcgtgcactatctgtacgacaaggactttgtgtccgagagtgccattcaggcgtggtacgcgcagttggacgaggaggagcatgcacacctgcgccaaagcctcgccaagctcgtggcttggttggatcaatccagcgaagaagatgatgacgaggaggacgatgactaa

SEQ ID NO: 7353 - protein, 669 aa, DROSOPHILA
MAQFEKEIVQAVLIADNNVWNFKPLSDEGSTALLPLVNVRMLDYALMALNRSGVEEVFVYTSLYRSSIREHIRAGIATDAAWSFKMTVHVIGGEGCRCFGDAMRDLDNKALIRGHFILLGADTVTNADLRPVLEQHKRQAKFDKGTAATLVFKECANNVRTGNEVLIAVDRRNDRLHYHQRLRMHHKENRYQLPLDVFLGNSCVALHHNLLDPQIAIGSPSMLSLFNDNFDFQTRDDFVRGLLINEELLDSRIYVALLPAAQYAHKVNNWPAYQLVSRDIINRWAYPFVPDIGLYKLQQEYVFHKDNIYKSPEAHVSKVALLQNVVIEAGSHVDSGSVISDSVIGANCRIGKNCRLTNAFLMADVTVMDNCRLEHCVVGEGAIINEDCDVSAGCVLGAKSVLPAKKTLAKTLITRTPSRRRSDDEVVVELKSIGPHAYIVSDLTTGDPEDSECEDLLPQQPLSIPKMGDLLAPLDEISYCSDFSEDDEDASRAVTPLPDDTNIFLGEVIDSLTRGFREKSNPDFLVLEINSSRYAYNMSLKEVNFNVVKAVFGMQSIVEPANDNVLVAINAAFKQLGPVVSNYIKSEDSMMDCLKALEDVYEENHLVRGKISQIVHYLYDKDFVSESAIQAWYAQLDEEEHAHLRQSLAKLVAWLDQSSEEDDDEEDDD

SEQ ID NO: 7354 - DNA, 4483 bp, DROSOPHILA
ggagtcattggacaaaacgactcccgttgctctcgaggaattcatttatcgccatcgtgctgatctccatgagaccaatacccacattttgcaggccaaatatgctctcactcaactatacggaagtgctccgggattcgcaatggagggtaataaaaatatttaattttaattatgcatttttgtaagaaactctttgtttcagaactttctggagaatcgctgaacagaaaactgcaactatgtgaggaactccttaaactggccgacattttcgatggcggttggagcatattccggggcaatctgctcatagacatggaggaagctttagtgacgcaggctctgcgctcgaaagacccattggattgcgaggagaagctgagaaacgcggcggaaatgctcagagaaattcgaaacatcatgaagcacgagccggaaatgcaacaattgttgttggaacgacaagtcattttgagttctgcgcttgagcgctttgaaccagttgagaattaagcagaaggaacgctagtgtcggtatgctcgattatcatataccctttagttggataactaatcaatttaagaataaagctgccaaagtatgcaaaccaaaacaaaaatgggttattttatttggcttgcagattttcaggaacgttaatttttttggccgttcgtcatgaatcggaatgcaaacttattccatatttaatttcccatcatttggatggatctgataaacaaccaatgtgtcaactagatcttacttccttacgcagaaatacactgccttattgaccttgctataataacctagatttcgactcttgcctttcttatgatgtttcgaatttggcgccaagtgtgttatgtatccgttatcttttgagagcctgtagaagagttttatgtattttagaaaatgttgatattatttagcgaagacacccaccaccggcatagccgctggtgtttatatacattttagactggacggtcacactgttgcatcttcacgtgttttctttctgtttatatttcattttccttaataaatcggcttcttttaagcaaatggagtgtttcaatgcggaaataccagctgacggagtggttaatagcatagagaccgaagagatttcggaaaatgtagtgaaagctgatgaaaccacgctggcaaatggtgaggatgaagccggaaaagccggcgaggaatatgcttacttggagcgaaatgaattcacttcggaaatattcaaagttgaagtgaagaacatgggatatttcggtattggggtaggtagttgaaatctaagcctttatatgaatataacaacattataactttgcaggagtttaagaagcttttgagaaacaccctcaaatttgacgtgaccaaaatcaaggctccaactcgaaaagagttcgcctttgtgtgcttccgcagtcaggaggatcaacaaagggccttggagatcctgaatggatacaaatggaagggaaaggtgttgaaggctcatgttgccaaggcctcggccgatcctctacagaaaaagcgagctgccgaggaacaggagtcggagagaaagcccaagaaacaacgtacggcggtggaagccacgtgtcctctgtcgcacattgcctacgaccagcagattaaacaaaaatccgaggaaatgtcggcacttctggcgaaatacacccaggaacttcggaaggtcaatccgcgggcaaagccccacttggataagttccaattccacgaggtgcttccctcacccaccgttaatgggtatagaaataaaaacgagttcaccgtgggaaagaactccgtaggcgaagtggttgtgggcttcagattgggctgctacagcgatggatctgtggaagtagccgaggtcgcagacttgccacatctaccggagcaggccaagtgggctgctcgcagtttccaggacttggtgaggaagtccaagttcttgcccttcaatccggacggaaatattggccacttccggcagctaatggtgcggtgctccagtgccacaggtgaactaatgctggtggcgggcatatactcctcgaacttaagtgaagacgaacaagttgaacttaagcaagaactgaagtccttctacgaagatctggcaaatgatgctccgtacaaatgcagctctctgtattaccaagatgtcaagcatcgggaagcaggtcagacgattaatccggtggaacacatttcgggcagcacccacatcaccgataccatacagggtctccagtttcgaatcagcccactggcctttttccaaatcaacacagaaggagccaacgtgttgtatcaaaaggccattgatctagttgctcctactaaggacacaactatgttggatatttgctgtggtactggcaccattacccttgcgttcgccaagcactgcaagaaagtgatgggcgtggagatcgtccctgatgcgattaaggatgccgagtttaatgcggaagcgaatggcattaaaaatgcaaagttctttacaggaaatgcagatgatttcatcaagagtatggtgcgcgaagctctctacgatcaggagccgggtaaaccattggatcttattgccgtggtggatccccccagggctggactgcgtaagtttacgttgcttaaatattataaatttgctgaattattttaaggttcaaagcgctatacctttccaaatttcttatttgtttttttcagaccaccgctcgatagccgcaattcgatcagccgatgccatcaatcgtctggtctacgtctcctgcaatccgcacagtgctaagcggaatttcatcgagctggccagaccggagtctaagcaatacaagggggagccattctacccaaagtccgctgtggccgttgacatgtttccccacaccatgcacaccgagctggtcattctgttcgagcgtgaacctaaaacaaaggcggatgagaagtcatcgccagcggagggagctgcacagtcaaagtctgaggcaaccgaagaagctgttagcgaggagaacaccacatccgtaacgtgacgtgtttgttgccgggtacagttcacttcgctgcaatctcttgcacatttgcttaatctctttctataatcttttaggtcagttgcgattcgctgagacacccaatatgtctcagtacctcctatctgccgcgatgctgccctctatcattgtctctctttgtggcgactgctctacgacttttattgttttaaattgatttaattgtatttacgctgtgcgacggggaggaagtggaaaaagtgacagaagcgacttcctatttagcaaaagactaagtttaaagccctgttcaactcgacatagtccgacatccccatcagtgttattcaggcctctggaggcccctgtgtgcgtgataagaatcgctgctccggtggaagtgtggtgctcataaagttctcataaaggtgtagaaaccgcgtgaaaaaacagctgagaggtgctacaagtccaacgccccctcaagggcaaattgatgaacaacgaccctgacaacgatcattgatcatgtccgaccaggtaccagttaacgattatttcatagtctaaacatatgttctattgttaaaagtagaaagggtagtatttaaaagatgttgacgttgatattgatctatcaaccatattaaaagattcgaaaatgacttcatgcgtatgacgcgaattcagttgtttcgttgtttgtctaaagataagttttattaatttactaaggcaatttgagttatggctgtttttttttataaagttgaatatttaaaaagtcgtagaagtgcaattaactagttaaggccagagatgtgccgtaatgaaattggccaacttaatagttaatacgtatggggctgatcgcacggatattgctcaataaaatgtgtttatataaatcttatctaaggtaaacaatcgcattcgcttatttcgcctttccgattacatgttcttaacgagaagtggttggatgatgtaaacaacagatgtagccgtaagcaaagtcttatagaataaaacaaaaaaatattattgttttgaaaaagagaacaacaagcaaacgtgaccgatatcatgttgaatatactatgtagaaaaacaaatcgggacgcgacagccctgaatttttatgcgactcgacttcctagaagggggtgtgttaatagcacacgtacacacacataaacatacatataactatagtggaaagccaaaataagctttcgtaaacattaacgaaataaacaagaaaaacaaataaattggactttggagccagtggggcgattcggctactcggcaaattgattgtacaaaatatagcaacataaataaatatgaaaacattgtgcgccgcaactattataaatcaagagaaaaggagaaattggcaggaaagtgaataaaatgcggc

SEQ ID NO: 7355 - DNA, 2006 bp, DROSOPHILA
tcacactgttgcatcttcacgtgttttctttctgtttatatttcattttccttaataaatcggcttcttttaagcaaatggagtgtttcaatgcggaaataccagctgacggagtggttaatagcatagagaccgaagagatttcggaaaatgtagtgaaagctgatgaaaccacgctggcaaatggtgaggatgaagccggaaaagccggcgaggaatatgcttacttggagcgaaatgaattcacttcggaaatattcaaagttgaagtgaagaacatgggatatttcggtattggggagtttaagaagcttttgagaaacaccctcaaatttgacgtgaccaaaatcaaggctccaactcgaaaagagttcgcctttgtgtgcttccgcagtcaggaggatcaacaaagggccttggagatcctgaatggatacaaatggaagggaaaggtgttgaaggctcatgttgccaaggcctcggccgatcctctacagaaaaagcgagctgccgaggaacaggagtcggagagaaagcccaagaaacaacgtacggcggtggaagccacgtgtcctctgtcgcacattgcctacgaccagcagattaaacaaaaatccgaggaaatgtcggcacttctggcgaaatacacccaggaacttcggaaggtcaatccgcgggcaaagccccacttggataagttccaattccacgaggtgcttccctcacccaccgttaatgggtatagaaataaaaacgagttcaccgtgggaaagaactccgtaggcgaagtggttgtgggcttcagattgggctgctacagcgatggatctgtggaagtagccgaggtcgcagacttgccacatctaccggagcaggccaagtgggctgctcgcagtttccaggacttggtgaggaagtccaagttcttgcccttcaatccggacggaaatattggccacttccggcagctaatggtgcggtgctccagtgccacaggtgaactaatgctggtggcgggcatatactcctcgaacttaagtgaagacgaacaagttgaacttaagcaagaactgaagtccttctacgaagatctggcaaatgatgctccgtacaaatgcagctctctgtattaccaagatgtcaagcatcgggaagcaggtcagacgattaatccggtggaacacatttcgggcagcacccacatcaccgataccatacagggtctccagtttcgaatcagcccactggcctttttccaaatcaacacagaaggagccaacgtgttgtatcaaaaggccattgatctagttgctcctactaaggacacaactatgttggatatttgctgtggtactggcaccattacccttgcgttcgccaagcactgcaagaaagtgatgggcgtggagatcgtccctgatgcgattaaggatgccgagtttaatgcggaagcgaatggcattaaaaatgcaaagttctttacaggaaatgcagatgatttcatcaagagtatggtgcgcgaagctctctacgatcaggagccgggtaaaccattggatcttattgccgtggtggatccccccagggctggactgcaccaccgctcgatagccgcaattcgatcagccgatgccatcaatcgtctggtctacgtctcctgcaatccgcacagtgctaagcggaatttcatcgagctggccagaccggagtctaagcaatacaagggggagccattctacccaaagtccgctgtggccgttgacatgtttccccacaccatgcacaccgagctggtcattctgttcgagcgtgaacctaaaacaaaggcggatgagaagtcatcgccagcggagggagctgcacagtcaaagtctgaggcaaccgaagaagctgttagcgaggagaacaccacatccgtaactgttattcaggcctctggaggcccctgtgtgcgtgataagaatcgctgctccggtggaagtgtggtgctcataaagttctcataa

SEQ ID NO: 7356 - protein, 642 aa, DROSOPHILA
MECFNAEIPADGVVNSIETEEISENVVKADETTLANGEDEAGKAGEEYAYLERNEFTSEIFKVEVKNMGYFGIGEFKKLLRNTLKFDVTKIKAPTRKEFAFVCFRSQEDQQRALEILNGYKWKGKVLKAHVAKASADPLQKKRAAEEQESERKPKKQRTAVEATCPLSHIAYDQQIKQKSEEMSALLAKYTQELRKVNPRAKPHLDKFQFHEVLPSPTVNGYRNKNEFTVGKNSVGEVVVGFRLGCYSDGSVEVAEVADLPHLPEQAKWAARSFQDLVRKSKFLPFNPDGNIGHFRQLMVRCSSATGELMLVAGIYSSNLSEDEQVELKQELKSFYEDLANDAPYKCSSLYYQDVKHREAGQTINPVEHISGSTHITDTIQGLQFRISPLAFFQINTEGANVLYQKAIDLVAPTKDTTMLDICCGTGTITLAFAKHCKKVMGVEIVPDAIKDAEFNAEANGIKNAKFFTGNADDFIKSMVREALYDQEPGKPLDLIAVVDPPRAGLHHRSIAAIRSADAINRLVYVSCNPHSAKRNFIELARPESKQYKGEPFYPKSAVAVDMFPHTMHTELVILFEREPKTKADEKSSPAEGAAQSKSEATEEAVSEENTTSVTVIQASGGPCVRDKNRCSGGSVVLIKFS

SEQ ID NO: 7357 - DNA, 3629 bp, DROSOPHILA
attgagaatgagttcaagaagtacaccaaggcctacgaggcatacaagggcaaccgtacgctcaactggcgtacagtgactggccgtgtaaatattgaaatcgagatcggtgaccggaccatggaaatggttgtgagccccattttggcggttattatataccactttcaaactaagagtacgtgtttacagggcagtcaagttttacagttttacaaccgcatggtcatatttttttttcagatgaatggactatcgaggatcttagttccattacgaaagttccagcgtctgcactgcggcgtcgtctgagtttttggcaaaaccacggattgatctcggaaacgacacccggaatattcacgctgctggaaaaggaatcggagaagtctcagtacgaggacatgagtctggcagaagctgacgaagaggatttggaatccgcaatggcttctgccagcgatcaaagggaagaagaactccaagtaagtgccttcaactgttcctaattccggctttttcttatacaattatgccgcaggttttttggtcctatattgttggaatgctcacgaatcttgactccatgccaattgaccgaatccaccagatgctgaagctgttcgcctcccacagcggcggagtggagtttactcaggatgagctgaaacactttctccagcgaaaagtcagggagcacaagctaatattctcgggtggagtttaccaattggccaaataagtttcggagatccaaaaccaagttgcaaacgactgaaggaatcatgaaataaataatgaattaacgcgataacatttatgaaatttactgctccatgttaaacgtacctattttttcaaactgccgtcttatctgtttctattcagagcttatctctcacccacgtacacacaaagtctttacccaaacttgtttggcttgggaatttggaacacaatgcaagcaatcttatgtgaaaagaagaacacacagtaaaatacgtctattgcttaatttatttcaagttatattaaggtatatgctaatcccgttatcaacaaattcaaacttcttagggctctaaaactaaaggcgaagaaaagtgtacgtggttttgatatactttacaggttaaacagtttttggcttcataaaatcaatcacgaacgcagtggctaaatcgatcactttatacacgcaaacaacttggaatttaatgctgtaatcgttctaaactgtaatctgtacatcaaaagttacttcaggtatgcggaccagctagtcctcgtgcaagaatcgagcttggtagacacgatctcggtgaactggagtcaggacggcattgagaatgggtgaaatccgccgaatccgctgctgaaagcgatcccgatctcgcgccattacctgccattcgctctttctggcagcccgataagcgtagtcccaggcgagcattacgtgaacttcgggtttcatgttgaaacgaacctgtgcgcataaataggaaattagatatgcccacttatgccgcgcaaaaatattcttcaccttcttgacaggagtcgagctgtcgtcgctgcactggcaggcctttagctcctcggtattttcatcctcaccgcatgctgtaaactgcacgctgctgtcgtcgtcatcatcatcctcgtcttcctcgacatcctcatccgcctgctctgcgtcgtcctcaaagcaaatgaagctgtcctcactgcactcggaaatactacgctgccgctgccaggagctcttggcagccgatccttgcgaacagccagcgttgttattccggtcactggaggcttgactagtagggcaatcctccgcggtatccttaaagccgtggtgcggatgcaggtcaataaagaagtagcacgaggacggtacgcaacgccgcaaggcgtccaactcgattcccgccatcttggcgcccggcggactctgggcgttgacgcacttgtgcagggcggtctgcatttgagttactacgtccatagccattagcttgaaagacatcatggtggccagcggattcagggggtctggctgcagggttgggatccgcaaatcctcggggacttcgagcggtttgacctcgggtgcctcctgatgcaccttgtttggcttccacagtgtacgtgatccagcggagaggggacgtgacggcccgaaccgatattgctcgtagataggggaactcatgtttgcaatcaggcggagaacaaagaggaaggggtcaaacagtgcgcccataagggtgtgaaatttcgacatctgaacttaaagacacaagtatgcgtttggtgtggtgggaatcccttgcgaatggccattttcttgaacttggctttggggggcatggtggccagcttaatttgaaacacacttatccatggttactgcgattaactaatgtaatatggagtgaaataacgcacatatatggtgaaatgttacgtatgtcgtgcatccgatcctttgcactttactgtttttcagttgtaggctagttctgctttcgtttgtagcgtatatagcgagatatagagtccaggcacaataatattcagagttttacacgttttataccagaatagttccatactttttcactagagctgaaaatttatcgataacagacgttgaatcaccttgggtattgttgtttttgtgaccattcacttaagcaccccacaaaatcgtcccattcaaaacgggcaactgcaaactatcgataggcaatttcaatttcaagtttcaaattgttgaaacttttaaaagggctttccagatttattaaaataagaggttatttaaatatttttctatttacagattgaaaatgagtttattgttgataatctgatttttctccgtgagtgaacatttttaggtattattgcgatttaatagcaatattaagtaaccgtgataaatgtatacttttatttaagctggatgtaacaccgatatacaaatttatggatcataagctcctaggaagtcactttaaaaattgatcatatgattgatgagtcatcgttcatgattctggtttatgaagacgaagacagatctagttatagtactccaattgttagaattatgtatgttgggagatttgcttattttaaaagaaataaattaagaataaaatgtaaataaatatatcgcagccttaaaacttaggatgaaatattgcggtcgcagcgatcaactcgattacttccgtgtgtccgagtacaattaaatcatgcatactcgtatgtacactgcatgtacatggttctttacccgatatttatacctgacactgtatgaaaatgcaagtgcatgttccgctgcgtcattctgtagataaatactatgtgtacatatgtacatcgaatttgtatctgttaatatatatagttatctctatattttcgcataatattcgagtgttctacgttaactgcatgccatttatgcatattattcgagatctcgtatatggcagcatagtgcctgcatgcatatgttttctgaggatgtatgtactggcatacatataatatctgatatttacgtataatattcagattttccgctctcaagaccgttcggaatc

SEQ ID NO: 7358 - DNA, 1569 bp, DROSOPHILA
aaaaagtatggaactattctggtataaaacgtgtaaaactctgaatattattgtgcctggactctatatctcgctatatacgctacaaacgaaagcagaactagcctacaactgaaaaacagtaaagtgcaaaggatcggatgcacgacatacgtaacatttcaccatatatgtgcgttatttcactccatattacattagttaatcgcagtaaccatggataagtgtgtttcaaattaagctggccaccatgccccccaaagccaagttcaagaaaatggccattcgcaagggattcccaccacaccaaacgcatacttgtgtctttaagttcagatgtcgaaatttcacacccttatgggcgcactgtttgaccccttcctctttgttctccgcctgattgcaaacatgagttcccctatctacgagcaatatcggttcgggccgtcacgtcccctctccgctggatcacgtacactgtggaagccaaacaaggtgcatcaggaggcacccgaggtcaaaccgctcgaagtccccgaggatttgcggatcccaaccctgcagccagaccccctgaatccgctggccaccatgatgtctttcaagctaatggctatggacgtagtaactcaaatgcagaccgccctgcacaagtgcgtcaacgcccagagtccgccgggcgccaagatggcgggaatcgagttggacgccttgcggcgttgcgtaccgtcctcgtgctacttctttattgacctgcatccgcaccacggctttaaggataccgcggaggattgccctactagtcaagcctccagtgaccggaataacaacgctggctgttcgcaaggatcggctgccaagagctcctggcagcggcagcgtagtatttccgagtgcagtgaggacagcttcatttgctttgaggacgacgcagagcaggcggatgaggatgtcgaggaagacgaggatgatgatgacgacgacagcagcgtgcagtttacagcatgcggtgaggatgaaaataccgaggagctaaaggcctgccagtgcagcgacgacagctcgactcctgtcaagaaggttcgtttcaacatgaaacccgaagttcacgtaatgctcgcctgggactacgcttatcgggctgccagaaagagcgaatggcaggtaatggcgcgagatcgggatcgctttcagcagcggattcggcggatttcacccattctcaatgccgtcctgactccagttcaccgagatcgtgtctaccaagctcgattcttgcacgaggactagctggtccgcatacctgaagtaacttttgatgtacagattacagtttagaacgattacagcattaaattccaagttgtttgcgtgtataaagtgatcgatttagccactgcgttcgtgattgattttatgaagccaaaaactgtttaacctgtaaagtatatcaaaaccacgtacacttttcttcgcctttagttttagagccctaagaagtttgaatttgttgataacgggattagcatataccttaatataacttgaaataaattaagcaatagacgt

SEQ ID NO: 7359 - protein, 317 aa, DROSOPHILA
MSKFHTLMGALFDPFLFVLRLIANMSSPIYEQYRFGPSRPLSAGSRTLWKPNKVHQEAPEVKPLEVPEDLRIPTLQPDPLNPLATMMSFKLMAMDVVTQMQTALHKCVNAQSPPGAKMAGIELDALRRCVPSSCYFFIDLHPHHGFKDTAEDCPTSQASSDRNNNAGCSQGSAAKSSWQRQRSISECSEDSFICFEDDAEQADEDVEEDEDDDDDDSSVQFTACGEDENTEELKACQCSDDSSTPVKKVRFNMKPEVHVMLAWDYAYRAARKSEWQVMARDRDRFQQRIRRISPILNAVLTPVHRDRVYQARFLHED

SEQ ID NO: 7360 - DNA, 2693 bp, DROSOPHILA
cggccccaacaggtgatccggatattggtgtcaaacaggcacgccaatttgtgcgtgatgaggccaattaccaggaggacgatgatgatactatcgacgacgacgaggagctcgatgaggaggaggaggaggctccaatgtccaccaccatcaagcccaaaatcgccagtacccgcctgctgccggtgaatggcacttggcagcgaatgggcaccatatcgcgggactcccccccggaatcggattacgactctaatgccctggacaacgcgcaggaggacgaggaggaggaggagggtcaaccatttggcaagctgctgccgctcaacgaaagcctcgccaccaccgaatggatggacgatggggctcagcgggaaccggaggcggaggccagatcccaggcggccagcatggaggtcaagcagatcagcttcgacagcgatggcgactccgattccgaggcgggactggacacctccgaggtcaccatggacgacggctatccgccggatgcgcaagtcgatgacaagaccaagcagctggtcattggcgatgtggaggaggattccggcgacaacatggagtccaaccagtttaccgccgacgtgattaacgcgcgggacagcaagatcgatctggtgtccaagttcctgcagtatatcgagcagcagcatctgatgggctccaactgcgtggctggtacttcgctcaatctgggcgagggcgtggtcgaccggtatgctcaggacaggttccgggtggaggccgaggtggccgtcaatcgcgccaatatgctgaccaggtgagtggatgtcacggacaaagttttccgagttactcagcccacatcatattcacatgccaaacttttccaatcgaaagttttcggccagacggttggcgaatgcaagtgaaaatggaaatggaaatggaatccgtactgaacaattgcggtcaagaaagtagtgtgctttccctgaaggtcattcgagggtcaagatacatatgaaggatatttatgtgatattttgtgagcataggtaaggatgtcgagttacattctaatccggaacaggcatcaatccttcgaaaatgttcacttcgaatttatataatttcgccgtactctatcgcctcgtcctcctgcgggacttccgactccatcgtcatcaaatcctcctcggagggcgagaaatcgttggttatgtgaaaggtctggcgaatctcctccgtcgtgcggcctttaatcatgttggccaccgtcatgcaggcggcgttcagcagattgggaatgtccaggtagttggccgccaagatgagttcgaagagcgtgccctgatccatggacaggaactcggcgtcccagggggtgatctgcacagcgacggacttggccgcttcctcttcgttctcctctgcaatgtcctcgcgatgatgcttggcccaaatgaggaccttcttcaggatcgtcgagttcacattgggcagcgggataagagtgtcgttctccgcttccactggacaatcctccaatagggtcttaatggtgctcgagcacttggcagtctcgatgtcggtctcgaaaatttcgccatcggaggactgcaatttgatgactggcatggtccgttttcgcccacaaagggttttcctttaaggttatctggtacagttcaacttttcaagaaaatctgtcagtgccaacttgacagttaaaaattaaacagaacagattcgtaatggaaacaaattggtgattcatcaaattcaaacaaatgtccatggaatggagatagcatttattaacaatttagacaacatttttatttcaatataacgagcaaaatcgattagatattggcagaaatacacaattttagtttcataacatatttattgttgtataagtaatagttgattgccgcttacaatggtatttaccatgttctacacaatggacatttcaattgcagcacaatttattgctgtttgttataacagaaaaatatgaaatatttagggcccatttcgaatacggaaataaaaacaaaaccagggatttggcctccattttcccttttcaattcaccatcgctcattgctcggggttcactttgcagcagatactcgccattttctgctcatctagattggcccgtgtcctttgtcaacaaggagcataatgtgcttttcttgttgcggtggctctcgtcgcttgttggccatagttggcagaactaccatcgctttccctgcgattttccttcgatttttccgtccgcctggctgcgtgcaattttttgataaaagttcaattacttagcgtggcaggcgtgccgagcaaaaagtttgcaccattcttgtggccaaaacggaaggccagctggcggaggacattgatttacctggacaaccaaagcgatggcaattcatttggtttttcttggaatttccagctgtccaggctggccaaacggagcaagctgaccaatctgatgtgtgtgctcattgtttactcgtgtccattccgcttccatcatcgatttggcagtgtatcgtgtatcaggataaccgccccagtgacaatcccaaggacatgccagcccagctcccatgttttctgagctcttcttttcttcggcagctctctctctctctgttcagcagccaggcacaataaacacaaagtttct

SEQ ID NO: 7361 - DNA, 693 bp, DROSOPHILA
agattttcttgaaaagttgaactgtaccagataaccttaaaggaaaaccctttgtgggcgaaaacggaccatgccagtcatcaaattgcagtcctccgatggcgaaattttcgagaccgacatcgagactgccaagtgctcgagcaccattaagaccctattggaggattgtccagtggaagcggagaacgacactcttatcccgctgcccaatgtgaactcgacgatcctgaagaaggtcctcatttgggccaagcatcatcgcgaggacattgcagaggagaacgaagaggaagcggccaagtccgtcgctgtgcagatcaccccctgggacgccgagttcctgtccatggatcagggcacgctcttcgaactcatcttggcggccaactacctggacattcccaatctgctgaacgccgcctgcatgacggtggccaacatgattaaaggccgcacgacggaggagattcgccagacctttcacataaccaacgatttctcgccctccgaggaggatttgatgacgatggagtcggaagtcccgcaggaggacgaggcgatagagtacggcgaaattatataaattcgaagtgaacattttcgaaggattgatgcctgttccggattagaatgtaactcgacatccttacctatgctcacaaaatatcacataaatatccttcatatgta

SEQ ID NO: 7362 - protein, 171 aa, DROSOPHILA
MPVIKLQSSDGEIFETDIETAKCSSTIKTLLEDCPVEAENDTLIPLPNVNSTILKKVLIWAKHHREDIAEENEEEAAKSVAVQITPWDAEFLSMDQGTLFELILAANYLDIPNLLNAACMTVANMIKGRTTEEIRQTFHITNDFSPSEEDLMTMESEVPQEDEAIEYGEII

SEQ ID NO: 7363 - DNA, 7143 bp, DROSOPHILA
gaatgcgtgcgagaggggcgtgttcaagtggcgtcgcccaccattgttgatgtagccatagctgctggttggctccttggcggtatcgcatattaatgaaaggaaaatcgcccgacaaagtgagcaactgttactgctctcacccggatggttattgcgatgacgacgatggcgacgccatcgaatcttttttgcatcttgacgagggcatagcagtttcattagcccttccttgagcggttgggttgtgcggtcttgtcacgcatttatcggagatgggaatggggcataaatttgcaaaggaatgggaaggtttcactacttttccatcgtgtcacgaagaaagtgaagcataatatctttaattttcaggattttattatcgcgttcctttaagtaagttgttgtaagtaatttcgctgaatattcttgcgtaaactgtgttctcatcaatcttgtataagttttctgctgcttttaaccataagtatggtgtcacgattgcatctcgaataaggacatcctgcgccaatccaaggatgggcatacacatcgtcatcatactcacatggacaagtggctgagtgtagagctggcttttaatagaagacggcgtcagcgagcatccttctcgtcctgcgaaagtctggcccagtgaaatgggtggaaatgtggtaggagaaatggcagtggcagtactaggtgggtggtggctgggtcaccgccttccgtaattatcattctcccctacttttttcactccatcttggtcgcatgttgcagcgactcttctgtttgggctcaattagtgtggcaatggggcgagcatttcaggaagtaattgtcggcgtcatcaactgtggacttgtactccatgggggattgtgtgtgggcgtaggtgtgcgtgtgtttgtgtgtgctagaaagtccctaatgacagtttctgaaccctgaaagtcaactgccatgctaagccatttatcccgcttctctctgttccaggatatgcctcaaagctgatcgattgaccgagtgaatgattgcgctgccagttggttaaatgctacacaatgtcggccaagcatatcgagcagtatacgaatccctccttcgagcaggaatccgaccaaccgcctgaccccttggggggcgtggcagatgtgggagcaggcaacgccagcagcagcagcaatggccacattgccaacgatgccggcacggcaaatcgcaaaggtcacaggtgaggtgaatcgctgcagttgccagctgacagtttctagcttccttctttgtattcgttatgatttttattgcttatttttttgagacattaggccacgctttgtggaaataatatttactattgacacttgccttgggcaaacaaacacaattattattgtttgccgatactttgccccatatcaataattagcttcagaatggtggcggcggaaacagaacttctgagggcacgtttagtagcacgtgggtgggctggtttggtgggttaataattcataagactgcagcgcctttgtgccgtcaaaaccaatcgataacagtcgattacgttgagagtcggtcaagtttgaaatattcaaaggcccccaagcaggaaggaaaaggaaagcgtgacaaacaagtccagggtgagcacgtgagcttgatggctcgactagcgactcgccgcagtcatccgcgcgctctgccagtcgatggaactccggaaaagccgtcgaacggagaacgagaacgggaagtcctagtcctgaactcctgaagtgccaggaaatagccagaggaagagtccgcagcgctgtgcggttgcagctgccaagccaagaaatcagagtagggtaggagcaatggagcaatggctactgtgttggccaacagcccatagagcttgacattgagttgggccatgcgtcctcgccctcgggcgtccttggaccgtccatcgccaagttctaggccggctggcaaaaaagacacacaatacaacagcaaggttgaaactttaaatacccacggccaaggcgggccaaatcaaatttttatataacatcgaaaggacgtaagcgcatgattaaatcacaagttgcaagaaagttaatagaattgttttagagttagttagtagatcggttcatatagtacacacccatttcaggattaatccggcaatttctatccaacaatatcccaataggcggcttgtcataaaatgtttggaaattaggttaaaattgaacgttttcaacgacttttggggtggggtatggcaaaaacccactaaaaaatgcaaaaaatcagcgcctattgtcaaatccctcttgttgatctgaccacagaaacaatctcacttgcaggcggcaggaatccatgtaccagatgaccggcctctactcggagacaaatagcggcgacgacagcagtatagatgcggccctagatcatgacagccagccccatgccacgtcctacctggcgggggatcaattgccgtcgacagttggcagtggacctggaggtggtggaccatcagcggtggccgacagcgtgacggtgaagtgtcacagtcgacaggcatcggcgggcaaatgtccggctgatccggaggaggacttcgatgaggagcagttccgatcgggagattgcggcattctcaattgcagaccttacggaattcagcgattcgcccgcattaagatctttgtggtgctgctctcgctgctggtgatgatgcagcaggcccttagttcgggttacattaactccgtaatcaccacaatcgagaagcgcttcgagatcccctccagctattcggggctaatagcctctagctatgagatcggcaatgtgatcaccgtgatcttcgttagctacctgggcagccgacgtcacattcccgtgtggattggaatcggagctgtaattatgggcattggctcgctggtgtttatggtgccgcattttacgggcgaacccaatccgggaatagcgatcgtcaacaaaaccagcgacaacatttgcaagagtgccttggttagagatcaggacatggacttgggtcgcctgtccagcggactatccaaccaaccactggcgccgcacacactgcgcgaggataactgtctggagggcaaagcctctaccacggggccggtgttactcttcgtactcgcccagttgctcctcggatgcggaggcagcccactgtttacgctaggcaccacctacgtcgacgatcacgtgcgaacggagagctcctcgatgtatatcggtttcatgtacagcatgggagcgtttggaccagtggtgggattcctgcttggtgcctatcttctttctttccacatggactcgctatcttccaccactatatcgatcagtgagtatgatccctgttaggatccatttttaataagacagccaacaaaatgtcaaactttattgaactctattgatctcttgcagctcccggcgacagacgttgggtgggaatgtggtggggcggttttctgctatgcggagtcattctgctggtggtggctgtgcccttcttctccttccccaaagtgcttgcccgcgaaaagaagaagatacggaagagcagcgtagtgcaaccagttttgccgaacaactctagagccactgtggcgacggatgagatgggcaaggtgaagaagctggagattgtggccgtgaccagcaaagaggaccagtcgcaggcgccacccaaggtggacacgggctatggaaaggacatcaaggatattccgcagtcaatgctgcgtctggtaaagaatcccgtatacatcgtgacctgccttggagcctgcatggagctgatgatcgtctctggtttcgtggtctttctgcccaagtacctagagacgcagttcagcctgggcaagagtcaggcgaacatctttactggctcgatcgctgtgcctggagcttgtattggaatcttccttggaggctgtattttaaaacgattccaactaaagcccaagggtgccgtccaatttgtcctgatcacgaacgtcatctgcttggcctgttatgcgatgctattcttcctcggttgcgacaatcttaagatggctggcaccacgattccctactacaccagcaacaagcatggatctactttggagcagcctttccaggtcaacctcacagccgcctgcaactttggctgtgagtgtctgaccagtgaggtggaaccggtgtgcggtaacaatggacttacctattttagtccttgccacgccggctgcacggccttttcatccacatccaacaccaactacaccaattgcgcctgtaagtttaatgtgacttatataaagtatacctgttatatttatataatttgtatgttataggtgttcgcgctaacatctcgagcagcatttatcgtggcgctggtggcagccaagcccaggctctcagtgctaacgagaactttgccgaggtgacggtggttccggtagctactgccggtccatgtgccacgccttgccgcactatctacccgttcctcatactgctattcttcatgacctttttggtggcctctacgcagatgccgctgcttatgatcgtgttgagatcggtatccgaagaggaacgttcctttgcccttggcatgcagtttgtaatatttcgactatttggatacataccggctcccatattgttcggaaatctaatcgattctacttgcattctctggaagtcgtcctgcggcgagaagggcggtcgctgtctcatctacgacattgaaaagttccgatacaagtatgaatatatcataaaatatatgaatatataagttttattaacatctatttcaattttttttagatatgttgggctgtgtgcatctgtaaagctgattgccttggttatctttatggtggattggtggctggtgcgaaggcgaaagcagcttgagaaaatgaagccgcttaacgccagcgatccaataatcggatccatcattagcctagacaaatgtatgtttattatcgaaattactaattatctatatctatataattatatatatatctatccttttcagtatttgaagaaaagctgtcgggtgccgagccgtctactgcatttgttggtggtggaggagagctgatcatacccacagatatacttcgtcattcccgcaatgattcacgcaccatgcatatggattattggtaagtcctatctcacatttatactcaaggactatggtcttaaccaaatgtctttcctgcagctacgacaaatgcggtcgtgtggtaacaccggcaaacacctgcaaccagccacagaccaagtctaagaaacacttccgtagtgcctcttgtgacgtgaagatgatcaagagctttgctcgagatcacagctcatctagcggacctgcggatgcggctggtcaggatgctgttggtgccagcacaaaatacaagaatctcaaaaagttccaggcgcacacgcgcaatcactcgacagacctacacgaccccagtcaacccatccgatatattcagaaccaacttcggccgcaggactgccccgaagaggatgatgacgaagagctgaccaccggatgcggacacttcgttaaaaagcactctcgtaaccacagctacgaccaaatctacatgcccaataacatacgcttcgatgcggacttcctacgacacccccattcacatcacaatcccaaaaagaatgtgaatgttttaaagaatgtggtttcggatgtgggcaagctaaagaattcaaatgaaatagaagctggtggagctggatcacgtggacattcccgcaacaactcgaaggacttgaacaccaaaatttctagtgcaactcctgcttcgggtcaggtagtaacggatgccagtaccacgggcctaagtgtgctgagacatcggcgaaccaattccaaggatttaaattatcaagtgctgccggagtctgctgcctccagttcggtgtcagggcacgctcatcctcagcacacgcgaaacacgtcgcaccacaagatccagatcgatgacgatcgtaacgagctcatcaacgataacgatgatgaagaggaggagcgttccgcgtgtgcttagtgctaggccatgtagctataagctaggattttcgatttgtggcaacatcagcaatgtctccattcccggcggcaatcgcctcatcgtactttgagtgtatgtggttcatgcccgtttcctgatgaagtgactcgtccctcagctgctcattgtacttacgaccgagtgttcaaatctactaatagaaggcatctgaaaatagaaatcttttgatatatacaacattcaaccagaattcgaatccgagtcagatacgattacgaatccttgcagataatatttatgtaaccaggcgatagaatagaaatcctagaaagcaactagcatattttaaggtaggagtagatcgttgtgataggaatattttgtattgtattttagtggagtgtagattagatccgtaaaaagtcgattaagtgtttgaagtctgctgcatacgtttcgctttatttcgactttatgcaatctcggtttcgaagtttaacgattgactgagaatcagttggcgaaagaaaagagaaacgaatagcgaattacaatgttttaataatccgaacatttaaccattgtcaatggaaattgtgctgtgaaacaatttgtgagtatagaaaacaaaaattaacgaaaacgttgaattagaaagaaagtgaaaatacgctgaatgtaattcttatgcaaatacatcatttagagaatctttgtggacaaaatagcgatgggttcgaatgaagaataggtctggaatagttttatgaaaaatcctaaattccctgttttaatggtagcgagaaaatcaagtgtctagcctagattttaaaaccgaatgatgtactttaaatgcgataatgccttaaaaatatcaattaaatatacacgcggataatatcagtatctcaactgaaatgggaattcaatcgatccatccggttgttttcctacgcactgcccgagtgcaagacccccagtagtcctaagtgatgcaatctaggttaattagtag

SEQ ID NO: 7364 - DNA, 3562 bp, DROSOPHILA
aggatatgcctcaaagctgatcgattgaccgagtgaatgattgcgctgccagttggttaaatgctacacaatgtcggccaagcatatcgagcagtatacgaatccctccttcgagcaggaatccgaccaaccgcctgaccccttggggggcgtggcagatgtgggagcaggcaacgccagcagcagcagcaatggccacattgccaacgatgccggcacggcaaatcgcaaaggtcacaggcggcaggaatccatgtaccagatgaccggcctctactcggagacaaatagcggcgacgacagcagtatagatgcggccctagatcatgacagccagccccatgccacgtcctacctggcgggggatcaattgccgtcgacagttggcagtggacctggaggtggtggaccatcagcggtggccgacagcgtgacggtgaagtgtcacagtcgacaggcatcggcgggcaaatgtccggctgatccggaggaggacttcgatgaggagcagttccgatcgggagattgcggcattctcaattgcagaccttacggaattcagcgattcgcccgcattaagatctttgtggtgctgctctcgctgctggtgatgatgcagcaggcccttagttcgggttacattaactccgtaatcaccacaatcgagaagcgcttcgagatcccctccagctattcggggctaatagcctctagctatgagatcggcaatgtgatcaccgtgatcttcgttagctacctgggcagccgacgtcacattcccgtgtggattggaatcggagctgtaattatgggcattggctcgctggtgtttatggtgccgcattttacgggcgaacccaatccgggaatagcgatcgtcaacaaaaccagcgacaacatttgcaagagtgccttggttagagatcaggacatggacttgggtcgcctgtccagcggactatccaaccaaccactggcgccgcacacactgcgcgaggataactgtctggagggcaaagcctctaccacggggccggtgttactcttcgtactcgcccagttgctcctcggatgcggaggcagcccactgtttacgctaggcaccacctacgtcgacgatcacgtgcgaacggagagctcctcgatgtatatcggtttcatgtacagcatgggagcgtttggaccagtggtgggattcctgcttggtgcctatcttctttctttccacatggactcgctatcttccaccactatatcgatcatgcttgcccgcgaaaagaagaagatacggaagagcagcgtagtgcaaccagttttgccgaacaactctagagccactgtggcgacggatgagatgggcaaggtgaagaagctggagattgtggccgtgaccagcaaagaggaccagtcgcaggcgccacccaaggtggacacgggctatggaaaggacatcaaggatattccgcagtcaatgctgcgtctggtaaagaatcccgtatacatcgtgacctgccttggagcctgcatggagctgatgatcgtctctggtttcgtggtctttctgcccaagtacctagagacgcagttcagcctgggcaagagtcaggcgaacatctttactggctcgatcgctgtgcctggagcttgtattggaatcttccttggaggctgtattttaaaacgattccaactaaagcccaagggtgccgtccaatttgtcctgatcacgaacgtcatctgcttggcctgttatgcgatgctattcttcctcggttgcgacaatcttaagatggctggcaccacgattccctactacaccagcaacaagcatggatctactttggagcagcctttccaggtcaacctcacagccgcctgcaactttggctgtgagtgtctgaccagtgaggtggaaccggtgtgcggtaacaatggacttacctattttagtccttgccacgccggctgcacggccttttcatccacatccaacaccaactacaccaattgcgcctgtgttcgcgctaacatctcgagcagcatttatcgtggcgctggtggcagccaagcccaggctctcagtgctaacgagaactttgccgaggtgacggtggttccggtagctactgccggtccatgtgccacgccttgccgcactatctacccgttcctcatactgctattcttcatgacctttttggtggcctctacgcagatgccgctgcttatgatcgtgttgagatcggtatccgaagaggaacgttcctttgcccttggcatgcagtttgtaatatttcgactatttggatacataccggctcccatattgttcggaaatctaatcgattctacttgcattctctggaagtcgtcctgcggcgagaagggcggtcgctgtctcatctacgacattgaaaagttccgatacaaatatgttgggctgtgtgcatctgtaaagctgattgccttggttatctttatggtggattggtggctggtgcgaaggcgaaagcagcttgagaaaatgaagccgcttaacgccagcgatccaataatcggatccatcattagcctagacaaattatttgaagaaaagctgtcgggtgccgagccgtctactgcatttgttggtggtggaggagagctgatcatacccacagatatacttcgtcattcccgcaatgattcacgcaccatgcatatggattattgctacgacaaatgcggtcgtgtggtaacaccggcaaacacctgcaaccagccacagaccaagtctaagaaacacttccgtagtgcctcttgtgacgtgaagatgatcaagagctttgctcgagatcacagctcatctagcggacctgcggatgcggctggtcaggatgctgttggtgccagcacaaaatacaagaatctcaaaaagttccaggcgcacacgcgcaatcactcgacagacctacacgaccccagtcaacccatccgatatattcagaaccaacttcggccgcaggactgccccgaagaggatgatgacgaagagctgaccaccggatgcggacacttcgttaaaaagcactctcgtaaccacagctacgaccaaatctacatgcccaataacatacgcttcgatgcggacttcctacgacacccccattcacatcacaatcccaaaaagaatgtgaatgttttaaagaatgtggtttcggatgtgggcaagctaaagaattcaaatgaaatagaagctggtggagctggatcacgtggacattcccgcaacaactcgaaggacttgaacaccaaaatttctagtgcaactcctgcttcgggtcaggtagtaacggatgccagtaccacgggcctaagtgtgctgagacatcggcgaaccaattccaaggatttaaattatcaagtgctgccggagtctgctgcctccagttcggtgtcagggcacgctcatcctcagcacacgcgaaacacgtcgcaccacaagatccagatcgatgacgatcgtaacgagctcatcaacgataacgatgatgaagaggaggagcgttccgcgtgtgcttag

SEQ ID NO: 7365 - protein, 1163 aa, DROSOPHILA
MSAKHIEQYTNPSFEQESDQPPDPLGGVADVGAGNASSSSNGHIANDAGTANRKGHRRQESMYQMTGLYSETNSGDDSSIDAALDHDSQPHATSYLAGDQLPSTVGSGPGGGGPSAVADSVTVKCHSRQASAGKCPADPEEDFDEEQFRSGDCGILNCRPYGIQRFARIKIFVVLLSLLVMMQQALSSGYINSVITTIEKRFEIPSSYSGLIASSYEIGNVITVIFVSYLGSRRHIPVWIGIGAVIMGIGSLVFMVPHFTGEPNPGIAIVNKTSDNICKSALVRDQDMDLGRLSSGLSNQPLAPHTLREDNCLEGKASTTGPVLLFVLAQLLLGCGGSPLFTLGTTYVDDHVRTESSSMYIGFMYSMGAFGPVVGFLLGAYLLSFHMDSLSSTTISIMLAREKKKIRKSSVVQPVLPNNSRATVATDEMGKVKKLEIVAVTSKEDQSQAPPKVDTGYGKDIKDIPQSMLRLVKNPVYIVTCLGACMELMIVSGFVVFLPKYLETQFSLGKSQANIFTGSIAVPGACIGIFLGGCILKRFQLKPKGAVQFVLITNVICLACYAMLFFLGCDNLKMAGTTIPYYTSNKHGSTLEQPFQVNLTAACNFGCECLTSEVEPVCGNNGLTYFSPCHAGCTAFSSTSNTNYTNCACVRANISSSIYRGAGGSQAQALSANENFAEVTVVPVATAGPCATPCRTIYPFLILLFFMTFLVASTQMPLLMIVLRSVSEEERSFALGMQFVIFRLFGYIPAPILFGNLIDSTCILWKSSCGEKGGRCLIYDIEKFRYKYVGLCASVKLIALVIFMVDWWLVRRRKQLEKMKPLNASDPIIGSIISLDKLFEEKLSGAEPSTAFVGGGGELIIPTDILRHSRNDSRTMHMDYCYDKCGRVVTPANTCNQPQTKSKKHFRSASCDVKMIKSFARDHSSSSGPADAAGQDAVGASTKYKNLKKFQAHTRNHSTDLHDPSQPIRYIQNQLRPQDCPEEDDDEELTTGCGHFVKKHSRNHSYDQIYMPNNIRFDADFLRHPHSHHNPKKNVNVLKNVVSDVGKLKNSNEIEAGGAGSRGHSRNNSKDLNTKISSATPASGQVVTDASTTGLSVLRHRRTNSKDLNYQVLPESAASSSVSGHAHPQHTRNTSHHKIQIDDDRNELINDNDDEEEERSACA

SEQ ID NO: 7366 - DNA, 5581 bp, DROSOPHILA
tgtccaaacaatcgcagccacaaaattatctagaggcagaggagcaggtggccaccacatccggcacttggccgccgcgattctcaacatttgcttcgggttgtgcaactctctcgattcgtcgtaaattttagcctaatcgaatctaattgaatacataaatacggaaataaatcaatttaattacaatacagccaacaacagtcatcgcaaatagtttacacgcacacaagcactcgaaccattattattacagatataaatttgtttaagccttggtaaggtattgagaaaacctcaagagttgcgggttcatatgctaattaaattaattgtcggcacaagtaggaccacttaaggttctttagctatacatatttttggaagttctattatcatatcttaactgagctttaaaaaatcgctggtaaacatgattgtacaagaagttgaaattcctggaaatggtttggtaattgcatacatatgtacgtacatatatgtacatagcttacaatttaaacgatagaaaagtacaaagtacagcactgcaaatatcatgatcggcaacatatcagaaaaccgttagaggtgatggttctctttcgttatctaagttcccctcctctcgcgctgtcttcatcttgtactttcgcgcttgccgctttggcttagcgctctgtccttttcgctctgcaattgagtcgctcattgtcatgcgcgcatcgacgccgaactttgctaaaaaaaaaaaaatataccatgatcgttcgaaatcgttaccagaaaaaacgtcttttaattttgcaaaaataagttaataaaagggcccaacagcccacttttcaatcgccatcggaaatagagcagttgggaataaaatctgcgtgagacttatctatgtggttgcccagtcaccagagcgaatacccctaagtaactaaatacatacatatctatctacagatcagtcgtgttggtcggtgaggtgattgcgagcttacagcgcttccggataaaagtcccgataggcgaatccctcaatgtactccggccggtggcaggcgaacagatggtggggtaactccttgcgggcgtacttctccagtgccttgcgcgtattttcctggagcacggcctcgtcaaatttgacccgctgcaccgtggtcttccgaaggatggtctgcaccaactgcgaccacacgcagccggactcctcttcacccaatccggagccgttttcggcaagctttcctttttgaatttgtgtcgactgcttctcttcctggctcggctccggctgctgtgcaggcgccgccatctgggctttggtttgagtgtagactgtggacgcatctgcggcctgagagtcggtagtggcctctttccttttgggtggcggaatgtcctgcatgagcgtctgcaatcgatcaactgtctccgccattcgtttccgaaagtccactattcgacgggcgtagctgaagagggctcgctcctccgccaactttaatggccttttacgtgcttcctcacttagttctccgtcttccaaaagtgggtgaatgcgaacaccggcctccgaagtgccactgaggtagattcggatagcaaattcctgcatggccgaagtattgaccatggctatggcataggcattacgtgcttttagaataacttctcttatatgagccaactggggcgaggaggtattggacactcttgtttcgagatcttgtagatccatatgctccaagtgagccgacttatccaggctgtccaacacctctgtcaaatggctaggtatccggtcaccgtccgccggaaaggttagcaaacctaatccttgaatcactcggatgttggccacatattgctgctgcagttcgtacagctgccaaagggtcctcattcgagactcatactctttctgggcgcctgtgcccaatacactactcatattagtatcgtacagttgcaagccccgtataaaggctacatccatggtatagttgcccatgaaggtctttacatagttaagagcctcggaggcgcttgcgaaactctcccgtcgctgagcaaagaattcatccaaatcgctgactgtcaactggtttcgtgccaccacgtttctgtgcaggctctcgtttagctcccgctcctcgcgtatctgctcgaagttgcttactaacagatcgccggcgggctgttgaaattcgtcgaacacctcaatatctacggccatggtagtgcttgtgccggattgctcgcgttcctgctctttttcagagtcctgcgcctgcacactctcatcctctttattaaagaactcgttgttctctgggtgacactgcggcacccactgttcctgaacagctacctgccgctttttgctcctctctaatatcgcccgtggactaaaccgctgtagatccagagaggtgtagatgtcctcgttgtgggcgtggcaacagtggagggctgacatgtccatgggatgagcctctgtgttgaagatgtacgcaccggcctgtaccacgcatacatcatcctcggttgacagcagctcgcctccggacccatcgttgtgcaggaagttttcctcgtcaaacagcagataaaggtacttgcttgtttccgccaggaagaatgactccatgcgattctccttttcgtgggtgacaacattgcgaatctggaaaataatgcaagtatatattaattaattttaagttcttaaaaagcttgttcacagaacttctcaccgttgcatatccgcatttggttttggcactgaactccaaggtctccagcatgtgctcaccaaactccagaagatactcgtttcctgtggctcgatagagatacatagctgactcgattagctccggtcgcagggggtacacctcccgattcggcgatgcctctccagcagcaatgttataaaactctggcagaaagccgtacttcttccagaccccaatgtaccgtgatatggtgcgcaaggccggctccgtgtcgccaataatgctcaggatgccgggccaaaacgcctccagggactgaaagacgggaagggtgacgcggcctttgttcatgcctacccacacgtaccagtcctccttccgcatgtacttatcaatggccgcgcgagcctcatggaataactccaagagttctgggcgattgagcaggacagatgccttaactaggtattcaaaaagggaatccactcctgctccgataccagagtcgagggcggtccaacgaccgctctgcacgtcgatgtgattgccaaaaagtccaatgggcgagcgatatgcccatagagcatgtaccgccttcatagcaacatcctcgtagatggttttcccggtcaaccggctaagggtaccaaattcgatgaggaatgtccccacgcccgccgtacaggttatagaggtctcgcccttgggcacgccatagcgcaggttcaccgtgccataaggcatacccgtgttcgtgacgaaggctggcaataatcgtcgggccacatcctccgccagtcgcagcagaggtcccttgcagggccatcctggctctagctctacgccagcacgcttggagagcagatgcgcggacagcagcccgcccacgatgcggatgtttgtctcgaacacggacacgttgatgtccctgtcaaaatccatcttctcctcgagcagtcttgccgcgcggcggaattccgtgaagttgcccatggtggccagcgtgtccagagcgtcgatcagtgtcaaggagtagctgccccaggtgtcgtggccatcgcaggtcagcggacgcagttcatcgtagttggaggcgtggcgcaggtaaccatcgtaggcgtgctggaacatgcgccgcacatcctccctgcagattcattgccggttaggattagtatgtccgagtttagccctagcaatgacccacctcagttccaactttcttgccttggaatactgcttctggccgctgacaccggtggacagcaggacgaggaggaccgcgcagatgagggtgcccggatagccgttgtttcggggtttttgctgcatcgtgggacagtcaatcaatcagggccgctaattcaattatgggcatggtcagtgttccatagccagcgtggatgtgggatgtgtggaagtcaaatgcggctacgttgacgcaaaatcacaacaagggctgattcggcggtggcatcgaccgccgaatgccctactaattccgttcggtgagtgtttttttatagagcgcttagagtagcaaacgggggaaagaacacaagccaaagagcttttttaaggtaacaaccaaacactataggctagcaaacactgtattctccgccaattctgaagtacgttaattttacccaacaaaatccctagcaataggatatgtcattccgtagggtgcaatcagctgttgctgatcgaataactatcgaaagggtggtcagatcgaatttgcatggtggtcattgcttgttaaaggaatacaacagctcagaatagccgtaaaatcagcgcggcaatattaaagtcgggttggaaaaattaaatggcaatttctttaagaattcaaaaagtttgtgatgacaaatataccgattgtttgtcactgctttgcgcggcacacgttcctttatacttttattcgcgtcgagttggcagcacataccagttttttttgtggccattcaaaagtgtgtgttcgtacgggtaaaaagtgatttaaattcaaaatattcagcgaaacgaccgcctccaatagaagcaactgtaccctatggtaagtaactgccctctgcacccgtttcacacccggacatcctccggatgagctgaccaagaaatccgcagcctttgttacgcttccgactgcgaattgcagttctggcgatgggcagcgatgtgtttcggttttgaatcattctccgcgtaaaaaaaactcagaaagagggtcgactataacctcgcggagtaactgcatcacggcccgtgtgccttttgtactccgcgtaaggcgatcgtttaaatgcaatcgcgtatgcttaattgtccgttgggcgaaaagtaacaacattgtgggtctatacatgcgggattgcctctggctgaccagaaaccacattgaaaccatcccgttgaccgtagatataagcgtgtgccatttgggatctggaaatcgtgtttccacccagttgtttgcatatttataaacaattaaagaaaaatattaaattttttggtcagggctgtcgcccctcgcatggcatcgatagaagagcgtccggagctgcggttgcaaccctatccgctcacgcaaatctatcgaaaaattttactccacggtcgattttcgttgcttttttttcacactcgtgtaaaaaaaaaggaaatagctaagtaaatcgaaagtacagtgcagtgttttgatcccgtggagtgcatgttccagcggaaagtgtgtgcaacaaatatgagcagttcgcaaaagtggcgagcaaaagcaataacaaagtagcaacagcaacgcaacgtgtgtgtgttgtaag

SEQ ID NO: 7367 - DNA, 3451 bp, DROSOPHILA
atttttccaacccgactttaatattgccgcgctgattttacggctattctgagctgttgtattcctttaacaagcaatgaccaccatgcaaattcgatctgaccaccctttcgatagttattcgatcagcaacagctgattgcaccctacggaatgacatatcctattgctagggattttgttgggtaaaattaacgtacttcagaattggcggagaatacagtgtttgctagcctatagtgtttggttgttaccttaaaaaagctctttggcttgtgttctttcccccgtttgctactctaagcgctctataaaaaaacactcaccgaacggaattagtagggcattcggcggtcgatgccaccgccgaatcagcccttgttgtgattttgcgtcaacgtagccgcatttgacttccacacatcccacatccacgctggctatggaacactgaccatgcccataattgaattagcggccctgattgattgactgtcccacgatgcagcaaaaaccccgaaacaacggctatccgggcaccctcatctgcgcggtcctcctcgtcctgctgtccaccggtgtcagcggccagaagcagtattccaaggcaagaaagttggaactgagggaggatgtgcggcgcatgttccagcacgcctacgatggttacctgcgccacgcctccaactacgatgaactgcgtccgctgacctgcgatggccacgacacctggggcagctactccttgacactgatcgacgctctggacacgctggccaccatgggcaacttcacggaattccgccgcgcggcaagactgctcgaggagaagatggattttgacagggacatcaacgtgtccgtgttcgagacaaacatccgcatcgtgggcgggctgctgtccgcgcatctgctctccaagcgtgctggcgtagagctagagccaggatggccctgcaagggacctctgctgcgactggcggaggatgtggcccgacgattattgccagccttcgtcacgaacacgggtatgccttatggcacggtgaacctgcgctatggcgtgcccaagggcgagacctctataacctgtacggcgggcgtggggacattcctcatcgaatttggtacccttagccggttgaccgggaaaaccatctacgaggatgttgctatgaaggcggtacatgctctatgggcatatcgctcgcccattggactttttggcaatcacatcgacgtgcagagcggtcgttggaccgccctcgactctggtatcggagcaggagtggattccctttttgaatacctagttaaggcatctgtcctgctcaatcgcccagaactcttggagttattccatgaggctcgcgcggccattgataagtacatgcggaaggaggactggtacgtgtgggtaggcatgaacaaaggccgcgtcacccttcccgtctttcagtccctggaggcgttttggcccggcatcctgagcattattggcgacacggagccggccttgcgcaccatatcacggtacattggggtctggaagaagtacggctttctgccagagttttataacattgctgctggagaggcatcgccgaatcgggaggtgtaccccctgcgaccggagctaatcgagtcagctatgtatctctatcgagccacaggaaacgagtatcttctggagtttggtgagcacatgctggagaccttggagttcagtgccaaaaccaaatgcggatatgcaacgattcgcaatgttgtcacccacgaaaaggagaatcgcatggagtcattcttcctggcggaaacaagcaagtacctttatctgctgtttgacgaggaaaacttcctgcacaacgatgggtccggaggcgagctgctgtcaaccgaggatgatgtatgcgtggtacaggccggtgcgtacatcttcaacacagaggctcatcccatggacatgtcagccctccactgttgccacgcccacaacgaggacatctacacctctctggatctacagcggtttagtccacgggcgatattagagaggagcaaaaagcggcaggtagctgttcaggaacagtgggtgccgcagtgtcacccagagaacaacgagttctttaataaagaggatgagagtgtgcaggcgcaggactctgaaaaagagcaggaacgcgagcaatccggcacaagcactaccatggccgtagatattgaggtgttcgacgaatttcaacagcccgccggcgatctgttagtaagcaacttcgagcagatacgcgaggagcgggagctaaacgagagcctgcacagaaacgtggtggcacgaaaccagttgacagtcagcgatttggatgaattctttgctcagcgacgggagagtttcgcaagcgcctccgaggctcttaactatgtaaagaccttcatgggcaactataccatggatgtagcctttatacggggcttgcaactgtacgatactaatatgagtagtgtattgggcacaggcgcccagaaagagtatgagtctcgaatgaggaccctttggcagctgtacgaactgcagcagcaatatgtggccaacatccgagtgattcaaggattaggtttgctaacctttccggcggacggtgaccggatacctagccatttgacagaggtgttggacagcctggataagtcggctcacttggagcatatggatctacaagatctcgaaacaagagtgtccaatacctcctcgccccagttggctcatataagagaagttattctaaaagcacgtaatgcctatgccatagccatggtcaatacttcggccatgcaggaatttgctatccgaatctacctcagtggcacttcggaggccggtgttcgcattcacccacttttggaagacggagaactaagtgaggaagcacgtaaaaggccattaaagttggcggaggagcgagccctcttcagctacgcccgtcgaatagtggactttcggaaacgaatggcggagacagttgatcgattgcagacgctcatgcaggacattccgccacccaaaaggaaagaggccactaccgactctcaggccgcagatgcgtccacagtctacactcaaaccaaagcccagatggcggcgcctgcacagcagccggagccgagccaggaagagaagcagtcgacacaaattcaaaaaggaaagcttgccgaaaacggctccggattgggtgaagaggagtccggctgcgtgtggtcgcagttggtgcagaccatccttcggaagaccacggtgcagcgggtcaaatttgacgaggccgtgctccaggaaaatacgcgcaaggcactggagaagtacgcccgcaaggagttaccccaccatctgttcgcctgccaccggccggagtacattgagggattcgcctatcgggacttttatccggaagcgctgtaa

SEQ ID NO: 7368 - protein, 982 aa, DROSOPHILA
MQQKPRNNGYPGTLICAVLLVLLSTGVSGQKQYSKARKLELREDVRRMFQHAYDGYLRHASNYDELRPLTCDGHDTWGSYSLTLIDALDTLATMGNFTEFRRAARLLEEKMDFDRDINVSVFETNIRIVGGLLSAHLLSKRAGVELEPGWPCKGPLLRLAEDVARRLLPAFVTNTGMPYGTVNLRYGVPKGETSITCTAGVGTFLIEFGTLSRLTGKTIYEDVAMKAVHALWAYRSPIGLFGNHIDVQSGRWTALDSGIGAGVDSLFEYLVKASVLLNRPELLELFHEARAAIDKYMRKEDWYVWVGMNKGRVTLPVFQSLEAFWPGILSIIGDTEPALRTISRYIGVWKKYGFLPEFYNIAAGEASPNREVYPLRPELIESAMYLYRATGNEYLLEFGEHMLETLEFSAKTKCGYATIRNVVTHEKENRMESFFLAETSKYLYLLFDEENFLHNDGSGGELLSTEDDVCVVQAGAYIFNTEAHPMDMSALHCCHAHNEDIYTSLDLQRFSPRAILERSKKRQVAVQEQWVPQCHPENNEFFNKEDESVQAQDSEKEQEREQSGTSTTMAVDIEVFDEFQQPAGDLLVSNFEQIREERELNESLHRNVVARNQLTVSDLDEFFAQRRESFASASEALNYVKTFMGNYTMDVAFIRGLQLYDTNMSSVLGTGAQKEYESRMRTLWQLYELQQQYVANIRVIQGLGLLTFPADGDRIPSHLTEVLDSLDKSAHLEHMDLQDLETRVSNTSSPQLAHIREVILKARNAYAIAMVNTSAMQEFAIRIYLSGTSEAGVRIHPLLEDGELSEEARKRPLKLAEERALFSYARRIVDFRKRMAETVDRLQTLMQDIPPPKRKEATTDSQAADASTVYTQTKAQMAAPAQQPEPSQEEKQSTQIQKGKLAENGSGLGEEESGCVWSQLVQTILRKTTVQRVKFDEAVLQENTRKALEKYARKELPHHLFACHRPEYIEGFAYRDFYPEAL

SEQ ID NO: 7369 - DNA, 7000 bp, DROSOPHILA
attaaaaccatacccactactggatttccggtgagcgtgtgcaggttccatgaaaaattgattggggagaaagtggaaaagtctggtgattgacggtttgcggttaggcgtcgataggatattcacatctaatgccaaatcgagtgcaggtgttcatcgagggatatcatttttgttaacttgttttatttaattgtaagtgtttgtaagtattttatgaaagtgttgttctcagattggcctgtatgagcggtaattacattttacaatcttatatcttaggggaactgtcagaagattgggtaattgggggggaaacaggagaaagttgcgttcatggatctaagatagaattacaactcacttaggttagatctactggctaaatgcgttgaatatatatcgtcttcggttgtgtaaattgtgtccggcttcttagggttaccagttcactgatcctgtcgtctgggttatatccatgtctataaataatttagctacaattacgactataggtcaattcccaaaaatgctttcaaatataaatgcaatacgatttcgatttgttgcaagtgttggttcgtggttcctccagtgtatagtttatgtatatggttattacgagtaagttacgaaagggagtataacctgtataaatatatatttatatttatatattcattatatatgcctcagtgtacatacatatatacatatgtatatatgtatatatatgtagctcgaatctatattaatatctggttccacgccgccttcaaactggtgcaaactttcattggtggctccggtatgctaaactccactccactaaactccacaactttgggatgattgggatgtcgaatattgactatttcgtctattgatcttgatatttgctccatcgaattgcacattcccagctctgctctcatttctggttgatctcccgagaccaattcgtggcctagacccattcgtcccgggtttacgacttttctcattcgttcagtatcgcgctgaggcgttcctccacggccaccttgcgtgacttccacacgaactcgcagacagcgatgacgcaggccacccccatgccgcccatcaggaccacgaacacgccgcccacattggccagtcccagttcattagctgccgacgaggatttggaggtctccacacgacacttgccgccgccccgcttctctttccaccacttggttttcaggatgtgcagcttgccctcctcctgcagcttgagtatcacgctgttgatggcagtgcgatagggggaatctgtagatggaattaaagaccggttagtaaggggtgcttgatctaaggactggatagagcaacccaattaacatgaacgtactcggtggagtggctatgccatagctcttggtgtccagcattccaccgacttgcgtcagctcgcaattgcgttcggtcacgtactcaatggaggtggactccatcagaaaggcataggatcctgaaaagcaaaattattgcgtattcctttctctcaaaaatatccttcaactcaccttttcccttggcaaccctttccacaccttcgccattgctggctgtaaagacggaaggacgagctgattccatgaatgaccacatgcgctgatatgtggagatctttgagtcctgtaagtaaattattgttagcaatactatctctttaaattttccgcatttaccctaaagaaagctgccgtgctgccgcccttcaacgctccgtatttgatcctcgtttgcttggccagatcctcggcactttcgatgggcgagtccatacgctccacagtcaaaaaggcagccagatttgcagtgtatgaggagatcatgatcagggtgaagaaccaccaaatgccggccaccatgcgagtggatagagccctgtatgttagaactttaatagggaaaaaccaactacaatataaactcaaatctttacttgggcaaaaagtcacatccttgctgcatcagcgatccaatggcaaaccacatgcaattgagcagagtgaactgactctccaccttttcgccatgagcatccgtataagcaggccattcatagggtgtgaatctgtataatggatatattcagattagataatccaaaatgagtggatagaacatactttgccaggatgaagagcagcactgagacacccaagtacgcagtggccatgtagatccatacgtccaaggatagcggagacaggaaggagaacaagttgggcggctgcttaattggcttccggtacaatatggatactcccagattcatgaagggtgtggtgaagtcgaccgcctgttcccgctcaaaggtgatggtgagatccgcaatggccagatcggcacgctgctccagcaactcccggatcatgccgttccattcgctatatggtatgaacataaatatttaagaaagacctattaacaatataacctatgttcctaccccgtcaatttattgagacttccatagctgccatcgggcactagttgtattttgtagttgaagccgagtgacttagagatctcatggatcagatccaccgcatagccctcaaactgatcattgccacttaggggaatagccgattcctttcgcatgcagtacggattactctgaagaaattaaaaaaaatattagaatggtatatttatttcttactcaacattccataccaatatggttgtaaccacaagcgtcttgttcttcagatttgcctcgatctcctgctgcttctgactgaaggtgcgcgtaaagttgatgccatcgggcagcgtggagttccaggtgccgatcttgcgaatgcccgccggagtgagctcgacaatgtccaacatgaagtctgtgcggaatccctgatgatcgaacttaatcacattcgtcaggcccttcatctcgacgatcttcatgtagttgatcaggctgaagccgtgctgccaggtgctctgtccatcgcagctgatgggatgaatgtcgatctgttgtgaagtgtccaggtcatgcagcgccttggcgaacagatgaactgcgtcgtacatgagagcagtttccgaacgcacggtggtcaggttggcggaccgcagcagacccttctcgtcgatgctccactggcgcaccacgtccgacacaatcttctcgttgatcagccggaagccggtgatattagtgccgccgtagcgaaactcatcgagattcaccgtgtgcaaatccagcgaggtcaccaggtagctatggtagtcgctcatcatgccgatctgctgcgcctgcttcagcacctcgtggatccgctccgtcgagcagtccagcacgatgtgcgcctctgccgagttcttgatctgcttcagcaggggtctataatgttaataaatccattttattgactactcaaatggtgatatttccaacgtatataaggtagttatgattaagggggcacaaaagctgcagggctagtggcatatgtgggacacagtaacgaaatacccaatgcagttggaatgggtggatacaattggctgggcttaccggtaatccccgctgtcgcttagctgtcgcacagtaatgggaaagggcgtcatcccgtgcgccttgagcagctcctgcagtcgcacgatgccgtcattgttctcgtagataatggtgaaagtcttccagccccaatgccgcactatatccacgtaagcctaagagcaagcgaaagcattaacaatacagtttcggatgtgggacgtgtgcctccgctatgtctaccttggaaagcgtattaggatgcggataaaggttcaccaggcagctttcgcgtctcagccggtagtcccagcgattctccaagtggggaatctgaaaatttgtattagtagcatgtattttgcagaggcttctatggcttctatggcccagtctcacctccatgttgtcacaaatgctctgcacatggctggcggtgtgggaggattgtggcccaaaaatggctgccactccgatgttcagtaagccacaaactgcaagacaaacagtgcaattgaggtttatgttcatgctattcgctgctctttaacgaactaagtttcaaaaactatcttcctccgatgttcagcaaatcaaacgcaactgctgtaaaatgcccggtggcattccacaatatcaggagccaactcctgactttcttgccctatggcaaattgagtgaaacacaaatcccaaagagcttaaaagtcgcaaattgatttccacgtaacgtgctcggtgcccattcccattcccgatcccaatcccaatgcaatctgcttgtgggggaaataatctggggctgcgacttgaaaggctcaaaatgtagcgcagtaatgtgcttggctttcggctcggtaatgttcagttagcctcgttcgcatatttaaaatgcacttcagtatgacataatttcgtttagcccgtttggcctttccttttagccctctccaccaccctgtcattcggcatccttttggctcatcaaatgcgctaagcacgtgtaagtgcatgtgtacctgcacttcgatgtcctggctctgtgatgcggttaacctgctctcaggactctcagtgtgcggatgagggtcctgcctaccttcctgctcgctgctcgtcgttactgtcgtgctgaagtgtggtttactctggccaagaaattccaggtatttctgtttttttggccatgtactcgggccaacttcggcgtcatttgtgtctcatttatcacaggatattcgacagttggctcacgttcctttgcccgctttacgattcatcttcagcttttagcgattatcaagtgccggagagctcacctgccacccaatacccacaataaactgcaaattgaggactggccgggcttgcacattacgatatgcatttatctggtcgaatttaagggactttggtatttaaataaactgttaagtttttccaagaataagttatagtaattttcagggaatttgcactatttattactaaagatatctaagtggataaattgcctgggctatttcattctgaaagttgggaaaagctgaaaactatgatattacaatatacgttacaacaaaaagtaattaaagatggaaaagctgtttaagtacactacgattgaggtccccttgcggcaataagattaccatatatcaaaagcaaatcaaatgtaaatcaaaacaagaggagcaaatcaagtacaatcgaagtgaaaacaaagcggtatcaacttgggaatggcaagggaacccagatgtgtctaaatcaaatatgcagttaaaagcatcaggtgaaggtgaagtttacgagggagactggtggagaggaggcggggtattgtgacaggccagtgggaaatcaggacaagtcaacactccgagtacaccaaaatcacatgcaaactcaccccttttcccggcatggaagctgtcgaagggcgagatgcgctcgatttgggccaccagcttggagcgcggcaggatggagcggtcggcgttgatgcggtccaccgcctggcggaaggccagctcctgatggtcatcggcgggatggaagagaccgcctgcggtgagaaattacaggccgtgtttttggacatgtcaaatgtgttggctccacttccgcagtgttcaaataaaaacaaacaaacaaacgcgcgcgcacacacacacccgctcgaataaaatatacacactcacacagagacaggcgctcttgattatgacgtgtaaaaaatcgatacagagcgaggatgcgggctggattttttgttttcatccggattctgaacgaatccacttgaatgttgactccgagaaaatatgtgtgcgggctttcatcctctactcaccgatcttgatgatatcgggcagtgattgggcttttcggcagtttaaaattaattgcaggagcagcagcggcaggaccaaaactccactcgaccgcattttgaattcgttcgcgaaggcagtttccggtttcagatgattgcctcacgggatgtcaatcacttgtcactcggcagctatttgtatctagcagatacttaacattgttacttggcggcaattccgctgtgcgttttccctatttctccaagggtttgtattttgattttaataaacttcgactcaaccgctttctgccaggatgtgacatccactgagttgcgggtgtttgatttgccttcttttatcctgttgcggacttgggtgacgaggtgggttgtttgtggggtggccagcatccaaaagccggctgacagttccaacagctgcgcagtggatgctgggagagcagatgcccagggttgtcaccccatccggcagttgagcttttcattctgaaggacgatggtgggaaaaccaggcgatccgattcgaactgctttgccgacctactgactccgaagcttttggatcacagaacttgaactaaatgtagcgcaagttaaatacttacaaatattttggttgtgacagataaatatgtacgttatcatttaataatatactaaacataattatacaatatattgcttagaatcaacagactttaaacaagcaatgttgtaaaaagtaccatactattttgagagcattcaactttaatgtttaaaaaaaaaattccttagcaataaacaacaatataaaaatagctattgtgtaaaataagaatccaaacccgaaacgcttagccttgtgcttcttaccgaactatggaataatatattaaaatataactcttaccattaattttaagctttatcgtaagacgcgtttcccattgagaactgctggctaagtcgaaaagctaaagcctcactcttaatcaaagaagagcgttctccccgaaaggacctttaacatgccaaagaggaaaaggattaaacagcacaaaggaagcagtcggcggaactgcggcgaataaaaggcattaataaaacag

SEQ ID NO: 7370 - DNA, 2562 bp, DROSOPHILA
atgcggtcgagtggagttttggtcctgccgctgctgctcctgcaattaattttaaactgccgaaaagcccaatcactgcccgatatcatcaagatcggcggtctcttccatcccgccgatgaccatcaggagctggccttccgccaggcggtggaccgcatcaacgccgaccgctccatcctgccgcgctccaagctggtggcccaaatcgagcgcatctcgcccttcgacagcttccatgccgggaaaagggtttgtggcttactgaacatcggagtggcagccatttttgggccacaatcctcccacaccgccagccatgtgcagagcatttgtgacaacatggagattccccacttggagaatcgctgggactaccggctgagacgcgaaagctgcctggtgaacctttatccgcatcctaatacgctttccaaggcttacgtggatatagtgcggcattggggctggaagactttcaccattatctacgagaacaatgacggcatcgtgcgactgcaggagctgctcaaggcgcacgggatgacgccctttcccattactgtgcgacagctaagcgacagcggggattaccgacccctgctgaagcagatcaagaactcggcagaggcgcacatcgtgctggactgctcgacggagcggatccacgaggtgctgaagcaggcgcagcagatcggcatgatgagcgactaccatagctacctggtgacctcgctggatttgcacacggtgaatctcgatgagtttcgctacggcggcactaatatcaccggcttccggctgatcaacgagaagattgtgtcggacgtggtgcgccagtggagcatcgacgagaagggtctgctgcggtccgccaacctgaccaccgtgcgttcggaaactgctctcatgtacgacgcagttcatctgttcgccaaggcgctgcatgacctggacacttcacaacagatcgacattcatcccatcagctgcgatggacagagcacctggcagcacggcttcagcctgatcaactacatgaagatcgtcgagatgaagggcctgacgaatgtgattaagttcgatcatcagggattccgcacagacttcatgttggacattgtcgagctcactccggcgggcattcgcaagatcggcacctggaactccacgctgcccgatggcatcaactttacgcgcaccttcagtcagaagcagcaggagatcgaggcaaatctgaagaacaagacgcttgtggttacaaccatattgagtaatccgtactgcatgcgaaaggaatcggctattcccctaagtggcaatgatcagtttgagggctatgcggtggatctgatccatgagatctctaagtcactcggcttcaactacaaaatacaactagtgcccgatggcagctatggaagtctcaataaattgacgggcgaatggaacggcatgatccgggagttgctggagcagcgtgccgatctggccattgcggatctcaccatcacctttgagcgggaacaggcggtcgacttcaccacacccttcatgaatctgggagtatccatattgtaccggaagccaattaagcagccgcccaacttgttctccttcctgtctccgctatccttggacgtatggatctacatggccactgcgtacttgggtgtctcagtgctgctcttcatcctggcaaaattcacaccctatgaatggcctgcttatacggatgctcatggcgaaaaggtggagagtcagttcactctgctcaattgcatgtggtttgccattggatcgctgatgcagcaaggatgtgactttttgcccaaggctctatccactcgcatggtggccggcatttggtggttcttcaccctgatcatgatctcctcatacactgcaaatctggctgcctttttgactgtggagcgtatggactcgcccatcgaaagtgccgaggatctggccaagcaaacgaggatcaaatacggagcgttgaagggcggcagcacggcagctttctttagggactcaaagatctccacatatcagcgcatgtggtcattcatggaatcagctcgtccttccgtctttacagccagcaatggcgaaggtgtggaaagggttgccaagggaaaaggatcctatgcctttctgatggagtccacctccattgagtacgtgaccgaacgcaattgcgagctgacgcaagtcggtggaatgctggacaccaagagctatggcatagccactccaccgaattccccctatcgcactgccatcaacagcgtgatactcaagctgcaggaggagggcaagctgcacatcctgaaaaccaagtggtggaaagagaagcggggcggcggcaagtgtcgtgtggagacctccaaatcctcgtcggcagctaatgaactgggactggccaatgtgggcggcgtgttcgtggtcctgatgggcggcatgggggtggcctgcgtcatcgctgtctgcgagttcgtgtggaagtcacgcaaggtggccgtggaggaacgcctcagcgcgatactgaacgaatga

SEQ ID NO: 7371 - protein, 853 aa, DROSOPHILA
MRSSGVLVLPLLLLQLILNCRKAQSLPDIIKIGGLFHPADDHQELAFRQAVDRINADRSILPRSKLVAQIERISPFDSFHAGKRVCGLLNIGVAAIFGPQSSHTASHVQSICDNMEIPHLENRWDYRLRRESCLVNLYPHPNTLSKAYVDIVRHWGWKTFTIIYENNDGIVRLQELLKAHGMTPFPITVRQLSDSGDYRPLLKQIKNSAEAHIVLDCSTERIHEVLKQAQQIGMMSDYHSYLVTSLDLHTVNLDEFRYGGTNITGFRLINEKIVSDVVRQWSIDEKGLLRSANLTTVRSETALMYDAVHLFAKALHDLDTSQQIDIHPISCDGQSTWQHGFSLINYMKIVEMKGLTNVIKFDHQGFRTDFMLDIVELTPAGIRKIGTWNSTLPDGINFTRTFSQKQQEIEANLKNKTLVVTTILSNPYCMRKESAIPLSGNDQFEGYAVDLIHEISKSLGFNYKIQLVPDGSYGSLNKLTGEWNGMIRELLEQRADLAIADLTITFEREQAVDFTTPFMNLGVSILYRKPIKQPPNLFSFLSPLSLDVWIYMATAYLGVSVLLFILAKFTPYEWPAYTDAHGEKVESQFTLLNCMWFAIGSLMQQGCDFLPKALSTRMVAGIWWFFTLIMISSYTANLAAFLTVERMDSPIESAEDLAKQTRIKYGALKGGSTAAFFRDSKISTYQRMWSFMESARPSVFTASNGEGVERVAKGKGSYAFLMESTSIEYVTERNCELTQVGGMLDTKSYGIATPPNSPYRTAINSVILKLQEEGKLHILKTKWWKEKRGGGKCRVETSKSSSAANELGLANVGGVFVVLMGGMGVACVIAVCEFVWKSRKVAVEERLSAILNE

SEQ ID NO: 7372 - DNA, 5513 bp, DROSOPHILA
gcaacaagattaaggaattccaatgactcacaccactaacaagcaaaagagcactgcatatgtggtttacaattaaataagcaacgttttattatatgtaatgtaatgtaatgtatgaatattaaccagtggatctatggatctaaagctagtaacactcgttctgcacggatcgctccagggcgaaggtgtactcctcggccagctcgtccacggacaattggcgcgttagtagcgccaatatgctgtccacctgcatttgggtgctggtgtagcgatccttgttggccaatccgggtgccagctcgaatggaatgtcctgcaagtaattgacgggtccttgggctccgggctgcttcacttgatcgctgcgcggtcctggcatcggcggatagggcagatagcccgctggcggcataggtggatacatggagccggctggaacacccggatgaggagcatccggtactggtttgcgctctatgaacacgaaatcatcgacactggtgcctggacgggttgcctccgccggtccctggatgggctggtcatccgtgggcgtttccgcgggcttgcgtttgccaaatatcgaaaacattgcactattttgttctattgtttggtaaaatcaactggcaaattgcgtcgtccgccagctgtgatgctcttttagcgggcgttggtccaaaacagcgagtgctagctagtggtgtgcccaaaagatgtaaacatataggtgtctatagtgaggtctgagcgaaatatgagaattttgggtatttaatttttaactatttgtttgcttgggtatttttcggttacgaatgtgtatacccaatataaactttattaattgcaagtagttagatttggagtgaaatgcagtctgcactgaatttccgttaatcgcctatcggtgggcgcgcagtgtggccattcgctcgtcggatgcgcagggctggacaaccgacactgcgcccgcctccgtcgccaagtgaagtcgctccgagattgattgtgtacaccggataagaggagcgagcgaaaaagatgtcaaaattggaccaggacccgaacgcctcactgagcatcatggaggtgagtgtgccgccgggacgccattcagagcttcagtgtgtccactgcccggagctccaattccaatcggcggtggctactctagagctgccacattaacgcattcacaactgtctccatttcccacatttaacataactttactacttcgcgcagcaaatcaagcagctcatccgcccgccgcccaacgaggacgagaagatgatgcagcggtccaccaacacgaagcatccgtactacaggcgcccgggcaggggccacaaccacgactattgtgacgcctgcgaggagggcggcaatctgctgtgctgcgatcgatgcccctccagcttccacctgcaatgccagtgagtatatacacgcgcatatagctgctcattttgagtgctgatttcgtgctttcgccacagtgatccaccgttgagcgaggaggacatacccagtggccagtggctgtgccacagctgtcgcatgagcaagctctcccagccgccggcctcctcatccaaggccagttccgtggagcgtgtgccttcggcgggcagtggctcacgggcgaatactccatcgtctggcgatctggagtccataccgctgaagatccgcaacctgcgcaaacgcagcaacagcgaacgcaatagcaccgagaagctgctggccaaaatgccgatgtccatacagcgcgccctcgatccgaacaagaagccaacgccgctggacgatgtcatcagggcggccaccatgatgaatccgcagcaattctcgctgccgccggagctcgagctgcacacccagttcccgggcaatggcaaggtgcaacccgtacagcagacgcatccgccgagcggaaatggcggtaatcgcagatgcgccggcaatcagcgacgcaactccaagccgtttgagctggatgcccagggactggtgccgctgcccgccaaaacctgtttctactgcacgcgctcctgcaaacgggcgccgctcatctcctgcgactactgtccgctctactttcaccaggattgcctggatccgccactgacggcactgccagctggattgtggatgtgccccaatcatgccgagaattttatcgtaagtcagccaacgcacatggaggtctgcttgggttctaatgaggatgtctgttcacaggatgccaatatgaccaatagcatttcggccacggagcgggtgcgtctctggaatcgcttccaccagccacttgaccatgaaaatgtcaagcttgagttcttccggcgtgtcaacacgcgcaatccgccctttcgcaccaagagaaatctgcgtgctcgcgcccacatcgaggtgccagccattgtgcgctaccactacgatcatccgccgccgctgttgccctccatgcgccaaacgttgcgctacgatcgggtaaagcggcgcaataacctgcccaccgaagtcgaggagatatcccgtgagtcggtcaccgaatcgctgctcaaggatctggaggccttgcgcacggctcacgccaaattccgtgagattcagagggaattcggaaccttggagacggccatagatggcgatagcgacagcgatcccagtcctgaagagaaaaggaccgagacgaacactcccgccgataaagtgaatggcgaagtggatacggagaatcccaatacagaatcgaatgcgcaggccagcgaacagccgtcggttgtcaaggtggagtccaagaccagcctagaggtggaggctagcttcgaggaggacgaggaggacagcaagaaatcaacgggtattatcgatgcagacctcttacacctggacgtcgatataatcaagaagctggcgcaccagcgtctgcagcagctggtcgaagagcatccggagattgtgacacagtacaagaatcgcacggccgctcgtcgcctgcgtcaactggcgtcagtcgatggcacacatgtggctggcgaaactgctgccctgcaaggccaactggcgccggaggatatgaaccgtttctcgctgctcttcaccagcgaaacgtcctcaattctggcgcaaaagaatggcaatgccgccgacgaagatcccgcaacggccctgcatccggcactggccacagcggcggccattgcagcagcagatgccgctgccgaaagctatgcgccgcgtgcccgtagcgacacggagaaggcatacgagctggcatcgcgcctggagctcaagctgctgcagtgcaaagtgcaggcgcgtgcggtgataacgccactgggcgacatgctcgaggatagccgctggttcagttcgctggggctggaccattcgattttcatgcgctaccgcacgctgtacattggctacggtggacactattcgccatcgacgacgctggcgcaaacggagaccgtggacctgtcggccattggttactgttgtcgcatttcaccgcagcacgccatcatcttctacgacgaattctccaagtcgtacgagctgatcaattactcagagtttggcaccgaggtgaatggacagctgtatgcctgcgacgtgaccgaaaggatgacaacgcacgccggcaagccgatgcgacctgacgatgcggagctgaagaagcgcgtcgatgagatgctggacaagcgtcggaacattaatcgccagttcgagacgaagaaaatcgacaaagaacggtagctatagtttatttgcccaacttacccaatgatgatgataaccacttgttgatttaatctccccgcagattggcgcccattgttaagcccgcctgccgctgcatgaacgccggaccagtgcccatggtggatggcgcctgggagggatcggcggtgctggctcacggcagcctgctgcgattcggttgcctgtcgtttgtgtttgtcgtgccgtcggtggatctgctgcaggcgcaggcgcgcagcaagcgttcgtagaaccagtacccagactccatcagcagaagcagcagcctttagtttaagcattaagacacagaaacatatacgcgctcaaccgcagccaactccagtggagcagcaccaatctcagtggggcagctagcagccaggcatagggttagggttagcagataccagttcaacttcatcgcatcaatcatcgcaatgcaaagcctcggcagtacttttaaatcacacaatcctccaatcccatccagcattaagggtatatatttgccttatgaccagtgcaataaatacggagtacaaaccacggatgtgcacggctgcaggctgatccatgccagtgggcagtggatctctggtatcaaacgccgtatttattgaattaaccattacgttcataaatcgcataaacccgcatcgcatactttacttttattgtaaaaacagatgtataaattgctaaaacgaaataaacttgtaagatcagagattttttcacatgcaaatggatcgatggagccaccaattagcagtaagccccgcccaataagtgcacatgacttttagtttcttttgaaatgaatgtgtttactttataaccagatcaaatccaactggttaaggcattatagagaacgagaagagtatacacaataggtgccaggcggcgggacgccttgactttgtggagtacacgaaacgtcggataagtacattcggtatggctaatatgcaaaaaatatatatgtatatatttgtaattgtaaagatctaagactacgcatgcaccgcgtccaggtgccggctgccatcctagagtgcggccgcaggacccggctgagcctgtgcctgtgacgggttggtgtgctgcatctgctcctggacgccagccttggccgccgagcgcgtggctcgcgatctctcccattccgctttgtgcttgcgcttagtgtgatggtacatattcgacttggagcggaattccgtgggacagaaggcgcaggtgtgcagcttgacgcccgtgtgcgtggcaaagtgctcctgccgcagaagaattcattatcattagtggtatccatgcagctgcggataactgaaacaatgcaaggcagtgcagtactcacctccaaatatcgcttcatcttgaagcttttgccgcacacatcgcatgcgtacttgggcttgctcaggcagcgatgattctggccaggaagctcaccgcaattgggacaaatgatcgaaacgggtgccgcatggatgacagcctgcagcggagccgccggtcgtttatccgtctctgaaggcgggtggttgctgtaagagattcgttagtaagcttgctgcttgctgcttgctgctggagtatccaatcgacttacccatagggatgcgccatcattgtcccagttgtcgttgtcgtcgttgttgtggcactgctcgttcctacggccgccgctgcagccgccgttgccgacatgacagcaa

SEQ ID NO: 7373 - DNA, 3223 bp, DROSOPHILA
tcgctccgagattgattgtgtacaccggataagaggagcgagcgaaaaagatgtcaaaattggaccaggacccgaacgcctcactgagcatcatggagcaaatcaagcagctcatccgcccgccgcccaacgaggacgagaagatgatgcagcggtccaccaacacgaagcatccgtactacaggcgcccgggcaggggccacaaccacgactattgtgacgcctgcgaggagggcggcaatctgctgtgctgcgatcgatgcccctccagcttccacctgcaatgccatgatccaccgttgagcgaggaggacatacccagtggccagtggctgtgccacagctgtcgcatgagcaagctctcccagccgccggcctcctcatccaaggccagttccgtggagcgtgtgccttcggcgggcagtggctcacgggcgaatactccatcgtctggcgatctggagtccataccgctgaagatccgcaacctgcgcaaacgcagcaacagcgaacgcaatagcaccgagaagctgctggccaaaatgccgatgtccatacagcgcgccctcgatccgaacaagaagccaacgccgctggacgatgtcatcagggcggccaccatgatgaatccgcagcaattctcgctgccgccggagctcgagctgcacacccagttcccgggcaatggcaaggtgcaacccgtacagcagacgcatccgccgagcggaaatggcggtaatcgcagatgcgccggcaatcagcgacgcaactccaagccgtttgagctggatgcccagggactggtgccgctgcccgccaaaacctgtttctactgcacgcgctcctgcaaacgggcgccgctcatctcctgcgactactgtccgctctactttcaccaggattgcctggatccgccactgacggcactgccagctggattgtggatgtgccccaatcatgccgagaattttatcgtaagtcagccaacgcacatggaggtctgcttgggttctaatgaggatgtctgttcacaggatgccaatatgaccaatagcatttcggccacggagcgggtgcgtctctggaatcgcttccaccagccacttgaccatgaaaatgtcaagcttgagttcttccggcgtgtcaacacgcgcaatccgccctttcgcaccaagagaaatctgcgtgctcgcgcccacatcgaggtgccagccattgtgcgctaccactacgatcatccgccgccgctgttgccctccatgcgccaaacgttgcgctacgatcgggtaaagcggcgcaataacctgcccaccgaagtcgaggagatatcccgtgagtcggtcaccgaatcgctgctcaaggatctggaggccttgcgcacggctcacgccaaattccgtgagattcagagggaattcggaaccttggagacggccatagatggcgatagcgacagcgatcccagtcctgaagagaaaaggaccgagacgaacactcccgccgataaagtgaatggcgaagtggatacggagaatcccaatacagaatcgaatgcgcaggccagcgaacagccgtcggttgtcaaggtggagtccaagaccagcctagaggtggaggctagcttcgaggaggacgaggaggacagcaagaaatcaacgggtattatcgatgcagacctcttacacctggacgtcgatataatcaagaagctggcgcaccagcgtctgcagcagctggtcgaagagcatccggagattgtgacacagtacaagaatcgcacggccgctcgtcgcctgcgtcaactggcgtcagtcgatggcacacatgtggctggcgaaactgctgccctgcaaggccaactggcgccggaggatatgaaccgtttctcgctgctcttcaccagcgaaacgtcctcaattctggcgcaaaagaatggcaatgccgccgacgaagatcccgcaacggccctgcatccggcactggccacagcggcggccattgcagcagcagatgccgctgccgaaagctatgcgccgcgtgcccgtagcgacacggagaaggcatacgagctggcatcgcgcctggagctcaagctgctgcagtgcaaagtgcaggcgcgtgcggtgataacgccactgggcgacatgctcgaggatagccgctggttcagttcgctggggctggaccattcgattttcatgcgctaccgcacgctgtacattggctacggtggacactattcgccatcgacgacgctggcgcaaacggagaccgtggacctgtcggccattggttactgttgtcgcatttcaccgcagcacgccatcatcttctacgacgaattctccaagtcgtacgagctgatcaattactcagagtttggcaccgaggtgaatggacagctgtatgcctgcgacgtgaccgaaaggatgacaacgcacgccggcaagccgatgcgacctgacgatgcggagctgaagaagcgcgtcgatgagatgctggacaagcgtcggaacattaatcgccagttcgagacgaagaaaatcgacaaagaacgattggcgcccattgttaagcccgcctgccgctgcatgaacgccggaccagtgcccatggtggatggcgcctgggagggatcggcggtgctggctcacggcagcctgctgcgattcggttgcctgtcgtttgtgtttgtcgtgccgtcggtggatctgctgcaggcgcaggcgcgcagcaagcgttcgtagaaccagtacccagactccatcagcagaagcagcagcctttagtttaagcattaagacacagaaacatatacgcgctcaaccgcagccaactccagtggagcagcaccaatctcagtggggcagctagcagccaggcatagggttagggttagcagataccagttcaacttcatcgcatcaatcatcgcaatgcaaagcctcggcagtacttttaaatcacacaatcctccaatcccatccagcattaagggtatatatttgccttatgaccagtgcaataaatacggagtacaaaccacggatgtgcacggctgcaggctgatccatgccagtgggcagtggatctctggtatcaaacgccgtatttattgaattaaccattacgttcataaatcgcataaacccgcatcgcatactttacttttattgtaaaaacagatgtataaattgctaaaacgaaataaacttgtaagatc

SEQ ID NO: 7374 - protein, 898 aa, DROSOPHILA
MSKLDQDPNASLSIMEQIKQLIRPPPNEDEKMMQRSTNTKHPYYRRPGRGHNHDYCDACEEGGNLLCCDRCPSSFHLQCHDPPLSEEDIPSGQWLCHSCRMSKLSQPPASSSKASSVERVPSAGSGSRANTPSSGDLESIPLKIRNLRKRSNSERNSTEKLLAKMPMSIQRALDPNKKPTPLDDVIRAATMMNPQQFSLPPELELHTQFPGNGKVQPVQQTHPPSGNGGNRRCAGNQRRNSKPFELDAQGLVPLPAKTCFYCTRSCKRAPLISCDYCPLYFHQDCLDPPLTALPAGLWMCPNHAENFIVSQPTHMEVCLGSNEDVCSQDANMTNSISATERVRLWNRFHQPLDHENVKLEFFRRVNTRNPPFRTKRNLRARAHIEVPAIVRYHYDHPPPLLPSMRQTLRYDRVKRRNNLPTEVEEISRESVTESLLKDLEALRTAHAKFREIQREFGTLETAIDGDSDSDPSPEEKRTETNTPADKVNGEVDTENPNTESNAQASEQPSVVKVESKTSLEVEASFEEDEEDSKKSTGIIDADLLHLDVDIIKKLAHQRLQQLVEEHPEIVTQYKNRTAARRLRQLASVDGTHVAGETAALQGQLAPEDMNRFSLLFTSETSSILAQKNGNAADEDPATALHPALATAAAIAAADAAAESYAPRARSDTEKAYELASRLELKLLQCKVQARAVITPLGDMLEDSRWFSSLGLDHSIFMRYRTLYIGYGGHYSPSTTLAQTETVDLSAIGYCCRISPQHAIIFYDEFSKSYELINYSEFGTEVNGQLYACDVTERMTTHAGKPMRPDDAELKKRVDEMLDKRRNINRQFETKKIDKERLAPIVKPACRCMNAGPVPMVDGAWEGSAVLAHGSLLRFGCLSFVFVVPSVDLLQAQARSKRS

SEQ ID NO: 7375 - DNA, 7295 bp, DROSOPHILA
atttacaaatttactattactactactgtatatactttactaaatagtgtcatatctgtgctggctgcagtaatatattttgcaaaatatatttttattcgaattgttttttcttatgcatatattaattatatatattatttaaaatatatttaacatttaagcacgtggaaaatgcatatgtaaataatacaacaagcctgctctatttttaaatatccagctgagtacatcatatttttcgggaaaaacttatgctatgttttccgttagttctttattaaattgaatttttcgttgtagtcatataaacttttttgtttgctctaaccaaaccgttcgcagagaagatgtcatatttaactaacagctttattttttttttaaatacgcgggactttaatatttaattctcaattaattctcgaaacgatgtttttagttcatgctttttagttccaaagctgagactcaaacccaatgccagctccatgcagcgcggacgcacacaccgctcgctatcgatacccaacaattagccgtctatcgatatttgcagactataatatttttatttacacttgttgaaaaagaaagaacatttatttattattaaatttaatttttttgtaatttaatataaaacaaatattaatataataaaattaaaaaaaataagatatattttcagatgcataatcttaaactggtattgataaacataagtttgtcggaaatcaattgatcggaaattttttggcctccactacaaattgaaaatgcatatacaattttaagattgcatgctaataactgaaattgaataaatttaaatttgaagaaattcgttttctgagtcttcgaatagcgatgaaaaaaaaaaatagacatcgatgtttcggaaaatcgataaaaacatcgatgcatcgatgttagcttcgatatttcggtaccgctagttgccacgaaagtcgctcgaacgccggtaacggaaattctcagcaaacgcagcgcaacgtcgttttcgcgtcgccgtcgacgtcggcgttgtgtcgtcgccgcagcagcagaaaataaaaataaaagagaagaaaaagaatcgaaataactgcatacgaaatagatcgaaataaaaagtagtcgcttttattaaaatccacaacaaacaaaagccgaaacgaagaaagtgagcattcatttgttgttggtgtgtcaagcgaattccacacgcagccgccaattgtattaaattcgaattgtttaatttaattgtaaaggtttgtccacaacaaaacggagctggcgaaaattgcatttatttatgtttaattcgagtgtttttgtgtgtgtgtgtgtgctatgtgtttttgtgtgtctttaagttgatttcttttgctattatccttggcgtgtctgtagttctctctgccaccctctctttttgaacgctctcttggcgcaacccccttttaccgttttttgcttattttgttttgtgccagatgtgttcgtaagggaacaacaatattaacccttgatggacccagtttgcaaaatagtaaataataagtaaattttttgacacaacgaaaaactctatagttcttcctatgcacttgaaatacaaatgaacagaaaacaaattcatattgtaaaattgtctttttatgcaaatggagttaattttggagttaattttgtgttcttatttattaatataatatttgaattaaatttaatgaagaattttttttaatatcaatggatgtcctcgaactaacataacgcgcaagtgttaagactgaaaatggaaataggggcagcgaaccgaataaaggaaatggcaaacaaatagacaatttatttagctgattatatgcagcattcaaatcgggattcaatagcatatcaattgatagtatctcattgatagtatctattaaaacccgtagaaaaacacaatatggtatgctaaattcccattccttcgtttctcccccgttttgttttgttccgtttttcgccgctgggcgcaaatttaaattgattttttctctttcttctgggcggctgcacatacagctgcggtcaagatattagcattagttcaattctttatcaataccatatgcactctttcacaaaaccttatattagcaaatatttcctattcacttttattttgggtatgacatttaaaaagggatcgtattttatgcaagttttgcttttaacttcaactgcttgcaatttttttttccccctgaactgtagtattcatcacttggtgcgcttgtgacgttgtggtttgttgcactcgcataattgtcatattaatacgtgcataaaagagtgagcaataaaagtagtggaaggaacaggagaaatggcgtgcaacacagcaattgcccatttcccctttctcccgctttatcagcacttaaaacacactagcccaaaaacataacaaaaggacggtgcttgtaaaactgtaagaattagccctttaacgccagttccattgttctttgttctgattgctaataatttggtttatagtcttcaaacttttactacattatttataaatattaacaaatttgctcattatttataaatattaacaaatttgctcttttcagcgcatcgatcggaacaacaaggatatccacacacaaaccacacacctaaaagactgtaatctgccttaaccataggaaagtcagagaaagaaaagccggaagtcccatacaggatagcaaatcgggcgaagatagcagaaggcatctggatccaggatctgaaacggttgaatcactaagcataaacataatcaaatgatcaccatgacttcgtttatcgaactgctgggacttttcttgctgctgatgctgccattcctctatgagaccaatcacatattccgatactacttcaaattcctgatgtactacggcatcgtgtcgttcaactcgatcatcctcatcccggcattcctcaccagaccatgcgatgtccgcaatctgctgtaagtagtgcaaaatatttttatgcaaatatcatgaaacactaaaccaatctgatataagaataataatacctttagttatcaagtacaagtatagctcagttagaagagaactcccatatctgtttattgagttcagcatgttttgatttagcactaatgggctgcccatctatatatcaataaagcactcgagtggctgattgccaatcaacaaattgtagactcatcgattagtaatacaatacacaaaagtatttgctaaagtgttttccattatgcctaactataaaacataaaactatatcgtattttagttacgacttcgttataatgcttatttggcttcaagtctttttctttatcaaatcaaacatgctttccaatggtgatgatatcaccacgttaattacaaattacaaagtgcaaaatgatgcactttatcatgcttacgagtaaccttgacccaaataaatcttaatgtcattcactctaaaaattttaatggaatgatttaataacatttgtagggagcacttaacttcaacacccatgataccccttttaaattgcttgcaaacccaaaataatgccaaatgtctattcactttatgatgattttcccatgcaaattaatgagcttaatgaaacaattttcatcacacatcacgccaccacaagacaatcaaattggtggtaaataatgcattatattggcttgacgggcaaatggagtaattgcggtatcaccaacttaatttcaaccgaaataaaattgccttatcattgaagaccgcaggtggggcgtccttttcgaaacggtctccttgagttcccaaggcgaatgcctcaatgacacatacatttggccatcaatattaacaagggcccaactgcggaggagtgactgcaggtgtccgcaatgcacttctggccaactggccaactggccaactgtcactcaaggacccagaaagtccaaaagccacaaattgttgtacacttgaagaatgcgaaagaatggtatagtttttgtgtatgcaaaaagcaccttagacaccttagaactagttactttaaatttatttaatttatttaattctgatcaatcaatttagtttaattatgatcattgccaaagttgcaacattatctaaactttttaatctccaaatctcacaaatagtttaatatacgcttaaataagttaaaagatatagatttattgcttcataaacttatgtttatgatgtttgcgttaccaattccggtatcggaaattgaatttgtgacgaatttcttgccaatttgccgtcgcgataaggttttttttttttatggcatcctcgctggtatttgtggcccatggttgttacctctaatgtggctagctgaattgaaacacttgagaactataaatgttaaaaaaaatacatacaaacaacaaaatgcaatgggtatcgtacagttctgatgtcgtaaaattcgtaattatattttcttagtgatttgtgttagtgattttaagtgaggccagtgctgcctagggtcgtcagtccaaggacgaaattttcgaggggaattgaaacggactgttgggttctcgagttaccagttggctatgacgccaatctgggaaaaaaaaggggtactctgtggcgaaagggagcagttgcacgcaagtggaaaagccagggaaaaccgaattgtgtccccaatgcggtgggttttttttttcattttttttttttttaccattttggtatgtggttagtggcagctggtagctggtagcattgctcgccacctcggcgattttgcgcgactcaaataaccatttgcattagacaacaatgaatatttgatatcaggggtggattactacaagtccaacgtagtcgcacacacaaataccactcacctaaatcaattatgcctcttgccaactcaactattttatgcagtttatcgatccattttcggaggcgcgaaatgaacgacgagaattcctagtaaacagtgtgcaccctcctaggggtataatttatacaattcccgagctgtaattacatgtcatgactagctggatttagttgtagttcaggtggaatggttatcatcccggcgacaaggtaaaaatcagagctacgcctcgatggctgtcaacttgattaaataatgttgcactcacaattggccggtggatttgttatggtatatggatttcagaaaatgaccgatccctcttgggctccgtataatataatctctatcgaagaaatcactgattacaatgttactaatatattttcgatttcttatttctttgtttgtagatgggcgagcacctggtgccaccgcgtttcgacgttgattggcctgcgatgggagctgcgcggcaaggagcatttggccaaggaccaggcctgcatcattgtggccaatcaccaaagctcgctggatgtgctgggtaagcctataggtttctctatgcccatcaatccatcaatcaaacagtgatgccaactaaatgagacttttttttctttatgatacgcaggcatgttcaacatctggcatgtgatgaacaagtgcacagtggtggccaaacgagagctcttctacgcctggccttttggcttggcggcatggttggctggcctaatcttcatcgatcgtgtgcgcggcgagaaggcgcgcgaaacgctaaacgatgttaaccggcgcatcaagaagcaacgtatcaaactgtgggttttcccggagggaacgcgccgcaatacgggcgcactgcatccgttcaaaaagggcgcctttcacatggccatcgatcagcagatacccattctgccggtggtcttctcctcctactgcacattcctcaatgataagaaaaagattttgaattcgggtcgcattgtgattaccacgctgccgccggttagcaccgaaggactaaccaaggacgacatcgatgtgctaatggagcgtgtccgctcccagatgattgaaacgttcaaggtgacgtctgcggaggcgttgcatcgttataagcccattaaaaaggttggaattccagccgcctcatcagcatcaacatcatctacgacaacaacaacattggcatcaccgggaactgctgtcactcccgttgcggatgcggcagtggctgccgcagctgccgtggccagtagcagttcggcatacggtcaaccgccgggctacgaagccggagccgcaaaggccagcttgctcaagacactttaggctatgcagcaattcaattcaatccaaacacacacacacacacagccagccacacacactcatatccaaaaaatacgaaacacctcatggcgtagctgaagtgtcacgttttgggggcttttagttggacacgttaactggcaatcagctttatttgggcctatttgggaattctatagtccacagttgtgcaattatcgtacacgtgcagtatttgttttgatattattgtttaaagtccaaactatgttttgtcatcattttattgcatacttttcgtaatttatttctctcaaaaatgactttatgtaagaatatttgtcattagagtattcattttgaggcgtgtgaaaaattaataaggcaatgattgttgagtgcttcgtgcctcaagatatgaacaaagcaaagacactagaataattctagttatcatattttttaatgaaatttatgaaattacagtagttataataatttctattgtacttcctttaattaattagtatatttattaagtcatttgacttaaaatgatgtaacattaacattaaaagtgtttcaaaaaaaatatttcgcttttaaaaaattgtcagatgagagacaaattagaattaaacataacaaattttaacaaacaaatttaaaaaactttaaaattataatagtcagggcgcgaatttgtaaaaatttttttattttatcatattgctaggaaattggccaaaaatacccctaatatgtacaatgtaaattcgtttcttcgatcagaaattgatttcggcccgaaaatcgtcttctagcacaacacgcacacatatacgcgttctcgtctcttgtttttactcacacaagcaagcaaattctatttttagatttcttacgctctcagcgggagtgagcggaaagagagtaattttggccgtcaacaaaaaagtggcatcttgttattctagtgtctttggttataccctgttgaatggaatcgattgattcaaaa

SEQ ID NO: 7376 - DNA, 1413 bp, DROSOPHILA
agcaaacgcagcgcaacgtcgttttcgcgtcgccgtcgacgtcggcgttgtgtcgtcgccgcagcagcagaaaataaaaataaaagagaagaaaaagaatcgaaataactgcatacgaaatagatcgaaataaaaagtagtcgcttttattaaaatccacaacaaacaaaagccgaaacgaagaaacgcatcgatcggaacaacaaggatatccacacacaaaccacacacctaaaagactgtaatctgccttaaccataggaaagtcagagaaagaaaagccggaagtcccatacaggatagcaaatcgggcgaagatagcagaaggcatctggatccaggatctgaaacggttgaatcactaagcataaacataatcaaatgatcaccatgacttcgtttatcgaactgctgggacttttcttgctgctgatgctgccattcctctatgagaccaatcacatattccgatactacttcaaattcctgatgtactacggcatcgtgtcgttcaactcgatcatcctcatcccggcattcctcaccagaccatgcgatgtccgcaatctgctatgggcgagcacctggtgccaccgcgtttcgacgttgattggcctgcgatgggagctgcgcggcaaggagcatttggccaaggaccaggcctgcatcattgtggccaatcaccaaagctcgctggatgtgctgggcatgttcaacatctggcatgtgatgaacaagtgcacagtggtggccaaacgagagctcttctacgcctggccttttggcttggcggcatggttggctggcctaatcttcatcgatcgtgtgcgcggcgagaaggcgcgcgaaacgctaaacgatgttaaccggcgcatcaagaagcaacgtatcaaactgtgggttttcccggagggaacgcgccgcaatacgggcgcactgcatccgttcaaaaagggcgcctttcacatggccatcgatcagcagatacccattctgccggtggtcttctcctcctactgcacattcctcaatgataagaaaaagattttgaattcgggtcgcattgtgattaccacgctgccgccggttagcaccgaaggactaaccaaggacgacatcgatgtgctaatggagcgtgtccgctcccagatgattgaaacgttcaaggtgacgtctgcggaggcgttgcatcgttataagcccattaaaaaggttggaattccagccgcctcatcagcatcaacatcatctacgacaacaacaacattggcatcaccgggaactgctgtcactcccgttgcggatgcggcagtggctgccgcagctgccgtggccagtagcagttcggcatacggtcaaccgccgggctacgaagccggagccgcaaaggccagcttgctcaagacactttag

SEQ ID NO: 7377 - protein, 343 aa, DROSOPHILA
MITMTSFIELLGLFLLLMLPFLYETNHIFRYYFKFLMYYGIVSFNSIILIPAFLTRPCDVRNLLWASTWCHRVSTLIGLRWELRGKEHLAKDQACIIVANHQSSLDVLGMFNIWHVMNKCTVVAKRELFYAWPFGLAAWLAGLIFIDRVRGEKARETLNDVNRRIKKQRIKLWVFPEGTRRNTGALHPFKKGAFHMAIDQQIPILPVVFSSYCTFLNDKKKILNSGRIVITTLPPVSTEGLTKDDIDVLMERVRSQMIETFKVTSAEALHRYKPIKKVGIPAASSASTSSTTTTTLASPGTAVTPVADAAVAAAAAVASSSSAYGQPPGYEAGAAKASLLKTL

SEQ ID NO: 7378 - DNA, 10765 bp, DROSOPHILA
cacatccaatccgataacagtttgcaacaaaccacttaaacttttctttgcagcgggcaacatggcaattgtcaacacagccggtcttaagtatttcgctccgcctattaaataccagagtaagtagttgcatttaaatgtgcacaatgaatttagagcaataaatgaatgaatgtgggaacccccagatgtggagcagccggagagacccaagctgagggtcattgagcgccagccccagctgccgccaaacatccgtccgccaaagatgcagaagcgcctgcgatacatgcgcggtccggagatggtgcacaacacgctgctccataagcagtacgcaatcgtggccactggcggagggcgcctgcgctggggccactacgaaatgatgcgtttgaccatcggacgcaagatgaacgtcaacactatgttcgccacatggcgcgttcccgcaccctggcagccgatcactaagaagggccagggccaacggatgggcggcggaaagggagccatcgaccactacgtgacccccatcaaggccggtcgcgtcattgtcgagatagccggcaagtgcgagttcgttgaggtcaagcagttcctgcagcaggtggccaaccagctgcccttccaggccaccgtcgtttcccaggagatgctcgacgaacagcgcgtcgccgaggaggaacagacccgccagaatgagaacccctttaccatgaagtacgtgatccagaacaacctcagcggctgccaccgttggctctcgcccgtggaccacaagtggttcggcaagcacctgtagatgtatagcttcaattaataaagccatccttcgttaatctgttacgaaactgtttcaagtacttttgaaaactggaaatatcttaaagtaggttcgaacttcgaacttagggctcgttgttccaagccgtgactctgcggcacccaattgtggagcaaataagaaaaacgccatatgaagggaaatgtacgagttctattgcaaacatttgtttaattttccatttcgtttacgtgggtaatatgtaatgcatcatataatatgtttttcttgccgtttcgttcgcattataataaatgtataatattatgcatgtatgcgtgtgtgtatgctttgtcgcggggtatggtgtgtgagcaaatagccttctcccacggacttcagttctggaagcagaactttgacctgccgcagctcctcgtatttgtcaagtaaaatccacaccttcgttgatctagtcaagtttcggtgatcgcgattccgggatccgggatggaatcaaagccggtggaagagggctattgtgcagggatgggaattcgtgtgttttatgttatggggtcgaatggatactcgacccttacccttagctcggcttgtctaacaatcggtatcgtaccaggcagccaggttgttgttgtcattgggtggcgtcggcatggcgtccaagtcaaagttcaatgcaccggcatcaatctcgccaacgtccatgtccatggaatagggcgaagttggtgcgccgctaggcggaatggcgccgatgttaccaccgccgccgctagctccgcctacagctccaccattgccgggagcaccgccagcaccgccgccgcccactgggctgctgatctccagaccctgcatcgaatctattggtagagtatcatatcctgtgaacaaacgagatgggcaaagaatgatagggaatattgtgattagtggagaggatttacaatctccgccagccgtcaactggcagatggtgcgacaccttgaagtcctgcaaaagtggattcactgctgctcgctttaatcgggaactcatctaaaatgcatctttccaacacacttattggatttatgccgattcaaacgaaatgcagactccactcgtacacgacgaccctttaacattaacctagagtatcaaacaacaaaaatctgtcgttgaatactgcttaaaaagaactaaatacgtctaaaatacgacacgacatggacgcgttattgtcgattggaattcgtcctctgaaacttgcatgcacacacggcttacaaactagatacgagtatatacaccataaaatatatggattgtgggtggctaaaactatgcgattatcgcaggctacgtgacatgcagtatgaaccgaaataaagtttattactgctccttcatggagggagaccttaaagataaaagccgtctaatgaaaggaaacaaaatagatttatacaaaacaataaatttgcgaaattatcaaagaaacgtatgtgtttctttactattcacgatccttattttttaaggttgcactctgtggttatttgtggtagatcggtgttcgtgtgtgtgtgtagtgcaaaaatcttcaagctacgtgtaaagtccggagagatagatattcttttccaaatgtgagagagcaggggaagtaatcccgcaaaagactgaagtttatccctattatcccttattgacataattggcgcccaatgtcgggcatcggatgcacaagatttggatttatcgacaaatgtttgtataccgcaaatggaaacaggcggagttatattcacttccttcgcatgcagccgtggaactcaagggtttaacgatattagggggtaacgagcaaggagacagagatattgagatcaagcgagggaactgggtggaagagggtttcgctcacactgaagaaactaaagtgagcttaacgtcttagtttcgattaacaagtgcatatttgaatgatgaacagacatgataacgattaaatggatgcgggggtttggggctggtcccgaggatttttcgaattgtctgaacctgttaacgtttccgttggtttactttttagtggggttatgcaggattcttcttcttggggtgtggctcgaggggtacgatgggtacgagggtctcttcttacgcatatgacatacataccttgctgatggaatgcgcgacctccgtgtgaactgtgcacgctgggcggaccttgtccgtacaggccctcatatgcttcttctggtccaagcatatcctgtgatcgatcgaattcgtgtttgtttatcggtttatcggtcggtttgcgtgatatgtgcgtgatcgtacgtgtgtggttgtgtggtggatgtattttttacagtttcgttttcatttattttttgttgggatggatcagaagtgaaaagttgttaggaaagaagaagacacgcgcaaacgccagtttgcaagtgaatgtgagcgagaggaatagagagtggggtgaggttgttgtggtatcggggcggcgagagcgagacagagagtgagagtcgcattgttggattgttgttgttggtgagattttggtgcagtgattatccgtcatttcggttgttgttgcgtttcatttaccgttgcagttgtgtttatagtgatttgttgttttgttttgggttgttttggttttacacacacaaagtaaacataaaggaaaaaaagaaaagaacaaaagtaaaacaaacgtgaattaattacaaaatcaaaattaaacataaacaaagagcgcgatgacgcagcaattatacaaattgaaattcatgtaagtatgtttttggtcgggttgttttcggaggaatcgtggagggggtgaggttgggttgtgtggtttggggagggtatcaatcaaatatgatcagaactaatcggaatccgtatttgtaatcggcgttcatctacaactacctacttatcgactaacatatacggtctatcgattggtggtttacaagaaaagcaaaaaaccgaacgaaatgaacccaaatgaaatggaaattcaaaaataggttatcgaaatcgtaagcaagcgatatataggtcgatacttaatctggataccattatataatgcttgactaaagtaggttctctacaaatttacaattttatgtacagatttcgcttaacgcgctgcatttttaaatcagattcaatggaacacaagaagggcgtttaaaaagccggaatcccggggacgtcgaatttgcttagcctacttagcacgcacctgtagatcgggacccatgcccaggtcggcattggcccatatgttgttgtcctcgcgcagcagcgagttggtcagctctatggatagccgcttcttgtaatcctgcggcttgtcctcactcatgcgaaagagaacagcggcggcgtatgtggccacgccttcattgcgcgagtgcaggagatcggtcagcggcccagtggcgccctcctgctcgataatctcggcgccctccttgtcagcggcgagctcacaaagaacgccagcagccacgcgctaaagtaagaaaatattcatagtatacttgagtcacaacaagataaacttcgatctcacctgtatgttctcgatttcgttgaacagcaatcgtacaaagatcggtattaccgactgctggcgaatgagtgcccggttgtgagactcgcgggccaggatatgtagcgcccccaccgtgccctcgacaatctcctccatgcgaacgccgtcagcgtatgcggacggctgctgtgaaccagtggtggctatcgaggaacgttgctgcaaggttgcaagtataattgacgtcataattattctctccaacttatgcttccactataactaactcaccctctctgtgtcttggaaggcgcgcataagcagtcgcaccagatggtggatggccccgtgctcccgcaacggggcgtgattggccggacagagggccaaattgcgtatgagtccaatgacggccttgatcaagggccagcgtgatggtggatgcaatagctttacaatcaccgatagtccgtagtttaagcgtacggcattctgggccaactcagagtccacatgacgcgaggtcaagtgacgcagggcacatacagccggctcggtaatctcttcgcgatctccagcattgataatagtacggacgagggcgtccacaccgcccacctgacaaacggtggccttgttgcgctgattgttgcacgtcagatttgaaaggataccggcggcacaggtgaccacgttgacatcggtcgagcccagaacctggacgagagattggagcaaagcttcaaggccctccaccttagtggctgcatccgaaagattgcggagcgtccacaaacagttttgcacaaggcgcggtgacatgttacccaagtgcatagccagcgcctgcattccaccggcatccacgatggccggcttgttgctggagcaaacggagagcactttcagtacccgcgaagtggtccacagaagcttctcgtagtcgtaggagcgcataatgcgcacgagttcgttgggccctccggaggcaagaattattaacttgctctcctggttaccataggccagaatttgcaagcaatctgtgacgatagccagaaacttaacgttgtttcgttgcagcagagtaaccatcttctgaagcccgccggccaggcgcacagccatcttagagccatcctggtggagcagcaaattgtgcagagtggtaattgcatagaacagcacactctccactggcgaggagagcaacttgacgagtgccgggatgccgccactcttgaagatggccagcagaccctggcgatggtgtgataagttgtgcagtgttcctaccgctgccttggtgctctccagatcgttgctgttagagatggcacgcaccaaagcggctaccatctgagggctgttcataatggcatgtcgcgaggcctccttcttagacagctggtggaccatcatggcggcctgggaaactaccacctgatcctcatcgttcagcagcttgatcaactcgggtatggccctggttgccagctcagcgtcgtcctggtagttgatcagattgaccaccgcgtgctttagcatttgtgacggttccgaaagacgttgcactgccgtcggctgttggggatcaaactgggtggagggaatctcaatgccctcctccagggtttccggaaacatggcagcacgtacacgttgggagcgtgtctggctcagttgctggttcatatcgtccacttggtcttgtgtgaaattctgcgggaaaccggtgtccaggtcgaacataagtggatctccctccatctcctcgtcctccttgccagacagcgatggaacctgggtcacggcacccgagtggatgccggagtcgcccaagtacgaattctgctgccacatgagggtctgctccttggcggataccatcggcggcagatcaggtggattgtattgattattatgcgacactgcaaaagattgattgcaaaacgttttagagtgaattgacaaaaatatacactccaacttttctaactcgaatcaccgatgtgtttcgatcatttccattgcaacttaatcgtgttataagaccccaaagaagcagaaatgaagtgtaagaataatttttgtatgctcttctttaacttgttaacatctgtctacacattcatggtaacttttcttttttaaaaccttttgaagtggaaaaacgacagagtagaacggaatactgagtgcagcccaccatctacatataatgcaacgaattcgggtgcggggatgcacacgctttaaccctctgcaacccatttgcatgcgctttcgttaaaagatggccaaatgggaaacgacagcgactgacagcaaagtgagcagcatcccaacagccggcgcaaaaaatgcaaaaggaaaactttgaagcgtgacaaattgaacgctgcaggatattcccagaaagttcagggcgctgggcggaatgggtttggtgcagggggtcagatgctcacacatgagagggtactggcaaaaggatttgtgggcgttttgtttgccacttcagtcttaattatgccgttccaggcccagctttttgcctttgttgttttacttatgcgcggacacagcacggccacgccccttctgtatgcattcgtaattacaaacttcactgctcttcgccatccactctgcaatactacagtcaaatctcaatagatcgaacacggtgctgaatataaatgactccataaaaagcagcattgaaacatgctggtaacctatggaccaggtctccaaatgtggtctctgagttcaacaaaatggtttagcccacagctgatgaattttgttcgctataagcacatgcgactgtaatactgtaatcgcttttcgtttcatttcccaaatcgattaagcgttttttcttcgccatatccgtcgagtgggccacgcacttgaatggagtactgtgttgggatggagggcgcgggcggagcctttaattgcatgttgccgcttactaattaaattctgcacagcagcagcgccagaaaaaagcaaaggcagaagccaagaaaaatgtgcagccaactcgactgcgagttcgggagacggggtacgagaacaaggtccccggagaagaccaaggagcgatggcaaaagggtggcgtgggttggagtgccacgtgcaagtacacgagtccttgaatgtgtgtgtgcgtaagtggatagcatggggagggaatggagtttcaaaggatagtgagcagcggcctactcaagggggtttcggggttgtacagcaattagttgaaaactaaactaaatacttaatagtggtcgaattaaaaggccacttcctaaatggctatgaactgttcactactgtcgtcctagatattgacattcctcgactttctgtggcaaaagtgatgggagttcaatgaagccaacatgcattaacgagctcctcccctttggtgaagtcctctcctgcgcctctgagagcctcaccaacgcgctctgcaaatcaagtgtcaaaaagaaatcttctttcctactccgtttactgcgtcagcggaaaagtgtaaatttcaaactccgaagtagaagggagcgcttttttttttgatgaatcggatataagcacaggccgctggtggttgatggcccaacaaaaaaaagatcatcaagcattacaagtatgtagatgtacacaaattatttgtctggggtggatggatatagttgttaccctgtattctgcagacaacccacaaagggaatatcagaaacaaatgacaaaagcaaatactttatgtcaaatttgccaaatttgtcaaaaacaagcatcgctccctcatttaacgttggagaggggttgttattgtattgcgatacggggataattgtttcacagatacaatgcgctgttgcatccccttcatagggccatgtattctgactatttatcctaaatgttctaaactctagagctaccatgacttaattgcgtccattgaaacgcaatatcatctctaatttgatgaaatcggatcctgtatacaactgcatttggactgggtatacaaaagcccaaagtggaacactctgatacacagttaactttgatgctctttgcatactccctggaagatgggaaagggaagagtaccgctgctggaaatacttactggttcgattctgggctggcatgtaactcatcttggtgattgaggcgctttacaccacacctgcaagaaagagacggagagtatatgagtaatgtgctggacagtcaataacatggagttcgtgtgtgcttcggatggagaccacggaactccactaaatgggggccccggaaagaagggcttgttgtgtttgcagactgccaacagacgcagatatcgtccgttagtcacttattctagtcgttggtctttttttttaactcatttccgctttgagatgccgaagcataatatgaaatatgctgcgtatacaaacaaacgcactaatacattcttacgcaggtagaacgggtatttgtgggtatgtgtgtgtctacctgccgaagactttggccacgaaccttgagttatttaattactttgtttagcactctttcaaatctcatgcactccaacaaaaaacaaaatggatttttcacttctctcgaaaaaggcgcagcggaaaatgcgaccgaccagcacgctcgtttaaacggaacagaatccagatgcggagagcgcaagcaaagcaaggcacttgcaacaccgcgcgtgcggagtgcgggaaagggacagggaaagagactgggagagaaagtaaagggccgcggcagtgcagcatacaaatgcagtgctgcgcagagttgccacacatccaaacgattgtgcctacacacacatactcgcgtaggcagctcagaaagaatcccaactccatttcagttgtcgattagataaaacacctaacgataagcctgcctctagattcgaagaaaacgatttcctgtctgtggcattgtttacattccagcgagcaacaaaacaagcgcccgatttacgggggaggaatacataaaaatgccgtttgtgtgtatccagatcatacacacacacatacacaggcgcacatccagcgaacccctgcccacccccgcgccgacttgtttgccatggctttccaactttcatggcacacagaaactttggctttccaaacggattcactaccgactaacagtactcaccgcgtccaaggaatttaagtctgctttagagcaggatttatttatttaaaacgctataagaaacaaaataacagcgaattgtctgctcgagaaaaactgtgtatatggcgacgaaacccaactagcgatggcctgctgctgtcccgataactcgatgggccctgtgcgataggccaaaggaatttttcaaattttttttgttctgagaacacaaaaatctcacgaaatttgtatagcatttcatccttaagaaactcaattcacaatatttataatttagctaaggcgaatttatttctagttcatgttatcatgttatctcgaactcaccgtttatcttgtataaacatttaccaacacaagcacctgagtgtacatgagggtgtatgacaacacaggtacgaccaaaaactattgtttttgggcgacgaattaaagaaatatctatgactttactattacttaccgcttcgaaagtaaatttatctgctcaaaggcaggttaacgcacttttgacgcacttagatatttaaattcgacaaaaatccccgactatgaaaactgtgtatatgagcgcagaacagataaccgataactcctctatcgcaggtggctgccaacttgcttcaaaatagaaagcgcactttttaaatttccaaaagtattcaaacactggtctttaatttcttaatacatatttaagttgggcaagcaatattggtttatgcagtcgtagaagtgggttcatcggttatggtcacagcagctggcggcggatcgccggccttccgttgatccctaaagaacatgacccacgcgctcttatggatctctattccatcacataggccatacacctgggcaaatccgaaataggcagcaacagcggcgacaccgaagagaggtaccattatgactagtcctcccaggcaggcgaagaacaccatggacacaatggtcaggagtgtgcctaaaacgagtcgataagaacgtgatctctggtaaacactacggaacgcaccttctagcaccagcaaacctgtaaaggtcataaccatggtggctattccaaacccaaatattataaggaagggcagcatgaatacaagaccaccagctagcaggcagatagcaacgtgcggattc

SEQ ID NO: 7379 - DNA, 3112 bp, DROSOPHILA
cgggacagcagcaggccatcgctagttgggtttcgtcgccatatacacagtttttctcgagcagacaattcgctgttattttgtttcttatagcgttttaaataaataaatcctgctctaaagcagacttaaattccttggacgcggtgtggtgtaaagcgcctcaatcaccaagatgagttacatgccagcccagaatcgaaccatgtcgcataataatcaatacaatccacctgatctgccgccgatggtatccgccaaggagcagaccctcatgtggcagcagaattcgtacttgggcgactccggcatccactcgggtgccgtgacccaggttccatcgctgtctggcaaggaggacgaggagatggagggagatccacttatgttcgacctggacaccggtttcccgcagaatttcacacaagaccaagtggacgatatgaaccagcaactgagccagacacgctcccaacgtgtacgtgctgccatgtttccggaaaccctggaggagggcattgagattccctccacccagtttgatccccaacagccgacggcagtgcaacgtctttcggaaccgtcacaaatgctaaagcacgcggtggtcaatctgatcaactaccaggacgacgctgagctggcaaccagggccatacccgagttgatcaagctgctgaacgatgaggatcaggtggtagtttcccaggccgccatgatggtccaccagctgtctaagaaggaggcctcgcgacatgccattatgaacagccctcagatggtagccgctttggtgcgtgccatctctaacagcaacgatctggagagcaccaaggcagcggtaggaacactgcacaacttatcacaccatcgccagggtctgctggccatcttcaagagtggcggcatcccggcactcgtcaagttgctctcctcgccagtggagagtgtgctgttctatgcaattaccactctgcacaatttgctgctccaccaggatggctctaagatggctgtgcgcctggccggcgggcttcagaagatggttactctgctgcaacgaaacaacgttaagtttctggctatcgtcacagattgcttgcaaattctggcctatggtaaccaggagagcaagttaataattcttgcctccggagggcccaacgaactcgtgcgcattatgcgctcctacgactacgagaagcttctgtggaccacttcgcgggtactgaaagtgctctccgtttgctccagcaacaagccggccatcgtggatgccggtggaatgcaggcgctggctatgcacttgggtaacatgtcaccgcgccttgtgcaaaactgtttgtggacgctccgcaatctttcggatgcagccactaaggtggagggccttgaagctttgctccaatctctcgtccaggttctgggctcgaccgatgtcaacgtggtcacctgtgccgccggtatcctttcaaatctgacgtgcaacaatcagcgcaacaaggccaccgtttgtcaggtgggcggtgtggacgccctcgtccgtactattatcaatgctggagatcgcgaagagattaccgagccggctgtatgtgccctgcgtcacttgacctcgcgtcatgtggactctgagttggcccagaatgccgtacgcttaaactacggactatcggtgattgtaaagctattgcatccaccatcacgctggcccttgatcaaggccgtcattggactcatacgcaatttggccctctgtccggccaatcacgccccgttgcgggagcacggggccatccaccatctggtgcgactgcttatgcgcgccttccaagacacagagaggcaacgttcctcgatagccaccactggttcacagcagccgtccgcatacgctgacggcgttcgcatggaggagattgtcgagggcacggtgggggcgctacatatcctggcccgcgagtctcacaaccgggcactcattcgccagcagtcggtaataccgatctttgtacgattgctgttcaacgaaatcgagaacatacagcgcgtggctgctggcgttctttgtgagctcgccgctgacaaggagggcgccgagattatcgagcaggagggcgccactgggccgctgaccgatctcctgcactcgcgcaatgaaggcgtggccacatacgccgccgctgttctctttcgcatgagtgaggacaagccgcaggattacaagaagcggctatccatagagctgaccaactcgctgctgcgcgaggacaacaacatatgggccaatgccgacctgggcatgggtcccgatctacaggatatgcttggaccagaagaagcatatgagggcctgtacggacaaggtccgcccagcgtgcacagttcacacggaggtcgcgcattccatcagcaaggatatgatactctaccaatagattcgatgcagggtctggagatcagcagcccagtgggcggcggcggtgctggcggtgctcccggcaatggtggagctgtaggcggagctagcggcggcggtggtaacatcggcgccattccgcctagcggcgcaccaacttcgccctattccatggacatggacgttggcgagattgatgccggtgcattgaactttgacttggacgccatgccgacgccacccaatgacaacaacaacctggctgcctggtacgataccgattgttagacaagccgagctaagggtaagggtcgagtatccattcgaccccataacataaaacacacgaattcccatccctgcacaatagccctcttccaccggctttgattccatcccggatcccggaatcgcgatcaccgaaacttgactagatcaacgaaggtgtggattttacttgacaaatacgaggagctgcggcaggtcaaagttctgcttccagaactgaagtccgtgggagaaggctatttgctcacacaccataccccgcgacaaagcatacacacacgcatacatgcataatattatacatttattataatgcgaacgaaacggcaagaaaaacatattatatgatgcattacatattacccacgtaaacgaaatggaaaattaaacaaatgtttgcaatag

SEQ ID NO: 7380 - protein, 840 aa, DROSOPHILA
MPAQNRTMSHNNQYNPPDLPPMVSAKEQTLMWQQNSYLGDSGIHSGAVTQVPSLSGKEDEEMEGDPLMFDLDTGFPQNFTQDQVDDMNQQLSQTRSQRVRAAMFPETLEEGIEIPSTQFDPQQPTAVQRLSEPSQMLKHAVVNLINYQDDAELATRAIPELIKLLNDEDQVVVSQAAMMVHQLSKKEASRHAIMNSPQMVAALVRAISNSNDLESTKAAVGTLHNLSHHRQGLLAIFKSGGIPALVKLLSSPVESVLFYAITTLHNLLLHQDGSKMAVRLAGGLQKMVTLLQRNNVKFLAIVTDCLQILAYGNQESKLIILASGGPNELVRIMRSYDYEKLLWTTSRVLKVLSVCSSNKPAIVDAGGMQALAMHLGNMSPRLVQNCLWTLRNLSDAATKVEGLEALLQSLVQVLGSTDVNVVTCAAGILSNLTCNNQRNKATVCQVGGVDALVRTIINAGDREEITEPAVCALRHLTSRHVDSELAQNAVRLNYGLSVIVKLLHPPSRWPLIKAVIGLIRNLALCPANHAPLREHGAIHHLVRLLMRAFQDTERQRSSIATTGSQQPSAYADGVRMEEIVEGTVGALHILARESHNRALIRQQSVIPIFVRLLFNEIENIQRVAAGVLCELAADKEGAEIIEQEGATGPLTDLLHSRNEGVATYAAAVLFRMSEDKPQDYKKRLSIELTNSLLREDNNIWANADLGMGPDLQDMLGPEEAYEGLYGQGPPSVHSSHGGRAFHQQGYDTLPIDSMQGLEISSPVGGGGAGGAPGNGGAVGGASGGGGNIGAIPPSGAPTSPYSMDMDVGEIDAGALNFDLDAMPTPPNDNNNLAAWYDTDC

SEQ ID NO: 7381 - DNA, 3216 bp, DROSOPHILA
gatatttccaaatttaaaaataaaaaaattatatatatgtatgtataccaaatgatatgccattcagataaacgaaacaacaataaatagtcacgtataaacatatttatgtaaaaatatacatataagcaagttggcttgcagttgttaacacataaaacttaaccgtgtgtaataaccaaggaatcccgattttcaactatgaatcaagtaccgaacattgtaatccctgcagcgacactgagtttaaagtcaacaataaagcgcatctatttattaaagccacagacccctgcattgtagggcttccgtcagtggttcatccagttcaaccagccagccaccaccagatgcaactttagtctgcgacttcagagcgacgccgttggttggattacttctacactccagaccattatcgtctgcatttttgctttatcattgcttaagttaactttgttatctgcaccaccacagaaagaagtccgggtgttttaatttcgggttggccccatatcatgcgtttgacccggccacctgttcagtagttcgtgtgaattccagcagggcgtagctataaaatgtatcactaccagcaaggtaagtaccgcccggattgggctgaaaccaaaccaaattggctacggaaaggtgctttagattagataatcgatttggctattgtataaagcttattgactgcatcgttttctctcagtaagagccaacaaaatatatctctctcggcgcattttcatctgataagacagctgaaaaggtttcgttatgagcccaaaaacagtgattcacccaatcgaagggagagtgaacaaccattttgaaattgtatggtggcaatatcagttactcaccgacatcaatacacaaatcttatctagagtagaagtgtggggctgtgataagagccggtaaccggctaatctcaactcatacgtccatatgggaacacctagaaagggcgattcggttccattaagctgaaacactagcacgctgccggcagtcgggcaaagagagcaccgtaacttaagtgactaaagtttagtcatagcaatttagccatgagcagcgacaatcattttcagtacggttagtcattgcattaactttcctgcttccttgaattgtcttccaaccacacaggcgatgaaactggcgcatacacagatgcggaagcggacaagagcttcgccttcgatgaccagagcatccggaagggatttattcgaaaggtctacttgatattgatggtaagtgctgatatttgaactgaaaaagaaaatatcaatttaaattgtccaaaaataaaggtatttgcttcactacttgtctgctttgggtcactttaaaacttcaagatttattgacttcctgcaatctaattttgatatcgcgctctatttctagtgccaattgctgatcactttcggttttgttagcgtatttacgttctcgaaagcttcgcaggaatgggtgcaaaaaaatccggcactgttttggatagccttggtaagtttttacgacttttatgctaaatattgaatacaaatatatccaatttttaaactcaggccgttcttatcgtgaccatgatctgtatggcctgctgcgaaagtgtacgccgtaagacgcctcttaacttcatctttcttttcctgttcaccgtggcggagtcgttccttctgggtatggtcgccggacagtttgaggctgatgaggtcctgatggcagtgggaattacggccgcggtggccctgggactcaccctgtttgccctgcagaccaaatacgattttacgatgtgcggaggagtgttggtggcctgtctggtggtcttcatcatttttggtataatcgctatcttcataccgggcaaggtgatcggactggtctatgcctccttgggagcattgctcttctccgtttacttggtgtacgatacccagttgatgctgggtggtaatcataagtactccatcagtcctgaggaatacatcttcgccgctctaaacctctacctggacattattaacatcttcatgtacatactgaccattatcggattgtctcgcaattagactggtcattatgatccatagcttctattccagttttagaaatgtaacttaattttatgtgcccagtgccaccttagccggaaagaaatacaagacgactaactaatccaacattgtcgagtgctcgctttggtttgggattttggctgggattggggcgcgctcaactagttcgaaccttgtccacaccgcggtgtccaattaattaatgcgcacgagaggccgtaatgtaattatgttcaatcagcccctgcagcgccaccagttcctggactggattgaatgtggacaaggtgatcggcgcgatcgtcagttgcgcgagcgtctggctaacgggcggacatggatttcgacgaggtgctgcgggaggtgggctcctttggtctctaccagaaggtcatcatctgttccgttctattgcccgccgcgctgccctgtgccttccacgcatataggttggtcatccttctttggtattctataataataatattgaaaaagaaatcttaatgggattttcacatccatgcgatagcatcatttggggtctaccttttcgcctcttaaaggtacctcatcagaaaattttcataattatctaaaatgattattttctagccagttgttcatagcggccacacctcagcacttttgtcgcgttcctgagctggagccctggacgcaggactatgtgcagcttgttaagaacctgagcattccgcgtaatcgcaatggagcctatgccgagtgttccatgtactcgagaaattacaccgatatagtgcgctatcttgagtatcgacctcctccggatttgttgcgacaacaggcagaggatttgctcaagttgcagccggatacgacgcaggtggtgccgtgccaacatggctggcactacgacaagtccatatactcaagtacggtggttcaagaggtggggattttccaattggatatggtatgttagaattatttcctcatatatcttgcagtggaacctggtgtgcgaccgcagcttccttgtgactttggcgcttgtggtcttcggtgttggcggattgctaggtaactatgtatttggatatctagtggatctgtggggcaggcggccatcctt

SEQ ID NO: 7382 - DNA, 919 bp, DROSOPHILA
gaaacactagcacgctgccggcagtcgggcaaagagagcaccgtaacttaagtgactaaagtttagtcatagcaatttagccatgagcagcgacaatcattttcagtacgatgcggaagcggacaagagcttcgccttcgatgaccagagcatccggaagggatttattcgaaaggtctacttgatattgatgtgccaattgctgatcactttcggttttgttagcgtatttacgttctcgaaagcttcgcaggaatgggtgcaaaaaaatccggcactgttttggatagccttggccgttcttatcgtgaccatgatctgtatggcctgctgcgaaagtgtacgccgtaagacgcctcttaacttcatctttcttttcctgttcaccgtggcggagtcgttccttctgggtatggtcgccggacagtttgaggctgatgaggtcctgatggcagtgggaattacggccgcggtggccctgggactcaccctgtttgccctgcagaccaaatacgattttacgatgtgcggaggagtgttggtggcctgtctggtggtcttcatcatttttggtataatcgctatcttcataccgggcaaggtgatcggactggtctatgcctccttgggagcattgctcttctccgtttacttggtgtacgatacccagttgatgctgggtggtaatcataagtactccatcagtcctgaggaatacatcttcgccgctctaaacctctacctggacattattaacatcttcatgtacatactgaccattatcggattgtctcgcaattagactggtcattatgatccatagcttctattccagttttagaaatgtaacttaattttatgtgcccagtgccaccttagccggaaagaaatacaagacgactaactaatccaacattgt

SEQ ID NO: 7383 - protein, 239 aa, DROSOPHILA
MSSDNHFQYDAEADKSFAFDDQSIRKGFIRKVYLILMCQLLITFGFVSVFTFSKASQEWVQKNPALFWIALAVLIVTMICMACCESVRRKTPLNFIFLFLFTVAESFLLGMVAGQFEADEVLMAVGITAAVALGLTLFALQTKYDFTMCGGVLVACLVVFIIFGIIAIFIPGKVIGLVYASLGALLFSVYLVYDTQLMLGGNHKYSISPEEYIFAALNLYLDIINIFMYILTIIGLSRN

SEQ ID NO: 7384 - DNA, 3038 bp, DROSOPHILA
gccgtttagcacgacacagtggccaatggcaagttacaacagtctgaaataatcaatttattatttcaaagaagatgtatgaaacttcatgtatgtctagtatttctttaccttagaccgcattatgtaatagaacaaataacaagtatacaccgttaaaagtcaaatgtgtgaacatttaatcaaacccagaactaaattattcccaaacaaattaatatatttaaagcaacatcccagtagttctagaaaaaacacaagtagccacaaacaaagaaccgcagttttcactgcaaacttccttctagaacttgtgtcacatccctttgatttacttaacaaaaaattgtgatccttttgataatttaattggagaaataagtgaaattgtttgaacacctttagggagcgtactccgaatgtctaataaggaggatcccaggatcttctgtcgatcccttggatccgtccggcgctaatgaatagaagcgtgcgtgagctgcacataaaattggcgatcgcgacttttgctaagttaattaacacagaaatcaaattgctggcgtgccgtagcaaaaagagccctcactcagataccttgatcgtttttcgatatttcgagttgatattttgagtttaaaatttgagtgtttcttttggactgtcgagtgagaacagttttcctgtgggatactcgagtacctgagacagagaaagagagagagactacctgtggctcactcacttcgagttccctacctgtgcaggtagctcttgccgtcactctctctctctctttctctccgattctctcgcccgtttctctgcctgagtgttgtgcagagagttgcataaagggtacataacgcgagggtttaggacgaagggactcattcttgtgtaaggtgtcaaacgatcaagttcaagtattgtactctgttcatttatttttttctgttgatcgttatccggaaagttaaagaaagctccgagtgtgttaatgaaaaataataataatacaacgaaaagcactaccatgtcatcgagtgtgctgtccaccaacgaaacgtttccaacgaccatcaattcggcaacgaagatctttcgttatcagcacataatgccagcccctagtccattaattcccggtggcaatcaaaatcaacccgctggcacaatgccaattaagactcgcaagtatacaccaaggggtatggcactgaccagatgctctgaatcagtatcatctctatcgcctggttcctcgccggctccatataatgtagaccaatcccagtcggtccaaaggcgcaatgctagagaacgaaatcgtgtaaagcaggtgaacaacagcttcgccaggttgcggcaacatataccacaatccataatcacggatttgacaaagggtggtggtcgaggacctcacaaaaagatctccaaagtagacacactgcgcattgccgtcgagtacatccggaggcttcaggatctggtggatgacctaaatgggggcagcaatattggtgccaacaatgcagtcacccagcttcaactttgtttggatgagtccagcagtcacagttcgagcagcagtacttgcagttcctcagggcataatacctactatcaaaacacgatctctgtcagtcctctgcaacaacagcagcagctacagaggcagcagttcaatcaccaaccgctgacagcgctctcattaaataccaacttggtgggcacatccgtaccaggtggagatgcaggatgcgtatccaccagcaaaaaccagcaaacctgccactcgccaacatcatcattcaactccagcatgtcctttgattcaggcacctacgaaggagttccccaacaaatatccacccacctggatcgtctggatcatctggacaacgaattacacacgcactcccaacttcagctaaaatttgaaccgtacgaacattttcaattagacgaggaggactgcacccccgacgacgaggagattttggactacatctctctatggcaggagcagtgacttaatccccaaaatttaccaccacgccctattttcttctagtcaatgttgagttgaaccaagtgcctcaaattgtaaataacactaatacaaaaacaacatacccccaatttttttttcttactttaagctatttttttacattgttaagaaccacgagaccagtttcaaatttatatatttatgaaataactatagcatggaaacgaaaacatatttttttgctaatacaattttatgttaattagtttttggtggaaaaataaaatgaaaaaattaaacgaaaaatcatatttaagttcttttctcaaaggggatccatctattgatcaggtttgtaaaacattcgggtactacttgcattgccttgcagtgccgatgggaccatgtgcagccgttatgtacaattaaggttgctttgcattggttttacaaaatcactcttatatccaaaaatcattaatacgaattacagataacgcaaaacatagatcagtatttggttttagaccagtagtttcctatttcttcaggtagtttctaagaatgtcaaattatcgcaggtaagacgatgacacctgtgacacgtgccacgaggttactagtttaaaaggttactagttttacaattacgactttgaaattcagatcagatattgaacttaaaaaaggaaaagtgtcgaaaaagcaatttacaatttattcaatataagaggagttcgtatttatgtatacattactacttaaatatataaagtgaggtagttttaacccgatcaacacttttaagactttttcttttgaatttgctcagcttaactatagttcctagtattccctataatgtacggccttacaaaaaagtattttacccactttttacacttctgaaaaagttaaatgcaaacaccttaccccaaacaataactaagttcttcactcccacgcaccgttgagatgtcagtccgttggaataaacctcttccactggccagacaat

SEQ ID NO: 7385 - DNA, 1038 bp, DROSOPHILA
atgaaaaataataataatacaacgaaaagcactaccatgtcatcgagtgtgctgtccaccaacgaaacgtttccaacgaccatcaattcggcaacgaagatctttcgttatcagcacataatgccagcccctagtccattaattcccggtggcaatcaaaatcaacccgctggcacaatgccaattaagactcgcaagtatacaccaaggggtatggcactgaccagatgctctgaatcagtatcatctctatcgcctggttcctcgccggctccatataatgtagaccaatcccagtcggtccaaaggcgcaatgctagagaacgaaatcgtgtaaagcaggtgaacaacagcttcgccaggttgcggcaacatataccacaatccataatcacggatttgacaaagggtggtggtcgaggacctcacaaaaagatctccaaagtagacacactgcgcattgccgtcgagtacatccggaggcttcaggatctggtggatgacctaaatgggggcagcaatattggtgccaacaatgcagtcacccagcttcaactttgtttggatgagtccagcagtcacagttcgagcagcagtacttgcagttcctcagggcataatacctactatcaaaacacgatctctgtcagtcctctgcaacaacagcagcagctacagaggcagcagttcaatcaccaaccgctgacagcgctctcattaaataccaacttggtgggcacatccgtaccaggtggagatgcaggatgcgtatccaccagcaaaaaccagcaaacctgccactcgccaacatcatcattcaactccagcatgtcctttgattcaggcacctacgaaggagttccccaacaaatatccacccacctggatcgtctggatcatctggacaacgaattacacacgcactcccaacttcagctaaaatttgaaccgtacgaacattttcaattagacgaggaggactgcacccccgacgacgaggagattttggactacatctctctatggcaggagcagtga

SEQ ID NO: 7386 - protein, 345 aa, DROSOPHILA
MKNNNNTTKSTTMSSSVLSTNETFPTTINSATKIFRYQHIMPAPSPLIPGGNQNQPAGTMPIKTRKYTPRGMALTRCSESVSSLSPGSSPAPYNVDQSQSVQRRNARERNRVKQVNNSFARLRQHIPQSIITDLTKGGGRGPHKKISKVDTLRIAVEYIRRLQDLVDDLNGGSNIGANNAVTQLQLCLDESSSHSSSSSTCSSSGHNTYYQNTISVSPLQQQQQLQRQQFNHQPLTALSLNTNLVGTSVPGGDAGCVSTSKNQQTCHSPTSSFNSSMSFDSGTYEGVPQQISTHLDRLDHLDNELHTHSQLQLKFEPYEHFQLDEEDCTPDDEEILDYISLWQEQ

SEQ ID NO: 7387 - DNA, 2875 bp, DROSOPHILA
ggcgcaattaaggcgtccagcaggcgggtcttctcctcgttccatactttgttcatactggcccacctctgcttgttcgcagagtcgctgatctgcgagtatgggagaagtcaacaatgttttgactatatggttcattacttacattctttttcgtgtcctcgatcaccgagagaattgcattctcgcgttcgttcttcaggaatgtgcgcacatccgtgtccgcctttacgtctagcggctcgaaggttttccgggcactcagcgcctccagcttctggttcagcttgggcaggtccacgcccttggagcccagcagtatgtgactggtgaatgaggttcatatcgattatggttcactttaattcagtattgtttactcacgcctggatctctttgcagccggtttgggtgacgcgggagtggagctccgtggtggcccgcaggacctgctgaagcgtccgctccacggcgggcagctcgcactctgccttcgcgtcattgttcaggttctgggcgcgctgcagcagagtgttcaggtccatttttgcaaataaataaagttgagtccaaaagcagcggcaagatcagtgtgaccagatgttggcgcctcaactgtgttagagatgacagtatcgattccggtacgcctgtgcaagcaattcctagtgttgtataatagattaacaaggaatttaatgaatatgaaataaatttaatattatttccattaaagcatattcgaaaatttgctttaattcatatatttatatttgctttaattcatatatatatatatatatatatatatatatatatatatatatatatgtatatatatatatatataattatcaaagttatagttttagtttttcagtttttttcaatatagttgctaatagttttgccgatagtgctacctgtagtttccacttgccatctctaaaaacgtgataaacacgcttgttttgtttttaaagttggatccacttgcctgcttgcaaaatatggctcttttgactgagaagcgtgttaaaaagacacatgctcctgcgagcgacagttctccggaggaatccgattccgagggcagccagaattcagccagcgaagcggagggcaacgccggctgggcggattccattcagaaggtcctgaagaccaccaagccgaagacccaaaaaaaaaccgtgctagctcgagccaaaaaaagccaggcggctgtgcgattccagaaagacgccgccaacaaaaagccaggattcgatttcgagatcgagaaagcagatgtcaaggaggaggacgaaggcgataaccatgaagacgagaagccgcaggcctctgccttggatgccacgctaaccaaacagcagcgtaagaatgtgcccctccagctgcgtgtgaagcccagtttccgggacatggagcgtgaacgaacgctccgcaaagttgccactcgtggagtggtgcagttctttaatgccgtgcgcattcagcagaaggatctgcagcagcagctggaggaagcgggtccgctggacagccgacaggatgcggtgctaaacaacatcaacaagcgaaagtttttggacgtcctgatgagcgggaagcgcgccaaatccacacccgtagataacgctgtaaagaaagaggaacaagaaacggatgacgacgacgaagacaagggctccagcggcaaaaagaagtccgaatggagtgtgctgcgcgaggacttcatgaccaacaagaagatcaagcactgggacgaggaagacgacgacgaggagggtcacaatgatgaagctgatgacagcgattacgatgatggggaagaatagctttaattaccaaataaatgttagcttttcaattaagtcgcgtttatataatggtctaattaatggtttccgccttggaggtcatgtagatggccacaatcaggccaaacagtccgatagccgagccaaaaatctccacaatgaggatcttgacgaagagcgccgagttggccgcatccgccagggcagcgccggatcccacgatgcccacagcaatgccgcaggccacgttcaccattccaacgcagagacctgccccaaaagtagcgaatcccgtaaacatattggtcgccatgaccgtgctgtcggtgatcagacgcacgctgctgaacttgttgacgttgccggacagcaggatggccgtgatcaggccatagatggccaccgcctcgcaaaagatgactgagatcaggttcttggtcttgatgcgaggcgatcgcactccgccgcccgccacactgcatccaatcatgtagattccactggcggcgcccagaacggacagggcgcaggcgaggaagatgcccatgccggaccacaggaagggattcgaggtgtacaggaaccagccgagccccatgcgctcacccatattgaccatcacgttggcgaagattatgccaaccgcgcccaacgaggcggcgcccagtacgaacagcataaagaataatccaaaactcatcttagagatcatcttttaagcgaaaagcttcgaattaacagaatataaagaatcgattttaagttggcacggtggaatgaaatcttttcgaactgacaggataatcatttcttatagaacatataaatgatatgtagaaatgaatgccaataaaaacagaaggaataaaatacatttgtgtatttagttagaagatgaaatgattacatagcaacttatgtaagtcggcatcaattcatggaaatgcagaaaatccgcagcttaacgattcgacttggccacgcgctccaactcgtccttcttcttgatggcgtaggagttggaggatcccttggcggcgttgatcagctca

SEQ ID NO: 7388 - DNA, 875 bp, DROSOPHILA
cttgcaaaatatggctcttttgactgagaagcgtgttaaaaagacacatgctcctgcgagcgacagttctccggaggaatccgattccgagggcagccagaattcagccagcgaagcggagggcaacgccggctgggcggattccattcagaaggtcctgaagaccaccaagccgaagacccaaaaaaaaaccgtgctagctcgagccaaaaaaagccaggcggctgtgcgattccagaaagacgccgccaacaaaaagccaggattcgatttcgagatcgagaaagcagatgtcaaggaggaggacgaaggcgataaccatgaagacgagaagccgcaggcctctgccttggatgccacgctaaccaaacagcagcgtaagaatgtgcccctccagctgcgtgtgaagcccagtttccgggacatggagcgtgaacgaacgctccgcaaagttgccactcgtggagtggtgcagttctttaatgccgtgcgcattcagcagaaggatctgcagcagcagctggaggaagcgggtccgctggacagccgacaggatgcggtgctaaacaacatcaacaagcgaaagtttttggacgtcctgatgagcgggaagcgcgccaaatccacacccgtagataacgctgtaaagaaagaggaacaagaaacggatgacgacgacgaagacaagggctccagcggcaaaaagaagtccgaatggagtgtgctgcgcgaggacttcatgaccaacaagaagatcaagcactgggacgaggaagacgacgacgaggagggtcacaatgatgaagctgatgacagcgattacgatgatggggaagaatagctttaattaccaaataaatgttagcttttcaatt

SEQ ID NO: 7389 - protein, 276 aa, DROSOPHILA
MALLTEKRVKKTHAPASDSSPEESDSEGSQNSASEAEGNAGWADSIQKVLKTTKPKTQKKTVLARAKKSQAAVRFQKDAANKKPGFDFEIEKADVKEEDEGDNHEDEKPQASALDATLTKQQRKNVPLQLRVKPSFRDMERERTLRKVATRGVVQFFNAVRIQQKDLQQQLEEAGPLDSRQDAVLNNINKRKFLDVLMSGKRAKSTPVDNAVKKEEQETDDDDEDKGSSGKKKSEWSVLREDFMTNKKIKHWDEEDDDEEGHNDEADDSDYDDGEE

SEQ ID NO: 7390 - DNA, 4754 bp, DROSOPHILA
aacacgtccgaaagagtcgcagccaagccagttcagttggccagttcgtccgggagcagagcagcataacaagtggagcgcgactttgccttgccgaaaattgtttgccaatgtcgcgataaagctaaaagccaaacaaaaacaaaggcaaaactgaagaaaaaacgagtgtaaaaaaccgtggaaataatgccgccaaacatggcaatggcccaggttcgagcgatggaaagccggaaaaaccgcacagcacccacgcagtacgcacacgcaaaaaaaaaagcatagaaaaagaaggtaacaacacacctgccggttttcgaccttttgacgcagtaaagtcaatcatggaaattgcccaatagcgactgaatgtggagttattcagcgacgacagccaaatatgtaaatgatttaaaaaatggaaaagaaaataatgtgcatgcaatgcttaatattcataacttggaatagttgaaaacaagccgatggatattctaaaatatgcaaaacctcgttattccgattgttttttttttcagtgcagctaaattagcatgtgtgttaaaaacaaaactaaattaatgaaagccaatctagatcatcgatttgactgctgactcaaagataaatccaatccaaagaaagtaaaaacacgaaattttaagcatgtgtggtttattttgataaaaatgcaaagttttttgattaatatacaagaagacatgaacatgcaggatatttcctcgcacaaattccttggaaagcgagatggcaactctaaaaggcaactgatcgcacgttgcacgttgccagacttaaccccttggtgctcagacccccccaccccacctcccaccccttttcactgctatccaagcacttattatttgcgatgccgacagagacagcgacgtcggcagcggcagcggcagtgttccagtggcagagcgagtcgacgaaaagccaaaaaaaatgttccaatcagttgcagtcgcgaattagcgtcgcacagacgcggtgtctcgctcaagtgttccttgctcgctccatctgctgtctcgctccctcgcggaagtccgatagtttcgatagctcgtccctgtttggcacaacggtaaacgtatcgaaatggtccacctaaatgagaaagcggaggatcagctgatgaccacaaggatttcggatttgcaggattggctgcaggcgcagccacagttgccgcaaaatatatgttcgtattgccaagtgggtcagatcgcatattcccatacgaaaggcaccgccagaaactgcgatcgtttcgaatatcgaatggaaatattaacgacaaaggctttttattgtttttttttttgccatatgaagtaatattacacttctgtagtaaatatatataaaaaaatattttctttttcgttataagtgccaaagtacaaaatacatacatttaggcatattacaagttctcaaggataatatcttttctcctaagatttcgaaatgatcgtaattggttgtgaattaatttcttactgtgatttcttactgtgtgattatcgttggcctggccaactttgtgtgtgggtcaattgcctgagtgatgggaaccgcaggcagttgcataaccatctcaccgcatcgcagtgacttatgaatgcacctgtactccgaacacgcctctactcacctgaatccctattccccgtcctccttctccaccgcagcccgattgcttctgcgccgctttctgcacacgacgcggggtgatctatccgccgcccagcgactcttggaactgaattacggactgcgtaacaaacatgcacacatcttcatcgatcgcgatccgttggatgccagttcccagcagctactgcaagtcgcgtaagtacaaagatataggtcgtacgatcagttaggatccagataatcgccataggaccatccaagccagaccatcagcacaatcgaaataggaatagaaaacttgcaagttttaaactacgaaataattccgaatattaatataaacaatatacacaaacttacgattcacttatgcatttgagtaaagcaattgtttatgtgctcaagttaatggccaaatcaggttaagaaaaatctaccacttgggctaataaatttcagaccaaaacctgtttaatacgttgataagattaccaaaaataaaagattacctcttaatttgcaagcaaaagctagtttttatattttcgccctcttaaaccaaacttacaatgtactaaaaaccatcgcaaaatctataaaaaaaataagtaccgtcggaaaagccataaaatcaacttattgccagataaacgcttcaatagagacattaaacgctgatggactctttgattttagtggctgactgactgttcggtcaacttttaattagctgagattcctgtgaaattggaaataatatttgaatttttttcgatttatacagttagctgtaatgatattagcttagatcttgcaagccctgtgagtacagagacatgcaatattgacttggcgcttgtttcttgttttgcgctcagtgtacacagagtgcattggcctgcaatagctggcaaccggtttggttcggatggttcggacaatataaaggggttagccagaattatgttaacatgccattttccctggcattttcgcttgcagagatctggtgccgttgcccggcttgaccccggagaacaacaagctgctcttttaccgcctcatcgacttcgatgcggacaaggtatagtagttaaagcatctgaagcatcacacattcattatccactgtgaatactctgactattttctcatgcggaatatatgtatatctttttggacagttcaactttacggctgccatcaaggtctttttcatggtggccgactgtcgatttgcgacggagaacgaggagcgtttgtcggacggcgagataccagttttcgacatggctggctatacgctgcgccacctgaccaaaaccgcactgggcgccctgcgtgtctacatgaagttcgtccaggaggcacatcccgtacggctcaaggagatccacgtgctcaactgcccgtcgtatgtggacaaggtgatggccgtggtcaagccgttcatcaagggagaggtgttcaagctaatccatttccatttgccaaatgcggacactccatatcggcacttcccgcgatccatgttgccggaggaatacggcggggaggcgggcaagatgtccgacctgaagctccagtggatgcagttgctcaaggagcagaggtaagtctgctaagtaggtgtctgcaaagtgcatttaatatggtattttccatttatgagggatactcatctagttcattctttttcagggattatctgatggatacggaaaactggcaaataaacaaaatcaaaaagaatggccaacgaaagtcaagtgattccggagtcacagaaggtctacgttccctcgaaattgattagtcgccgtgcgcacaactgtaccttaattttttgagccttcagcgatttttacatatcttaaactttttacccttcaagtgtactgcaagtgttatccaattgtggtcaagacactttggccaaattgtggtgaatgtgaaaatcggattaggctcgtctatctattgtatttttgctttgttcccgtttgttttcccagctgggcttgggtctatgtaaatatatatatattatattatattcttaacattttacaaatatttttaaacttcacgatgcggcgcgtatcggatttggtcattcaatttgtatggtatatatgtatgtatgcacttatatggcattatgacgcgcacagaatttccatttttaatgcaacagcataactccaatcactgccggtgcatttcgatgcctgtgactgatgcaattaactcgctacaaaaaggggcggccagcgaaggggaaaatgtggctggcatgcactggaaaaagttattctagttcccatcgtgcaacatactgagagcattcatccttcatcagttggataggtaacagtggctctactttttagcagtgcatcaaactgccctaaaaatcgtgctgtatatgtgtgtgtgtgtgcgtgtttgtctgtatatgaacgatgtgagtgggtggtgtgcatgtgtgggtgtgttggtgtgcaggaagtggaagtggcagtggcagtagaagtggagcaacaacagcaatggccatgccacaacagtgtggcacggcaagtggaggccgaaggacccttgaggcataatgcgcatatcgttcggttggccaacctggccactgggtcgtccacatcgacaatgtccagtctacagtcggcaatccgcaatccgcaatccgcaatccgtactcccacaactcgcaattcgcaatcgcccagtgacactttgaacatgtctgcgagtcgtgcagttgacacattttaagtgtggctcggttgaaagtgtgcttacaacctattctccatcatctccacattgccgtccatattgctgtccgttcccgtgacatattagtttaaatgtcggcttacacacggcaaaaatgcaataataattcataaaatataccataaaaaacatggaaccataggaaaggattatctatagtatcaaaagacatcattgagcaatttcgatcggaatagtgtagagattggttcaatagcatatttttctcgctgtgcctctgtttatat

SEQ ID NO: 7391 - DNA, 1265 bp, DROSOPHILA
attagcgtcgcacagacgcggtgtctcgctcaagtgttccttgctcgctccatctgctgtctcgctccctcgcggaagtccgatagtttcgatagctcgtccctgtttggcacaacggtaaacgtatcgaaatggtccacctaaatgagaaagcggaggatcagctgatgaccacaaggatttcggatttgcaggattggctgcaggcgcagccacagttgccgcaaaatatatcccgattgcttctgcgccgctttctgcacacgacgcggggtgatctatccgccgcccagcgactcttggaactgaattacggactgcgtaacaaacatgcacacatcttcatcgatcgcgatccgttggatgccagttcccagcagctactgcaagtcgcagatctggtgccgttgcccggcttgaccccggagaacaacaagctgctcttttaccgcctcatcgacttcgatgcggacaagttcaactttacggctgccatcaaggtctttttcatggtggccgactgtcgatttgcgacggagaacgaggagcgtttgtcggacggcgagataccagttttcgacatggctggctatacgctgcgccacctgaccaaaaccgcactgggcgccctgcgtgtctacatgaagttcgtccaggaggcacatcccgtacggctcaaggagatccacgtgctcaactgcccgtcgtatgtggacaaggtgatggccgtggtcaagccgttcatcaagggagaggtgttcaagctaatccatttccatttgccaaatgcggacactccatatcggcacttcccgcgatccatgttgccggaggaatacggcggggaggcgggcaagatgtccgacctgaagctccagtggatgcagttgctcaaggagcagagggattatctgatggatacggaaaactggcaaataaacaaaatcaaaaagaatggccaacgaaagtcaagtgattccggagtcacagaaggtctacgttccctcgaaattgattagtcgccgtgcgcacaactgtaccttaattttttgagccttcagcgatttttacatatcttaaactttttacccttcaagtgtactgcaagtgttatccaattgtggtcaagacactttggccaaattgtggtgaatgtgaaaatcggattaggctcgtctatctattgtatttttgctttgttcccgtttgttttcccagctgggcttgggtctatgtaaatatatatatattatattatattctta

SEQ ID NO: 7392 - protein, 295 aa, DROSOPHILA
MVHLNEKAEDQLMTTRISDLQDWLQAQPQLPQNISRLLLRRFLHTTRGDLSAAQRLLELNYGLRNKHAHIFIDRDPLDASSQQLLQVADLVPLPGLTPENNKLLFYRLIDFDADKFNFTAAIKVFFMVADCRFATENEERLSDGEIPVFDMAGYTLRHLTKTALGALRVYMKFVQEAHPVRLKEIHVLNCPSYVDKVMAVVKPFIKGEVFKLIHFHLPNADTPYRHFPRSMLPEEYGGEAGKMSDLKLQWMQLLKEQRDYLMDTENWQINKIKKNGQRKSSDSGVTEGLRSLEID

SEQ ID NO: 7393 - DNA, 4863 bp, DROSOPHILA
tccccttccaagccccaagccctcctcaaccgcgaagtttccgtattgataataatctgattgcaaatgaatacaatttattgtgctgttcattcgccttcatttcgccgcggattgttgacaaggtgtggatgcttataagtgaaagacggtctactacacctttaattgttagatttctgataggaacgtgtaaaaaaagctgaaaaatctgtggataatataaaaatggaatacatcaagtcggcatggaaaatagccctactacagagcatataggatctaaacttatgttttcatttacaaattccaggaaagtcggaacacaaagtttggttttagtgacagctaatatgatttgattactggttataccgatttggctaaatatcgaaatttgttttaatacgcagaaagttgtttaagcaatgttgcataaaatgttgtgggaaacttctataactacggagaaagctagaaaaaaaaccatgtttatgtgggagtttaacctgagaaagaagtttccagataaagaagacatggccgacgggacttcgagcggtgattatttaagggattctcaaagtagttaaggtagtcagtcttatagatggtcaccaagaaaactataatggttattacacagcctgcatcaaaaactaaatttctaaattctaatgccagataataataatatcttttatttattttgaaaatgatgagaatattaatctcttatactacaatccaattagacaaatcaaaagtagtgaactgtttttacttaaggcttttaataaaattggtctggtttcaaccttttgaataaaacattaagaaaactctttgaccaggtgcatattgataagctatgagaacaaatgtggcctttctacagaccctaaaagtatgcaacaaaaatataatattctagctacacgttagcttatatattttacccacttaaaaataaccaaccaaaatattaaaagcaattattaaagtacaaaacatacgcgcaagtatttatttcttacgagtttccaaataaatttgactctaggcagtcttcccgtacatttttctcgttgtttaacaactttgcagcatgttagtcttgagaagaaggataaaacactcacgattgggtttggcgtaaaaataaaaagaactgaatgcttggaaagtcacagggaaagtaaaacaattgtttcatcgaattgtattcaaatctaaagagtacgttgtttgagtctatcgtgcttaaggcgttaatcgtttgggatcgcgcgggaacatggaagtcttgcggatgttgtccaatcccagatacagcatcaccacacgctccattccaatgccaccaccagcatgtggaggacatccatagcggaaggactcgatgtacgccgcaatcttggaggtatctagaaaacaaatatatacggcgttaatattaagtattaatagagtagataagtttcaacttcttatctgaaatgggttacagtcttatataagcacttgagctatgcatttatattattctcttattgcagtcttatcattgtttaccgagagatcttgtgactaagctgaccttacgagttatttactacgtgtagggggtactcaccaatgccatggtgcttggctcgttcgattaagtactcgggatcgtggatacgctgcgcgccggacaggatctcctcgccgcgcatgaacatatcgtaagagttggagtagaccggattgtttggatcaggcatcgtgtagaagggccgtatcgctaacgggaacttgtcaaggatgtagaagtcagtgtcgtacttggccttgaccaggcgacccaacagcttttcgttgggcgtagacagatcctcctcgtcgccggtctccacaccagcctcgcgcaacatggccacgccatcggcgaactggaggatcagtggtggctccaggaacttgaaggcatccaccttgtactgctggcctacagattcgatttccttagcgtacttatcacgcagtcccttgaaaatggacgtaaacgtgttgccaatcgtgtgcagcacctcgtggtagtggtacttaaaggccatttccagatcaaggcctacgaactcggtcaaatgccgatgagtgttcgaatcctctgcacggaacacggctcctacggtatagaccttgtcaaaatcggcggcgatggccatctgcttgtacagctgcggcgactgcgccagataggctgaatccttgaagtagctcacggtgaacacattggcgcctccctcactggccgctgaaatgatcttcggcgtgtgaatctctgtgaagccctgctcagtgagaatatcgcggaacaggcgacatactccggcttccagtcggaaaatggcctgatttgccggggtcctcaggtcgagcactcggttgtccaagcgcgtgtcctggttcacgcgaatattcagaccttccgcatcatcggcgttctcgggacgcgatgcatcctcgatttgcaatggcaactgtgccttggcctgggatattacgaatatctgctcgacggacaattccagcgactgctctgtgcaggattcaatcttgctagacaccgccactggcttggcctggatatcaataatgctctccttagggatactgaaaaaataaagacgtttttgaattattaaatgaattattaaatttgcaacaacaaaaattctaagcaatgtttatcatttcataaacctttaattgatttcacgatatcttatcaaagtatgatgaaaatatctatatggcctgcgcaattcaaattcgatattgtgcttttttgggttacggctcttaagataaacttaagatatacgagggaatatttataacttactttcccgcaaatttgaccatctgtttggagataacatcaccgacagccaggatgcactgcaccgtgctgctctgctggcgcaggatgaggaagcactgctttcccttggctctcgaagtgtggacgcgtcctcgcacccagaccagtcctttgcccacctgaccgcttagttccgaaaccgggacaaagttgcgttcactgcgtttgtccttggattggatcatttccgagaggccatatcttccggcggcgtgatcctccgcagaatcgccaccagcgttattggccgccgcggtggaggcgttctccgctttttgttcggctttctgtacacatagagattaaagctgttatcagaggttcaagaaaaacaaaacgccacgtccccaaaacaaagattctcaccttagcggccttggccagctttttggctcccttcttggagacctgctccccgttggccacttgctctttgtcctcgaccatcttggaatgcacaaaaacggctgtaaggaagggagggttgtatattttacaagagggtcacaaaaccagaacgtagaccacacagtttcgataagcgagcaacaggcgaaaaaggaggagtattgtgtgcgttgcgtcatggttttataaatagcacttggctgatgaagtgccccatttgcgaataagtgatattgtcttccggactgcagttcagtcacccagtctcctcctccaatagccatatgtccacaaatatttccggggacagagaaacactctttgtctagcggctcgcacataacctaaactttgcggtcttttatctgatcatttaccgattctattcacttcctgtctcttcccctattggttatttcaatggtgcattcgagtgcactcgacttaccagctagatcttgcccttttaatacacaaacgaattgatttcacgagcgtcgtgtactattgcacatgccaccagcgcggtgcagtctagaggatttctatcgcggctatcgatatatatcgattgttccatgtgtgcttcagggtggcgcatttctgattttgtgacgtcacatgtccagcatcctatgaattaagttgcgcttagctagtgctgaaaaataatattagtaaataaggagtatagtatagtataagagttagtaagtgcagaataatctcaaaaataatgagcataagaaaatctacagaagtgccgtagttgagaagcttaaaaaacaaaagcatctgtagcatttctcaacatctggtgaagcattcttagtttaattacaatactctgtatgttttaaacatatataaacgatagtatataatttacagaaaatgcgccatagtgtggtacgtgtcaaataaaatttaaacgcaataatgtttaagccgagtttaatgtagtctgtaaatgtaccactttctaaaaaaattagttacaccaccatcgataattacagctgcgttccgatagcagtcagcaggcacatctctgttaatttatagcaaaaaaaaaaaacaaatattcagaaaaacaacattcaattgtttgttttgatcaaatagcaacgtaatccagaggtaattagtcatccaaagagcataatttgaataatgggaagatagtaggtcacgtcaaagaaaattataatagtgtggtttcccggtaatttcgagaagctggcaatttccaaaagtgagtcaccacttttcctacaccgagctgctgtgtatgtattatttgcgctggtggtgctccggctgaactaatttaatagctgcgactacgttaaagcgcttaagctcgcagttcagcgtgtaggtaaggttcataaatggccccagctattttcagagaacccacacaagaaagcttgagaggtacacgtcatgggggccacaacaaacgaaacggtgccgaagtttctcaggcattactatagtggcaaattgattgataatta

SEQ ID NO: 7394 - DNA, 1954 bp, DROSOPHILA
ctggtggcatgtgcaatagtacacgacgctcgtgaaatcaattcgtttgtgtattaaaagggcaagatctagctgccgtttttgtgcattccaagatggtcgaggacaaagagcaagtggccaacggggagcaggtctccaagaagggagccaaaaagctggccaaggccgctaagaaagccgaacaaaaagcggagaacgcctccaccgcggcggccaataacgctggtggcgattctgcggaggatcacgccgccggaagatatggcctctcggaaatgatccaatccaaggacaaacgcagtgaacgcaactttgtcccggtttcggaactaagcggtcaggtgggcaaaggactggtctgggtgcgaggacgcgtccacacttcgagagccaagggaaagcagtgcttcctcatcctgcgccagcagagcagcacggtgcagtgcatcctggctgtcggtgatgttatctccaaacagatggtcaaatttgcgggaaatatccctaaggagagcattattgatatccaggccaagccagtggcggtgtctagcaagattgaatcctgcacagagcagtcgctggaattgtccgtcgagcagatattcgtaatatcccaggccaaggcacagttgccattgcaaatcgaggatgcatcgcgtcccgagaacgccgatgatgcggaaggtctgaatattcgcgtgaaccaggacacgcgcttggacaaccgagtgctcgacctgaggaccccggcaaatcaggccattttccgactggaagccggagtatgtcgcctgttccgcgatattctcactgagcagggcttcacagagattcacacgccgaagatcatttcagcggccagtgagggaggcgccaatgtgttcaccgtgagctacttcaaggattcagcctatctggcgcagtcgccgcagctgtacaagcagatggccatcgccgccgattttgacaaggtctataccgtaggagccgtgttccgtgcagaggattcgaacactcatcggcatttgaccgagttcgtaggccttgatctggaaatggcctttaagtaccactaccacgaggtgctgcacacgattggcaacacgtttacgtccattttcaagggactgcgtgataagtacgctaaggaaatcgaatctgtaggccagcagtacaaggtggatgccttcaagttcctggagccaccactgatcctccagttcgccgatggcgtggccatgttgcgcgaggctggtgtggagaccggcgacgaggaggatctgtctacgcccaacgaaaagctgttgggtcgcctggtcaaggccaagtacgacactgacttctacatccttgacaagttcccgttagcgatacggcccttctacacgatgcctgatccaaacaatccggtctactccaactcttacgatatgttcatgcgcggcgaggagatcctgtccggcgcgcagcgtatccacgatcccgagtacttaatcgaacgagccaagcaccatggcattgatacctccaagattgcggcgtacatcgagtccttccgctatggatgtcctccacatgctggtggtggcattggaatggagcgtgtggtgatgctgtatctgggattggacaacatccgcaagacttccatgttcccgcgcgatcccaaacgattaacgccttaagcacgatagactcaaacaacgtactctttagatttgaatacaattcgatgaaacaattgttttactttccctgtgactttccaagcattcagttctttttatttttacgccaaacccaatcgtgagtgttttatccttcttctcaagactaacatgctgcaaagttgttaaacaacgagaaaaatgtacgggaagactgcctagagtcaaatttatttggaaactcgtaagaaataaatacttgcgcgtatgttttgtacttt

SEQ ID NO: 7395 - protein, 531 aa, DROSOPHILA
MVEDKEQVANGEQVSKKGAKKLAKAAKKAEQKAENASTAAANNAGGDSAEDHAAGRYGLSEMIQSKDKRSERNFVPVSELSGQVGKGLVWVRGRVHTSRAKGKQCFLILRQQSSTVQCILAVGDVISKQMVKFAGNIPKESIIDIQAKPVAVSSKIESCTEQSLELSVEQIFVISQAKAQLPLQIEDASRPENADDAEGLNIRVNQDTRLDNRVLDLRTPANQAIFRLEAGVCRLFRDILTEQGFTEIHTPKIISAASEGGANVFTVSYFKDSAYLAQSPQLYKQMAIAADFDKVYTVGAVFRAEDSNTHRHLTEFVGLDLEMAFKYHYHEVLHTIGNTFTSIFKGLRDKYAKEIESVGQQYKVDAFKFLEPPLILQFADGVAMLREAGVETGDEEDLSTPNEKLLGRLVKAKYDTDFYILDKFPLAIRPFYTMPDPNNPVYSNSYDMFMRGEEILSGAQRIHDPEYLIERAKHHGIDTSKIAAYIESFRYGCPPHAGGGIGMERVVMLYLGLDNIRKTSMFPRDPKRLTP

SEQ ID NO: 7396 - DNA, 5264 bp, DROSOPHILA
ggtgcaaaagagatagcaccattgtgccgcctgcggagaagaataggacagagacaagctaaatgtttagtggttcagtgggcgtggctaacgcatgtgtggtgaattaaagtggctgtataacagttgttatgcgaggtgatatccgtactggttttgattacaagtttgcaattttaggaataaacggtataaaaatatgtattaaatatgcttaaatttaaaactaattctagcggtttatataatctctttatataaaagatgttaagactttcatttctacacagtgaatttgcaatgcagctagctatattttgaaaagcaactaaggcataaataaaacacagaagtaataataatagtaaatggtaattgttgataacaaattccaataggtaaacagagatttatcaatttgatttcccaaagcattaagattttgtttgcggttattagaagtaattgaattatagaaaaaacatcccaaaaaacaaaaaattttgtattagtatattgtgttatttcccgttcacgaatccataaagaagtggtaaacagaaacagtaaaacacaaatcgatccccaatatgaactgttgaaatttctacaacgccgctgtggtgtgctcactcactcgctttcgctctgaaagctcagttcgctctctctcctggggagctttcgctccgtgatcattttgaattctttgatggaggggggggggggggtgtttggcgcctatcgtatctcttaactaacgctaatctgcccctgttttgcgtttcgaattttagttgcggtttgttgtgattccgggttggacgctgctctgaaggacatcactgacttatggatgaaaggagtagccggacctcgacgtgacccccatccatccgtacataaacattgtaagttcagttggtgttccgatcaacatgcttttgagtgcttctgcgttagtttctctttcggtttttcaattttccattgagagattctggcgcgtgaggctctcccattcccggttacttgtcgtgtgttagtgaatgaggatcctaattaatccctttagtaactgcagtgacacatctgatattcgtttcacaaccggtttatatatgtatgcagatgctgatattgttttcgcgcttatcagctacctgttaacccagtgtttctgtttgtctcgcttgtttacagacaacacgcgttcgcacccgcccccacacacacacatacacaaaagctcgaattttttgacgtaatgaaacaaaacgacaaaaatacagagcaagagagagcgagtgagaataaacatagatctcaataatgattacgagggatgggcactgctattaacccgctaaaagactatattcatatatgcattatacttaaagtatttatattaagtacttaacttaaatatgtaagagatagacagaaggaggtgttataaatactcctgtgaaaattaacaaattgcgtatgtgcagctccagattatataacaattgcaatagtgaatttaatgcctactggtcttaaatatgtacataacatgaaatattgttcgttgcaaaatacaaatacatttttgcacgaaggctaatccaccgtaaccgggtggtgcaaatcctccaggcatatctatccatgcatatacccgtacccgtatccgtatccgaatccgaatctgtatctcttccaatctggccccgagccaaattgctttatgaccgtttctgtgtagggatctatctacctgccggcaataatctgtgtggactcataaagatcttgactccacggaccgtggattgcacttttcaaaccagaccaaatctagaccgtgctgcggtgtgcgtgtgtgcgagtgtgtgtgtgcgtggtccataataaatatgctaatttcgcatgcacgcgcagagtcggaggggctgataacgtcgccatatatagtgatatacctagagcccgagaggtctagtggaaaagttcggtttcctggtgtccctgctatcagtgcgatacggcccgtggtgaggagaagattgcgtccacacccccctcgagtggatgaatgttggtgtgataacgtgataagcatcctagtgctccggggaagtccggcagtctgccattgtgtctaaacaaagagagtcggcttatcgagccgttccataataataataacttcgctttttatgcatcctaacgcttaatataaagtaacgaattttgtatggcccaaaggtattccacagtgtactcatcccattgcccatttcagagacatataacagttgcggcatataacagataaactcgaagccctttccgcaaccatcctccacgatgagattccaacagctcctgcatgtgcgcagattggccagcgccggggccaccaccttgatgaggcggcctatcaccaccaccaccatcaccaccaccagtcgcaccgccctggcagccacctaccccgctttcgcaaccactgtgcgcacaatggcgggcagcggggctccgatcccggagctcacagaggtaggtgttcctgtggcgagttgtccgcagcggagatgcaactgatgcaacccacatttcagatcaccgacaacgtgcagcgcggcaactacgccactctgaccgacaaggatgtggcgcatttcgagcagctcctgggcaagaacttcgtgctcactgaggacctggagggatacaacatctgcttccttaagaggattcgaggtaggttgtgtaaccaaattcattcacattcgtgtgccctttaatgaatttctccgatgaattgcttcaaccaggcaacagcaagttggtgcttaagcccggaagcacggcggaggtggccgccatcctgaagtactgcaacgagcgtcgtttggcggtggtgccgcagggcgggaacacaggtctagtgggcggatccgtgccgatctgcgacgagattgtcctttctctagcgcgcctgaacaaggtgttatccgtggacgaggtcaccggcattgctgtcgtggaggcgggctgcatcctggagaacttcgatcagagggccagagaggtgggcttgacggtgccactggacctgggcgccaaggccagttgccacatcgggggcaatgtgtccacaaacgcgggcggagtgcgggtggtgcgttacggcaatctgcacggctctgttttgggcgtggaggcggtgctggccaccggtcaggtgctggaccttatgtccaacttcaagaaggacaacaccggctaccacatgaagcacttgttcataggatccgagggcactctgggcgtggtcacgaagctttcgatgctctgcccccattcctcgcgagcggtgaacgtggccttcatcggcctgaactccttcgacgatgtgctgaagacttttgtcagtgccaagcgtaatctgggcgagattctaagctcctgcgagctgattgacgagcgggccttgaacaccgccctcgagcagttcaagttcctgaagtgagttgcgccacctttgtcttctctgagcgttaccaatcctgttcacaaacttatttcccatagctcccccatttcgggatttcccttctacatgctcatcgagacctcgggcagcaacggtgaccacgacgaggagaagatcaaccagttcattggggacggtatggagcgtggcgagatccaggatggcaccgtaaccggtgatcccggcaaggtgcaggagatctggaagatccgcgaaatggtgccgctgggtctgatcgagaagagcttctgcttcaagtacgacatctcgctgcctctgcgggacttctacaacattgtggacgtgatgcgagagaggtgcggtcccctggccacagttgtctgcggatacggccatctgggggactctaatctgcacctgaacgtctcctgcgaggagtttaacggcgagatctacaagcgggtcgaacccttcgtctacgagtacacctccaagctgaagggcagcattagtgcggagcacggcattggcttcctgaagaaggactacctgcactactccaaggacccggtggccattggctacatgcgcgagatgaagaagctgctggaccccaacagcatcctcaatccctataaggtgcttaactgaaggcttctacctaatagattctattttttttgtttgtgtgtaattttcataaccttataatacagaaatggcattagaagtgaattttgttaacttgtgaagttaaaaaggaccatcatatttggcacgaaaccaatgggcaaaacttacttataaaatagtccgaaaaaatagtatataccagtttttacagtaccacattataggtactcggaggtaataatagaaaaaacactatctttgcatttactgttacactacgaagcactatatttagtagcagtactcattagagtccactcacaaaattagcaccaaccggcagtaattggtcaaggatcggcgatagcttcaaactccgaagttcaaagtcaaactgccgccctgcgaaagcttcgcgagtggagcttttctgcacttatcgatagctaacattgtggcgcgactatcgatcgacgagctgccgcttaacagtgccatatatagattgtaacattagaagctcaaatcattgttggagcacaaaccacaaagaacacacgaaacatgagcgggtgagtagagggaaattctcttttccccggagttttccgcgatcctaacgtcgcccatttccggatttcttccagacaagcggatattgccctcatcggcctggccgtcatgggccaaaacctgatactcaacatggacgagaagggattcgtggtgtgcgcctacaaccgcacggtggccaaggtcaaggagttcctcgccaatgaggctaaggacaccaaagtgattggagccgactcgctcgaggacatggtctccaagctgaagagcccccggaaggtcatgctgctggtcaagggtgagttgcatatccaaattcagcggctgggtagcgcagagcatcgaaaacccattgaaacctgctgcaagcgatcgctgtgttggtgactcaacttacatgtgtgcgcgcgtgcttgtgaattggtgaaaaagtcgaagcaaagtaatcatgatgacgatttttgcggctcatattccaatgtgcaaaggggaacgagataggataagcaggtggaagtaggaagaggagggagcgcgagaaaac

SEQ ID NO: 7397 - DNA, 1889 bp, DROSOPHILA
ctggcgcgtgaggctctcccattcccggttacttgtcgtgtgttagtgaatgaggatcctaattaatccctttagtaactgcagtgacacatctgatattcgtttcacaaccggtttatatatagacatataacagttgcggcatataacagataaactcgaagccctttccgcaaccatcctccacgatgagattccaacagctcctgcatgtgcgcagattggccagcgccggggccaccaccttgatgaggcggcctatcaccaccaccaccatcaccaccaccagtcgcaccgccctggcagccacctaccccgctttcgcaaccactgtgcgcacaatggcgggcagcggggctccgatcccggagctcacagagatcaccgacaacgtgcagcgcggcaactacgccactctgaccgacaaggatgtggcgcatttcgagcagctcctgggcaagaacttcgtgctcactgaggacctggagggatacaacatctgcttccttaagaggattcgaggcaacagcaagttggtgcttaagcccggaagcacggcggaggtggccgccatcctgaagtactgcaacgagcgtcgtttggcggtggtgccgcagggcgggaacacaggtctagtgggcggatccgtgccgatctgcgacgagattgtcctttctctagcgcgcctgaacaaggtgttatccgtggacgaggtcaccggcattgctgtcgtggaggcgggctgcatcctggagaacttcgatcagagggccagagaggtgggcttgacggtgccactggacctgggcgccaaggccagttgccacatcgggggcaatgtgtccacaaacgcgggcggagtgcgggtggtgcgttacggcaatctgcacggctctgttttgggcgtggaggcggtgctggccaccggtcaggtgctggaccttatgtccaacttcaagaaggacaacaccggctaccacatgaagcacttgttcataggatccgagggcactctgggcgtggtcacgaagctttcgatgctctgcccccattcctcgcgagcggtgaacgtggccttcatcggcctgaactccttcgacgatgtgctgaagacttttgtcagtgccaagcgtaatctgggcgagattctaagctcctgcgagctgattgacgagcgggccttgaacaccgccctcgagcagttcaagttcctgaactcccccatttcgggatttcccttctacatgctcatcgagacctcgggcagcaacggtgaccacgacgaggagaagatcaaccagttcattggggacggtatggagcgtggcgagatccaggatggcaccgtaaccggtgatcccggcaaggtgcaggagatctggaagatccgcgaaatggtgccgctgggtctgatcgagaagagcttctgcttcaagtacgacatctcgctgcctctgcgggacttctacaacattgtggacgtgatgcgagagaggtgcggtcccctggccacagttgtctgcggatacggccatctgggggactctaatctgcacctgaacgtctcctgcgaggagtttaacggcgagatctacaagcgggtcgaacccttcgtctacgagtacacctccaagctgaagggcagcattagtgcggagcacggcattggcttcctgaagaaggactacctgcactactccaaggacccggtggccattggctacatgcgcgagatgaagaagctgctggaccccaacagcatcctcaatccctataaggtgcttaactgaaggcttctacctaatagattctattttttttgtttgtgtgtaattttcataaccttataatacagaaatggcattagaagtgaattttgttaacttgtg

SEQ ID NO: 7398 - protein, 533 aa, DROSOPHILA
MRFQQLLHVRRLASAGATTLMRRPITTTTITTTSRTALAATYPAFATTVRTMAGSGAPIPELTEITDNVQRGNYATLTDKDVAHFEQLLGKNFVLTEDLEGYNICFLKRIRGNSKLVLKPGSTAEVAAILKYCNERRLAVVPQGGNTGLVGGSVPICDEIVLSLARLNKVLSVDEVTGIAVVEAGCILENFDQRAREVGLTVPLDLGAKASCHIGGNVSTNAGGVRVVRYGNLHGSVLGVEAVLATGQVLDLMSNFKKDNTGYHMKHLFIGSEGTLGVVTKLSMLCPHSSRAVNVAFIGLNSFDDVLKTFVSAKRNLGEILSSCELIDERALNTALEQFKFLNSPISGFPFYMLIETSGSNGDHDEEKINQFIGDGMERGEIQDGTVTGDPGKVQEIWKIREMVPLGLIEKSFCFKYDISLPLRDFYNIVDVMRERCGPLATVVCGYGHLGDSNLHLNVSCEEFNGEIYKRVEPFVYEYTSKLKGSISAEHGIGFLKKDYLHYSKDPVAIGYMREMKKLLDPNSILNPYKVLN

SEQ ID NO: 7399 - DNA, 3529 bp, DROSOPHILA
ttctttttttaagatttctgctaaatcatattttaaaaatttcaaacattctaatcagcttaaaaaccttaagcctcttacaaaatgtaacaaatctaatgtaaatacttcatagcaaaatggtccgtattaataagaacaataatagaaattaatctaaatgtgtaaaatttaaaaggcgtagtgcatatccagaattaaataaataaacacaatagctctccaagagataccatttttatgttaataacccagtaataagttaacagataaaagacattttattgcgcagcccaaataaaagctttaaaataattaagcataataataatcgcatgtctacccaaaaccaataaaatagccctaacaaaagtaacagaaacaataagagtacatattaaagaaaataaacaatgaaagatttaaatgattgcaaagtgctaaggaaattactttgtaaatacttccagctatctcaagttgatgtcagtgacgtacaaaaattgaaaaagcaaaataaaccatatctataaatgttgtatatatagtaagtaatcttaagtacagctgcgccaaaaaaaaaagaacactagacagccagtttaaaactaaccaataaatgtgagttgatgtataccttacgataaaaccataataaacccttgatatttgtgaaaaagttcagcgccttcattattgggcgataaccaaacgtgctgaacacgtgaaagagaaagaagctccacacggatcgcagccatttaatttggcccacactcgggaatacgcctaatcatgggggccaaaactaattaaatgataatgccggcggtgggaagttagcagccgaatctggggacacgtgaagcaatcaaagcatcagcaagtgccggtatcaacccgcaaacatggtcgcaatcaggggaatctaatcaatcatcggacatccagttggtttaaaagcacccggccttcccgaggtccaaatcagttgcgaaacatgaagtgcctagtgttgattgccttcagtggcctcttcttggccagtgcccaggcccgaatccttcccgcggaggatctcccctgggagttgccagaagttccggtagcggtcaacgagattgaacccagagcaggtgactactaaaacgtaattaaactcattctttcatttttggacatttaaaaaatttaaaaaaatctttaaaaatttaaagaccgataaacttgtttaatcaaaactacttacaatggcataaattctattttaccaataacagatattcaatgggaatgggaaatattctcttaattaaaatactgatttaattacaatataatttacaataccttctacatttataaatataattgaaaatattctttatcgtagctggttgttcaattaagatccgcagctctgagctgaaggatccccagcctctgctgattaaatcggacacctctgaaatcgttggattctcggacaccggctatgtggacgtggacaaggacaagaccatcgaattccactgcaccagcagcctggcttcccctctgtctggaaaatccgtgaccgccaagtgcgtgggtggcaccaccttcaagattgacgataaggagcacgatctgtccgccatcaagtgcacatcgtggccagtttttgtgggcaagaagtccggatccagctgcaatggtggcaccacgctgatcaaggtgggctttgagctctccggctcacgattcgcaacgcagtacgaggtatgcttcaacgaggacgaggaggtgaccaggtacgtctatcatcgcctggaaccgggaaacaactactatgccaccggagtggatcgcattacatttggagccggcggctatttcgcgggtaagaatgtggacaagctatacacgcaggctgttcagaaggagaccatcgacaaggagctggacatggattcatcccgtttctttgactcggccaagaacatcttcctggcccgtggtcacatgggtgccaaggctgacttcgtatttgccccggagcagagggccaccttcctgttcatcaacgctgctcctcagtggcagaccttcaatgctggtaactgggctcgcgtggaggacggagttcgtgcctgggtggccaaggagaacaagcacgtggagtgctggacgggagtctggggtgttaccacgctgcccaacaagaatggggaacagaggcaactctatttgtcccacgataacaacggcaacggtctgattccagttcccaagctatacttccgagtggtaatcgaaccatccaccaagaagggcatcgttctgatcggcgtcaacaatccccatttgagtttggaggagatcaagcgggactacatcctgtgcacggacgtcagcgacaggatcaactggatcagctggaagaagacggacatcaccgccggttactcctacgcctgcgaggttccggagttccgcaagaaggtgacgcatctgcccgagttctccgtcagcggactgttggtctaaactggttatgtttgaaataataaataatacctttacatcgaaacactttgatttgtttttaaaacatctgcaacaaggaaacttttgagaaaatactggagaaataaataatttgagaaaaaaatggaaaaaatatgaatgaattcgtttatatttttaagattgcatacgataaatccattacaaccattttccattttgagtagattggcgaaatcaaataatgcatttgttacctgtcaaaaaatatttaaaattctccaatgttgctactgaaatatggagtatctaggaaaatcttcagtttcctactgttcctcttgttgcttctgccgatccttgacgccggtgatccgattggcagccacttcgtccgccggcgggctaaacgcctttccagtccctatttcgacaaggaaaaaacgttggttctggccaaatatgtagtctcgattcgatcccgaagaccccacaagttatttggcgacaatcacttctgcggtggcgtgatcatatcgagaacctacatcctcacctccgcccactgcgccatggagtaggtatagaaaagatcaatatataattgactgttatgtcctttaatcaatgcaaaagtaagcgcaagatcgtacatcgcagtcgggtgttggtggttgtggctggaaccacaaatcgtctgaaatcccgcaaaggactctctttaaacatggaggtgaagaagatctttgtcccagacaagttcacagtattcaatacgaacaacattgcgctgatgatgctggccaaaaaactacccttggacaatccgcttgtgggtgtgatcaatctgcctacggctgacccagaaccgggtttgaactacacggtgctgggctggggaaggatcttcaaggtaagttgtggtagttacgaactataagtaggtttattattaactatagggcggtcccctggcctcggacatcctgcacattgacgtggagctattgccccgggatat

SEQ ID NO: 7400 - DNA, 1272 bp, DROSOPHILA
atgaagtgcctagtgttgattgccttcagtggcctcttcttggccagtgcccaggcccgaatccttcccgcggaggatctcccctgggagttgccagaagttccggtagcggtcaacgagattgaacccagagcagctggttgttcaattaagatccgcagctctgagctgaaggatccccagcctctgctgattaaatcggacacctctgaaatcgttggattctcggacaccggctatgtggacgtggacaaggacaagaccatcgaattccactgcaccagcagcctggcttcccctctgtctggaaaatccgtgaccgccaagtgcgtgggtggcaccaccttcaagattgacgataaggagcacgatctgtccgccatcaagtgcacatcgtggccagtttttgtgggcaagaagtccggatccagctgcaatggtggcaccacgctgatcaaggtgggctttgagctctccggctcacgattcgcaacgcagtacgaggtatgcttcaacgaggacgaggaggtgaccaggtacgtctatcatcgcctggaaccgggaaacaactactatgccaccggagtggatcgcattacatttggagccggcggctatttcgcgggtaagaatgtggacaagctatacacgcaggctgttcagaaggagaccatcgacaaggagctggacatggattcatcccgtttctttgactcggccaagaacatcttcctggcccgtggtcacatgggtgccaaggctgacttcgtatttgccccggagcagagggccaccttcctgttcatcaacgctgctcctcagtggcagaccttcaatgctggtaactgggctcgcgtggaggacggagttcgtgcctgggtggccaaggagaacaagcacgtggagtgctggacgggagtctggggtgttaccacgctgcccaacaagaatggggaacagaggcaactctatttgtcccacgataacaacggcaacggtctgattccagttcccaagctatacttccgagtggtaatcgaaccatccaccaagaagggcatcgttctgatcggcgtcaacaatccccatttgagtttggaggagatcaagcgggactacatcctgtgcacggacgtcagcgacaggatcaactggatcagctggaagaagacggacatcaccgccggttactcctacgcctgcgaggttccggagttccgcaagaaggtgacgcatctgcccgagttctccgtcagcggactgttggtctaa

SEQ ID NO: 7401 - protein, 423 aa, DROSOPHILA
MKCLVLIAFSGLFLASAQARILPAEDLPWELPEVPVAVNEIEPRAAGCSIKIRSSELKDPQPLLIKSDTSEIVGFSDTGYVDVDKDKTIEFHCTSSLASPLSGKSVTAKCVGGTTFKIDDKEHDLSAIKCTSWPVFVGKKSGSSCNGGTTLIKVGFELSGSRFATQYEVCFNEDEEVTRYVYHRLEPGNNYYATGVDRITFGAGGYFAGKNVDKLYTQAVQKETIDKELDMDSSRFFDSAKNIFLARGHMGAKADFVFAPEQRATFLFINAAPQWQTFNAGNWARVEDGVRAWVAKENKHVECWTGVWGVTTLPNKNGEQRQLYLSHDNNGNGLIPVPKLYFRVVIEPSTKKGIVLIGVNNPHLSLEEIKRDYILCTDVSDRINWISWKKTDITAGYSYACEVPEFRKKVTHLPEFSVSGLLV

SEQ ID NO: 7402 - DNA, 2532 bp, DROSOPHILA
gcttttaaggttcgacaaacacgctcggcggctgcgttaaatcaaaacttttgcgatatagtaacccggtttcttggactgcgcgcagagaaacccctcgtctaatggcgattaattaaattatttgctaatgccatcaaacgagttgcggacagatcacctgccaaaaggatctggcctccgagctgtgaaggttccagcccccgacttctgccctcccatcccatttccaattcgacgtggtgcgctatccattaaaacatgacaattatttttatgacttaatgcagtcggaggccttgttgcccaatgcctaatgttgcaaattattgacaaagtaaattaatctccacatttgttggttggaccagacaaactagcgcgacacctctaagatcaccatcaagctctcccacttgcggcatattcatttggatgcttatcgaatgtgcgtcgcaaaagaaaaatcaaatgcgtcatgggtaaaaaaactacaagattttataaatttaagttttaataaaaatattttttaaatttctttattttggattcggtggatttagaaatttcttaaaaatattaagtgagttttacgtcgttttcattagaaaagaagaattaggagaatggaatggttactatttcgttcgacatgaagcctaacttggttcctaattttttgcagtgcatggctcaggctggtgcgaaccacattttgcatatttcttgtttaattataatttttcggggctcacttaatgagcgcgctccacttggtcggcgatcttgtttgggaggcgcgtgccgcaaagcgacacgacgccttgggtggattgccacatccaagttggatcgaagcgtagctctggcctggtaatcagttggccagcttgtatataagcagcctaggactacccagattaattacttcgatttcgatctttgtcgagtgcatttcaatacccaaagagttctgaaaggaccaaaataccacaaaatgatgggaaaagtgagtggagtggaggaaaaagggtgcgatacaaaggattctaatgcatagagtggtgtcttccttttaggttacctatttgttgtgcctgtgcctggccagcgccgtttgggccattgaattgcaggcggagccggactacggaccagtggcctacgagttccagtggtcggtgaacgatccccacaccggcgacatcaagagccaaaaggagtcccgcaaggacgacaaggtcgagggtgtctacgagctgatcgattccgatggctatcgccgcatagtgcagtacaaggcggatgatcacaacggtttcgaggcaattgtccagcgtgagcccacggacatcaagataccgttgcctgagccacccaagaagctcctggccgccaagatcctgactcccgtgctaccggtggcgccactcgtccactacgccgcccccaaggccattatcaagcaggagctgtccgccgggaactatgtctctgtatccggaccaacagcacagtacaagtactaaaaggatctaatgactgacttcagctgcataaacccattaggaaacccgtcttgacccgggaaaactcactgccatacatcataatttagttacaattaagacaattgagtgtacatacagacagcttacattaacctacaataaagatgcatcccattcaatctgttcgcagaggaacacaaaaacttggattttttaatatagggaatatacttaaaagctgggtgagggtattttattgatataaaaaaaaaaatgagtagttgagtagtggttgtgttgcaaacatacttatataagtgtgaagatcagttaagaaaaatataagccaagtgaagaaaaaccacattatgacagttcacaagtgtgacacaaaaaagtgaaagattattaaaaccaaaaaaaaaaagtggtgaatgaaatgcttgacttagttcaactcgcttgtgtgtttggcttcttcagtgaattcgtatcattatatttgcgaattgatgtctcataaaatgatgcgtcacgatacaggtggcttcgatactgtgataagcataaactaatgctatcgccgccagacgcgacatggcccatagatgcctctaatctcacgtagctgctgccactttgggggcgtccaattaccggcgcagtcgacgtcgtcgatggcgattctattggatttggctaacgctctgaccaatgcatccatggagcatcagtgcgaaaatggtcggctgcccggagacacgacaactactggtcacattgctattgacccttggcttctgcctggggggaagctcaaaggatacagttgcggatgcggatgccaagtggatggctccacttaagcagtatgggtatacgccgcagcatctgaagaacaaagtggagcatggtgaattcaccaccttcgaactgggcacccccaactaccagattctcaatcccgaagacgaaccggaatacataactgcggatcaaccgcattatcaggagatgc

SEQ ID NO: 7403 - DNA, 462 bp, DROSOPHILA
atgatgggaaaagttacctatttgttgtgcctgtgcctggccagcgccgtttgggccattgaattgcaggcggagccggactacggaccagtggcctacgagttccagtggtcggtgaacgatccccacaccggcgacatcaagagccaaaaggagtcccgcaaggacgacaaggtcgagggtgtctacgagctgatcgattccgatggctatcgccgcatagtgcagtacaaggcggatgatcacaacggtttcgaggcaattgtccagcgtgagcccacggacatcaagataccgttgcctgagccacccaagaagctcctggccgccaagatcctgactcccgtgctaccggtggcgccactcgtccactacgccgcccccaaggccattatcaagcaggagctgtccgccgggaactatgtctctgtatccggaccaacagcacagtacaagtactaa

SEQ ID NO: 7404 - protein, 152 aa, DROSOPHILA
MGKVTYLLCLCLASAVWAIELQAEPDYGPVAYEFQWSVNDPHTGDIKSQKESRKDDKVEGVYELIDSDGYRRIVQYKADDHNGFEAIVQREPTDIKIPLPEPPKKLLAAKILTPVLPVAPLVHYAAPKAIIKQELSAGNYVSVSGPTAQYKY

SEQ ID NO: 7405 - DNA, 5187 bp, DROSOPHILA
gggaaaaaggtaaagaacgccggtaggtggctaaggggaaggtagctaaggaggaagggggaagaggatccaaccggtttgcaaatggttgcaaggtcacatggggagtgggggcgtggcaaggggctgtggcggttgcagaagtaacaagtgtttttcggctgacggcaacaaggaaacgacaatgagaaaaacgtgaaaggtaacagatgcgtaaaataatcgctccccaacaaaatgaaacagtggcgtgccaagaatttcaaaaagggtttccagtttttgaatttcatttgtagctccacaaatcgatctatcaaaaaccgtaaaagatcatacgaattatcatggtactcttaatcttaattttaagtttcgtatatcacttttttaattgactgcaaaagggcattagggggtttaaatttgattgagaaaactagaaacaaacaaatagcaagaccggcaagtatattattttacgatattgttttacgaaatgtttactttcattaacgtaaatattaccagactgctccccatcgaatcatcagtcttcttctctcacaacagccaccacctttgattttcattcttgagcagtttttatacaccgagtcgaaaaaatagttctggtttttgaagatatttagatatttatattagaattggctctatcaaacaatatgctaaatattttattattgtaataattttggaaatctgcttaaaagatattttgcttaagaaaaaggttactaaatatgttcgctttgcatacatttttaggttcttataaatgtcgacaaatttgaatagttttatgaacactacacgattttccgctggtgtagccgaagggtttagagaacgaagacgagcgcataaaaaagaaataacagtgtgaaacaaaaccaaacaaaacaaaacaaagtgaatgccgaaagaagaggctaattaaagagatcgaaagcacagaacgctgttcgaatcgaatgccatcagtccaaatcgaatcgttgccgcgaacgcagctctcttcaaaagcggaaaaaatatttaaaaaaatatatagttcaaccgatcgatcgtgcgagaaaaacgacattgacattcaagcgggcgcgctaattgatccattggaagcccccttaacgcccgggtcaagtgctctcaattggaagtgtcaggtggcagcatggggcatctgcaccccgttcccaacccccttccgatccccatctcgatcgcagttccgttgatactgctgtttttgggcgcctcatcgccggttttggccagttccgatgatcaaaccgcctgcggatcgttggagataaataagattgcggacctgcggaaactgcagaactgtactcatgtggtgggtcacgttcgactggcctatgtggatctgacggatgtatccggcaactacagcctggattcgctggccagcaatgtgaccgagatcagtgactacctaatggtgtatcgctgcacgggtctgatcagcctgcagtcgatattcccacggctgcgtatcattcgtgggcaggagctcctctttgatcagtactccctggtggtctacgagaatcgcaatctcagggagctcggcctggtggagttattgcgcatccagagcggattcattcgcgtcgaatcgaatcccttgctgtgcttcgtggaaaccgtcgattggatatatctaatgggcaatgccactcggcagcacttttcccttaaagtgagtgaagatatacttgggcatatgttccttgatattaagcaaatattggataaataacttttttattaaccatagcacaacagaccgcaaagtcagtgccctttgtgtggtagcctgtcagcggacttcgagttcatccggaactcctcggagcgctgctggaacgtgaatacgacacaacttcgcccccaaccgcccagacttaaggactgccccattgcatgtggcctaaacggatgtgatagtgcgggcaaatgttgtgatcacaactgtgtaactggttgctattcccaaaactgctccctttgtgcaaactaccagggaagaatgggatgtgtcaatcagtgtgtcgccagctatgaattaaacaagaggaggtgcatcggtcacagggagtgccgggaattgggaaggattcccctgatacgcggctatcagtgtgtgaaaaagtgtccgggaaaccagaaagagattttggtcgccaagggcatcatccactgccaggtggagtgcaacggcgattttcacgtgaagagtgctgccgacctggaagttttacaagactgtgtgacgatcaatggttcacttaccatcgaactcaccaatattaaaggtgtgtttcatatcatatatgatatctgtataatttacttacataatacattttccagaaaaaattgtagatgccttggaaaatgcgttggccagtgttaaagagatcactgggtatctgaaggtcatacactctgcacagctgatgtcgctcacatttcttcagaatttggatgccataagaggggataagctggtggaaaacaagttagtttgagaggcaaggattgtattgaaattctaataatattatttatctcattttcagatacgccctgtatgtagtgaataactaccatttggagcacatttggccacccaatcacctggtgatcattcagcgcggtacactattctttcacctgaatccccgcctgtgctacgagaaaatccatcagctacagggctccctgaaaagcggagagaatatatccgtggcagatgtatcccccaattcgaacggcgaacgcgtgatttgtggcgacgcggtgcgctccctcaatcccaaagtggaggacctaaattccactgcggtacgcatcatcctggactacatggactgggagggtatggaaacgctaataggatattcgtatcactacaaggaagccccggtgcaaaacgtgactatgtacgatggtcggcatggttgcggtcatgacaagtgggtgtggactcctcgccctcaccaagtttacctacagtgattctgtttataattttccagctggctgatggacgttgtgcccaaccagagtcgacgtcatgtgataagcggtctgaagccctacacacagtatgcgtatttcgtgaagaccctcaccagaaccgaatatcatattcagatagatgcctactcaaaaatcggctacttccagacgctaccggataggccaagtcctgtgctccgaatatatggcagttcggaaatcagttcccagattgtaagtacttttcaaaatatatctctcagcttaaaaacttgttcatttccagcttcttcactggtggccaccgaggcgtccaaatggagtcattaaaaattattttgtgaccgccgaaaagtacaatgctaccaaggaagcaaaggacaaaaattatgtgaatgttgagttggaaaatgctaaagacatcgattgtgagtgcgctggtgtactgccctactattcaggtcctcagccagatgacgaggattactacaacaaagagcaaatcacctacgaggatgcgttgcccaatctcatttatgtttcgtaagacaagaaaatatggttttctttgaagtttcaattgaaataatatacaatattataccatctataggcgcaatcacgactatcgcagaaaggagttcgaaaaagtgattaactatgagcacctgttgtccataaagaaggatgaagagcccaccagaccgcccacaaccactcctgctcctacaaatgcaacattggctaaggagagattggccgcaattaactatgagaattatcgcctgaatagcgagaagaagcagcgggatcttcaggacttggaccagcacaagtataccatccgacatgccttgcccaagtgccaaaactcccacgcatccgtggtccagcaagtggaggaaaaatgcgtggctgaggagcccttgagtggctacgaacttccgggcacccagcacttttactgcctctcccagttggagccggaaacccattaccggatcaccatacgggcttgcgtcgagggcgtggtcaacggatgctcaactccggcggaagctgtaatcaagactgcaagcatccaactggagcgattcatcaagggtgtttagcagagaatcctcgatcgcagactttctgtatccgctgacaagtgataaatgctagacccatatgacgataggcatgttgaaaacttgatgcaatatcaacctaaatcaacgtgtttaacatttactatatctgtatttattgttctaaaaaacttgacatagaaggaccgctggacctcttatttttccagactatatatgtcgtagttttactatttggaattaatttttttttttaatatttttcggtttttaactttgattataattagactgaacagctttaatgctttttacttgaatcaattgttaaaatgtaatgtaatgtgtaagccgtgtcatatgggcccaactaagtattgtaagtcaagtgactgtagttcctccaaatgtattgtaaatgtgtaaatgccaaacaaatcctcgacaagcgagcaaatgttttcatcagtgctaatttgacttatcagcttatcagacttagccgcacgtccttgcaatgtgtgccagagccagaaaccgttcaaagggaaaaaccctcactgacagcagtgattcctgagatcctcaacttggcccggaaagcggttacctttctctcgagattggccatggcataagcctaggcgaaactaacaacagcaggctgcctggaacttccaacgcatgccacttaatatgcaaatatgccgcaaaagagctttaaactttaaaacactgacaaaaactagaactaatccccaccatcgaaaactgggcggaaagggactaggtcgagacgatgcttttgctttcggtgtggagtggagtcaagtcgagtacgtgtcatgtgtcgccttgtttgtggccaagttttcggcgcagctggaaaagttccatgaaaacgtgtcccactcaatggggaaaagcggttcgtgattgacgcaggactaagtatgagcggcgaggggtgagcgggatgcgggaagctaaggacgctcagagtgcctgcagaggaaaa

SEQ ID NO: 7406 - DNA, 2805 bp, DROSOPHILA
atcagtccaaatcgaatcgttgccgcgaacgcagctctcttcaaaagcggaaaaaatatttaaaaaaatatatagttcaaccgatcgatcgtgcgagaaaaacgacattgacattcaagcgggcgcgctaattgatccattggaagcccccttaacgcccgggtcaagtgctctcaattggaagtgtcaggtggcagcatggggcatctgcaccccgttcccaacccccttccgatccccatctcgatcgcagttccgttgatactgctgtttttgggcgcctcatcgccggttttggccagttccgatgatcaaaccgcctgcggatcgttggagataaataagattgcggacctgcggaaactgcagaactgtactcatgtggtgggtcacgttcgactggcctatgtggatctgacggatgtatccggcaactacagcctggattcgctggccagcaatgtgaccgagatcagtgactacctaatggtgtatcgctgcacgggtctgatcagcctgcagtcgatattcccacggctgcgtatcattcgtgggcaggagctcctctttgatcagtactccctggtggtctacgagaatcgcaatctcagggagctcggcctggtggagttattgcgcatccagagcggattcattcgcgtcgaatcgaatcccttgctgtgcttcgtggaaaccgtcgattggatatatctaatgggcaatgccactcggcagcacttttcccttaaacacaacagaccgcaaagtcagtgccctttgtgtggtagcctgtcagcggacttcgagttcatccggaactcctcggagcgctgctggaacgtgaatacgacacaacttcgcccccaaccgcccagacttaaggactgccccattgcatgtggcctaaacggatgtgatagtgcgggcaaatgttgtgatcacaactgtgtaactggttgctattcccaaaactgctccctttgtgcaaactaccagggaagaatgggatgtgtcaatcagtgtgtcgccagctatgaattaaacaagaggaggtgcatcggtcacagggagtgccgggaattgggaaggattcccctgatacgcggctatcagtgtgtgaaaaagtgtccgggaaaccagaaagagattttggtcgccaagggcatcatccactgccaggtggagtgcaacggcgattttcacgtgaagagtgctgccgacctggaagttttacaagactgtgtgacgatcaatggttcacttaccatcgaactcaccaatattaaagaaaaaattgtagatgccttggaaaatgcgttggccagtgttaaagagatcactgggtatctgaaggtcatacactctgcacagctgatgtcgctcacatttcttcagaatttggatgccataagaggggataagctggtggaaaacaaatacgccctgtatgtagtgaataactaccatttggagcacatttggccacccaatcacctggtgatcattcagcgcggtacactattctttcacctgaatccccgcctgtgctacgagaaaatccatcagctacagggctccctgaaaagcggagagaatatatccgtggcagatgtatcccccaattcgaacggcgaacgcgtgatttgtggcgacgcggtgcgctccctcaatcccaaagtggaggacctaaattccactgcggtacgcatcatcctggactacatggactgggagggtatggaaacgctaataggatattcgtatcactacaaggaagccccggtgcaaaacgtgactatgtacgatggtcggcatggttgcggtcatgacaactggctgatggacgttgtgcccaaccagagtcgacgtcatgtgataagcggtctgaagccctacacacagtatgcgtatttcgtgaagaccctcaccagaaccgaatatcatattcagatagatgcctactcaaaaatcggctacttccagacgctaccggataggccaagtcctgtgctccgaatatatggcagttcggaaatcagttcccagattcttcttcactggtggccaccgaggcgtccaaatggagtcattaaaaattattttgtgaccgccgaaaagtacaatgctaccaaggaagcaaaggacaaaaattatgtgaatgttgagttggaaaatgctaaagacatcgattgtgagtgcgctggtgtactgccctactattcaggtcctcagccagatgacgaggattactacaacaaagagcaaatcacctacgaggatgcgttgcccaatctcatttatgtttcgcgcaatcacgactatcgcagaaaggagttcgaaaaagtgattaactatgagcacctgttgtccataaagaaggatgaagagcccaccagaccgcccacaaccactcctgctcctacaaatgcaacattggctaaggagagattggccgcaattaactatgagaattatcgcctgaatagcgagaagaagcagcgggatcttcaggacttggaccagcacaagtataccatccgacatgccttgcccaagtgccaaaactcccacgcatccgtggtccagcaagtggaggaaaaatgcgtggctgaggagcccttgagtggctacgaacttccgggcacccagcacttttactgcctctcccagttggagccggaaacccattaccggatcaccatacgggcttgcgtcgagggcgtggtcaacggatgctcaactccggcggaagctgtaatcaagactgcaagcatccaactggagcgattcatcaagggtgtttag

SEQ ID NO: 7407 - protein, 868 aa, DROSOPHILA
MGHLHPVPNPLPIPISIAVPLILLFLGASSPVLASSDDQTACGSLEINKIADLRKLQNCTHVVGHVRLAYVDLTDVSGNYSLDSLASNVTEISDYLMVYRCTGLISLQSIFPRLRIIRGQELLFDQYSLVVYENRNLRELGLVELLRIQSGFIRVESNPLLCFVETVDWIYLMGNATRQHFSLKHNRPQSQCPLCGSLSADFEFIRNSSERCWNVNTTQLRPQPPRLKDCPIACGLNGCDSAGKCCDHNCVTGCYSQNCSLCANYQGRMGCVNQCVASYELNKRRCIGHRECRELGRIPLIRGYQCVKKCPGNQKEILVAKGIIHCQVECNGDFHVKSAADLEVLQDCVTINGSLTIELTNIKEKIVDALENALASVKEITGYLKVIHSAQLMSLTFLQNLDAIRGDKLVENKYALYVVNNYHLEHIWPPNHLVIIQRGTLFFHLNPRLCYEKIHQLQGSLKSGENISVADVSPNSNGERVICGDAVRSLNPKVEDLNSTAVRIILDYMDWEGMETLIGYSYHYKEAPVQNVTMYDGRHGCGHDNWLMDVVPNQSRRHVISGLKPYTQYAYFVKTLTRTEYHIQIDAYSKIGYFQTLPDRPSPVLRIYGSSEISSQILLHWWPPRRPNGVIKNYFVTAEKYNATKEAKDKNYVNVELENAKDIDCECAGVLPYYSGPQPDDEDYYNKEQITYEDALPNLIYVSRNHDYRRKEFEKVINYEHLLSIKKDEEPTRPPTTTPAPTNATLAKERLAAINYENYRLNSEKKQRDLQDLDQHKYTIRHALPKCQNSHASVVQQVEEKCVAEEPLSGYELPGTQHFYCLSQLEPETHYRITIRACVEGVVNGCSTPAEAVIKTASIQLERFIKGV

SEQ ID NO: 7408 - DNA, 17108 bp, DROSOPHILA
aaaaaaaaaaggaaacctggaaacggagaagggccagcaaaaagaggtgaattgaatgagttgcgaagggaagttattaaaaagcgataaacccagagcaaaacgcatttggcgaattgttgaacaccttgtggatggcctcccctttcccaagcggccaagcgcagtttaccgcgaattatggaattcttatgctaaaataatggacccacaaccggactcggagcagtagtgaagccaccaagttagtggttcatcgatcagtaataaatttgttgcgtacaccggggtacaaaccaaaaaaaaaaaaaaaaaactgaaaaaaaaaacaacagaatatggagcgggagcatgtcgcgcgtttgtttcatttctttaattcatgagcaggatcggcgttctggaccaactgttcctgctccgccgatcgaaggtgagttgctttggccaactgtgcgttaagtcgttgaaagtcaatagtatgtgctgcccgccccaattccccgttcattgtataatagcacacaagctcgtccatccggttgaaaagagtgagaaatggggcgaggaagggcagtcactgttcccggacaaagtcacggttgcaagttgcaatgccagaagtcacaggagcctggcgtcttatttatgacttgtgccaccacttggctactatctcagatttgtgtttttcattaattatgcaagattccttttggggatttcatttcatttcgtttcgtttcgttacgtttttgttttgattcgggtcgtgctgggtcgttttgaatgataaatagcccgagattaataaggcgcctggctaaatggcgtggaaagcattcaaagtcgacgattatgaaatttgactgcttatctgattgtgtttcgttggttaatcggaatgaaatcattagcgagagggcacataaaccaattaaagtttatatcaactcttaaattcttacctttatcgaaccgctcccttagaaacgcacactcagtttattgattgtattcaaattgtgttttttttttattttatttatctttttttttattgggttttctgctttgcttttttctcaatttgattttcgttatcctagtttgttgaagtttgcaaaaatcgaagtttaaacaaaataaattctaactttgttgttgctttaagtttatgtcaaagttcgcgttaactatacaagaaatattgattattaaacgttaccaacgctgattacgaataccattatatatttatgtgtatatttatatatatatagtgtatatagtcattattgtatgtgtgtctaaattgctgatatgggatgctaaacttacaaaatcaaattacgccgaaaaaaatggtctcgaatgcgcgaaaaatcgtttgtttacaagttgtttttaagcttacgaattatagtttaacgttaaacattatggtaaaattaaattaaatttcaaaatcctttgcgtttgttattgttttgctcacacagaaacacagacactgcagttttgcttaagaagcgctctcaaaatcccgacccaaagtcgcacattgtattcgatccggggtgtccttagatcttccaggacaaggtttatacactcgccgaaggacatcggcgatctccatcgccaggtggcgtttagaaccagtaaagatccttcgacgattcctgtacttgcgccacctgcgcttccaggcctgaaaaataaataggatgggtgtataagaaaacttgatctgttgctttgagatatctgctttatatatctatgatttaacctaatatatatatagtaagtatttttaaacagaaaggctaacaagttatcctttctattaagtgttataagcacaagatactgaagaacgttaaaacaaactttcttatgattgaactatactaatgagcatacatatcattttaaaatgtgatgtatatatcagcgcttaacaattatatttgtccctttttaactatatcccccctttgaattgtttctttatcaaagcgatagttgtactaaaactaaaaccctgctcataggctcacctgccattgtgggatagctggagtactccagggcgtgggccgtctgctggtcgtggtgcagcctgtaagacacgagaagccggcgagaggtcaggacgtggtctgtaggatgcccgatcgggcgatcgactcacctggaaccgtggctggcgtactgctggggcagcctgaggagactgccgtactgggccatgttgtggtggtaggcgtgggcgtgggccgcatgggcgtgcgctgcgtgggcataggaaccatagtgggccgcatgcggcacccacggatcggtggcgtagccggtgtccgtcgcggtgccatacaagtcgctaacctacaagcagatatccgattggattacaacttatttagcatggatgtggaggagcatcaggatcttgaggctccttccagtcgtaattgcctcacgtaccgccagcaatcggcaactagcgactggctactgaccacttggtagtggcattgttattggttatgggacttggatgggtgctcacctggtggtgtgtgggcgcgggtatggggtgcacgtaattgctgttccagaacgacggtgggaaatttcgattcgacatcgggctgctgctctctgcaattgccaaatgagggtatgtacaatgataatgcttcacaagttattgttaaatagtgctaaatttatcaagacaatggagcaaaaacagtggaggaaaatcgaataaaatctattagcaggtaagtaaaataaagtaattaacatatgtttgtttctttcacatttccttactttagtttgttattaaacaaatactaaaattacacggtgttgtacacaacctatgctgtttcagtgttgcacgtatcttaagataccactacaatcatcgatttgtacaaacaatttatgtaactagtaaaaggaaccatcttttatatagataaatagatagctgaagaaggtgatatgtatctttttcattgaattttcgccagcaaatatactcgaaggaggtgctatgcttttgcctctcggtgcaatttccattcacttgcggcaatgattaactggcaagtcggcagatgaacgagtcttgggggactctgtggctcggttacgggattggttggggcctctccgcggagtctgaatctccgcctcggtggcggcgccatggcctgttgcaaataactgagcggaatgttttcggttgtcgttcgtgctcgttgtcgcgctgttgttcaggatcatcacttgtattaaatggttgtaaatctacgcgtttatgaaatcgcgcgacgccgccaacaagatgcagaaggagcaggagccgggagcaagacatctccattatgtgtaatggagctccctccggagaccgggggcccaaaaatagcaactgcaattgagcggcaggagataccaaaaacttgcataggcttgcatttgcgttgacaacattccaaactcgattcgagagaaaaatatccaacaactggagaggagttttgaggatgcggacgaggacgaggtcggaggatgtggatgtggatgtgcttgtggggatgtgtaatgtttgtgcttggctgccgtcgcgattcgacaactttggccggcacgttggcgagtgtgccatgcatgctgatgacgatgagaatgaggatgaggatgaggatgcggatgatgatggtgctggtgcggctgggatactgaatactggatacgggatgccatgccgcgtgccttttttttcccgtaccagaagccagaagtcgtcatcatcccattgccattcactcactcgctcagctgaggccgtggaattcccattaatgtgcaaacaagcagactgccaaagatatttcctctgcagctccttcagttagcatttcactttcagccagcggcttcaaaagcgaaagccgcactacctgtccccacctttcaccttttggcctaatgaagagagcgtggcgatttatgacccgataacgttcgatcgccagcgttgacgcatagtgcggtcctgcacagagaaaactatcctaatcctctatgaagattctaaatcaagtatggagtattcaaactaaaatcgactcaacagcagttttatcttgcttaaactatagtgagtttcaattagaaacgacaaagtacaatcgatgctttaaactatttttttaagtttattacttgtctaggatataattaatataatttttgtattaagtttttattttgttattgaagtgaaatctaaattgttctaacttccattagagcataatatttttccgtgtgtccttgcacttgtatccgtatctacaagcgtatcttcaaatgtatctgtatctctatctgtttcggtttcggtttctgttttgtatttcgaaaagacggttctcctgcctgcagcgggtgccaaggaattttaaatcgaattctttgggcatctaattaaatgctcctcgcggcagaaaaacaaaatgaaaataatacgaaaggctacctgatgaatcgggtattttttgatcgagaaacgctaacgcaacggatcgggaaacgggggaaaacgggggaaaatggaggaaagtgcaagcgtgccgttcctaccgctgctatctcgtcatcttctgcgatgccctctttcggtgcggttcggttcggttcgatacgattcggttcggttcgttttgtttggcttcactgtgcggagcagttaattgaaatgcattttaaaatcgtaatgaggaatctatgcggcattcggcattgccaccgtccgacaacagcaacaacaactggcacccaaagcaacaacatcagcatcgaccgcatcgcattccggcgacatttcatagcacattccaactagcgatatatacaacatatacatatatacatatatatatacatctgggcatatagcacatacatatagatgcggcgcattgcatttcgaaaaaaaatgtatataaatgttgaatagttttaagcgcacaaatgtaaatgttcaactgtgtgcgcgctgctctcaaatagacaaatgaccaaaatgaactttaaataccttaagcagacaacaaaaaaaaaacggggaaaaacaagaggcgtaaaagtaaacaaatttaaacaaaacccattcgcattttacgtattttaaggggcagttctaaaatgggcaatgtgtgccactgtgcggcagttggcgaaaaaatgccaacgtcaccctaataataagaattttcccgaatcgaatcaccatactgcatttggtgacaacttaaatatttggtttttaaataatttgaagttatagataggaatttcttgactacaaaagttttgataagctatcctcatgcttatacctatactttaaagggagtgcttaattatctaaatcataaataaaaattgatatctcaagaaatattaatttgcattaataagcattcaacccagttattttcgagcagcatttagtatttgcttatttgttggccagttaattggctacaggaaactttactggctttgatttaaattttggcgaaccaatcactgtaaattcgttgttaagcagcctgtggaaaatttccaattatcgcataacgaatgggggggaattgaatggaaactgaattttcgcacaaagtggtggcatttcctcaaagcagacggaaattgggcaaagcggagggggaaaatcgaggcaatggcagccacagaaactcaataaaatcccaggtttaactgcaattggcggtgtggcaaagaaatataccacaaagtgctccaatcgagggggcggaatcaggataatcgcccccatgggcggtgcacgtacgaaacattaacattaagaggcatcgccagccaacacctgctcggcattcaaatgcgaggataatagattgattgagcaatggacaccagttagcagagcagcatacatagatgatcataatgaaaatcttcacttgacaaggcttcgttcgttatggctgaacaaaactgcaacagggcaattaaaattaaaaacaaaatcgagtgagacgcaaaaaataaacaacgcacatgttggggtatttttgtacatacatacatacatatgtacatatatatgcatatatatataaacgttgatccgtgcacatagtgtgcagcagatagacgacggacaggcaaaacagacaggcatgaacaaacgaaacgtttatcttcattaaaggaggtaattaattttgaaatcgaaagaacaagcgagtggcaagtggcaacttgatttatttgttttattgtgcgcccgtttttggtgtgtgcttgtgagagagtgttcgcatacacattcacattcacattcacattcacagacatttcacaaacttgtggaggggataaaacaaagtgccatcctaaagtgtttttatcccataaacgaatggctgacaatgagtggaggcgaaaatttaaatattttgcatagttttcgaacgaaaatgttggattaaaggcgagcatcttaatgcaatttttaaatttaagacacatttttaatcgatttaaatacatgtccattgccaactttaggtatatccacacaacaaagcattaattttgaacttttcaaagattaaaggcatatcgatttgttgtgaaaacttgttcatctttttagaaaggctaaatactttcccaaccatatactcacgctcccaaagtttacacacattaaccgacattattcaacatcgatacaaggtcatcatcatttgagtttggggaagcacaagaagaagtgcttcagacattaaaaccacttcacaaattgtaaattttacatttttctctgttagatatgtagctacctcattctttcccacacactaatgcattccgaaaggcataatttgcctgttgtaaattttccgagaacattttaataactttgctggaactgctggctcatttttcacctaattatgcccccatttgggggacaagtgggacactgccgcaaatcgaggcaaacacgcaaactgacagccgggacaagtacatgacacgagcggttctttgatcacaactcactggagccacaaatgagtcaaaaacgggggaaaggggagcatggtaagcatgctgattatcctcctgcactaacacaaataccagtttatattttaaatgcttgagaaagcctatgtagattatgatagtttaaaatggagaaataatcaaagaaaagtttgtacgacttaactctgatagataacttacctttagaatccttgttgttgtagttgagggcgcgggaaaagtgctcgtccacctggctggccgtgtcgcccgagtagttggtgaacacaacgcaggaggccgatagatattgagcctgtccctggccactgccggccaatccgccgcctccgctgcccatcggcgtctccagtgctggcagattcttgggtattgcccccgtgccgcctccgtcgccgccccccgagcccgtaccacccgcggaagatggaccgcccgtcgctccgccgccaccgtgcagcggatggctgtgcgagtgggcgtggcgcggggagtccggaccggaggagcaggatgattcattatgatgctgatgttgttgggagcccaccaggcgtgctgggaaatcagacagggcgagagaaaaggcaagcggaaaaactattaaataatcgctaagtaatggcgaattcgccaacgggaaaatatgatataatttattgaatgctaactggtttggaatgcgagtgcttcgtcagaaatttcaagaattttcaaattaattagctacgagtgtgcgatgactatcgcgctcttccccactatgggctttttcacttgcatgaattttccgtgtgctgccaaaaaataaatgttatgcaaacattgacattgacaatatcaatgaacacgcacatgaaaactaataaaattcattgctttaaagcgtttcgaacgaacgcgtgtaaacaaagtgtttagctgatgaattattgattacatttatagcgactatactttaattttggtagcaatacttttgctactatgttcacctttggagctgaactttataatgtactaattgagacactaatgtattaattagtggaagggctaaatggaaacgatctctaaagttaaacaaatcatcatatctattttaaaatgattgttctctttactcagtaactaattaatgacagtcgtgtttttagttatagtaaagctaaaactaaacaacaacttgcaattcagataatttcaaacaatgactatttgaaagtttccttttgggatctagatcgccatcattagggatgtacccaagtgatccttgctcaccttcagcttcgctgcgcggcacgatgaggtcctcttctttggtttgatgcgtatgcgtgtgtgtgtgcgagtgcgggtgcgtgtgtgcgtgggcgagggagtgtgcgtgcgtcctgtgcgaactgtgcagcgagtgtcccgccgctccgctcagcaccggactcattcccagccccacgctcccgacactactgctcccgggcaccacattgctgccaagcagtccgctcgccggtccgccgcccagtcctcccaggccgccgagtccaccgcctccgattccgccggaggagctggcctgattcgctgcgaccgccactgccgccgctgcactattgtgggccgccgctgccactgccgcagcggcatttgcgctcaccgatggcggcaggatggggctgcagggcgagtgggagctgcccgaggcactcgatgaggcggccaagttgacgcccgaggaggagtacaaatcctggttgaactgaaaatgtaccaaattattaatttacttgttggattacatttcaagatctaatcaggagggaatcttgcttatgtgatagaggctttaagtatgcgtcatttgaaacattggtaaggaatcagttttttatcattatcattatcatataacagtagtgattcttatcgaagatagtgttttcattttgaattcaaatctttccactaatagtattaaactatattgtattttgaacagcttctttaaccacgctcccctttgaaactatatttctggattcataagtggatattcccggcagattcccgaaaggccagcgacaggcgagtaatgagttatgagacgcgttgcagcaaattgaaaatgacacaataagaaaatttatgttgatggaaaacgcgagtgaggccattaaatttacgagcgtttggtgcatattatcacggactcgggccaaggttgcaccgctccaaatgggtaaatgggctgaggaaaagggggaggttcgagtttgaggaggaggtgaactgaaactgaaataggagagcggccagaaggcgataatcacgccgcaatcttctgcttagcggactgtcaaacataatgcggcgctggcgacgatttacgagcaacaccttcgaccgtctcccctcctaatgagcccattagtggctccctagcccgataaccccatggcaatcgttgccctgcccctgcccccgccctgctatgccacatttgcagccgaaaatcgttctaaatttaagcattaacttccagtcgagcggtgcgaaccacgacccctgctccatttcgtaggcgcatgccaattatgatcgtgtctaagggttaataatgggttaaccgggcacgaaccatttcaagaagagtgcaacgcggccatggacagcagccctgatttacgagccaagtatctggtagatacaacagctggccggcccgttaggaggcatgccacttaattagacgaaagcgctgagtcagccgaaagatttttgctaatagatacagatacaaattgattgagatacagctgcggcaaaagctgcagcatcacaggcacttgccgcaaatatgtggcagatcaagtatctccatctgtcacctggcttaagcacataatcaatgcgttccgccttatcggccaacactatcagcgacgacagtccaaattggagggcggaatcctccggttgcggatcccgaatcgcgaataccaagtgcagtagcgtaggcgaaacaatgcccagatacagatacaaaacgcacggtcgcaaacgcatcggcagatgtatctgcagggcaatcggcacacagaaagaaaaatcttgaattttttaaacaaagctgtgaagagtgattaaattgaaatgtcaaaaagcgctgattcacaggtatcttctagtgtttaaacattgtttatggttatggttatggttgctatgcataacaattctattaaatgatgtacgaagttttgtaaagataatcaagaaaaatgaaaagaaattggcgtaataaaagagatagtttcatataaaggtcataagtgcagtaattatcatgttcaattcaatgtagacaccctgaccattaattaatttaacctatctgagcaacgtatcattttcccggtgtacttgtatcccgtatctgttgcagtgttattagctgcaggcgatatttcggttatgccgagcagtcagaccttcgatcacacggcataaatcaccgggaatcgccagacgaaccagcgacaaaatttcggagccccaaaacttttcgcttttttttttcattcgttctttgttttttgaattcagctccctggtttatctgcgatcggttgacaaaaggtcccaaggatcgaatcggtatggttatgttatggcgttgtaggcggggagagctgcaagatcggcaagaactaatggcgatacacacaataaattaaccgagcggaccaaggtttttggtttgtttatttgttttagtttaactttaggtttcgggactggctggctggctggctggccaaagtgtcgaaagggcggacgaggattgtgcgtttgtgggacaaaataaaccggtcatccagctgagtagccaaagctgctgactcaatctgcgattggctttccatggcggaggtgcagaaaggagcagaaaggagcaaccgaagccgcaatatccaggcgggtttatcgcggtccctctttatgggcatgcaaaagcatagaatcagaatcgtgtcgtatcggttacttacataaaaggccaatttcgatttggtgccgcggccttgtataattggaacttgcgacacaagaatttctttgtgccccagcggcagcagcaacggcaactgcctcatggatattggccgcactgccagccgccttttgaccatggtcggcctgagttctgggccctcgaaactggacactggaaaccagcgatcgtgagaacttttctgtacttgtcacagaaatcacagcgaaatcttcgaaatcaatgttagcaaaaagcgggagaggcgaaacaaagccaacattgagttgcggaattccttgaaatgttgcccctttagtttggcaacttctctttttttcggttctttattgtttcgggtttcccaaatcgatttgcgttctgcgtgaattcttatgatttgttagaagcgtctaattattcaggctccaagcccgttcaaacaaattgacgcagccaacaacacagtagctttcggttggccttggccaaaagtgcaaagaggtatccatcaatcagcggtggccaagtgactcatcctcggtgctttcccttcttaaagtgcttctccaacttgttcttcgtacgctcgtttggttaaaaggagacgaacgaacaagagtcttaacaaaacgttttctgattttccttatggccactctgtgtttatgcaaagcgagccactttgtgctggccaacagaaacttgcgttgcacaaatgggattccagttttgaattgcgctttcacaaagagccttcactccttaaatttattttttgcaattacaaatgtgagcataaacgcaagaaatacaagatataagtatttaagaacgctgcttcttttaactcttattgtactaaatcatctagttcctttttaaaagttgttttgtgtaactgaaaatttccctatttagctttgactaattaaaattctaagcaagttattcaattccttctgttttacagacgagatttcttatcatttcaagcaatggtattacctaaaaaaaaaacagttaacttggacttacaaaaagtatagacaattgtaagtttggaaatttttaacaccttgctacgtgcgttagccacaaaaaccgcaacgccttaaactcaaaaattcgctagccaaaaatgtccaagatacaaatttggtcaccaacacttttgctgctcggttttagcttatttctctgatattttatgaaattagtgagtaattagtacttaatagatctaataagttaaataatctcaaattgttgctatttctgttagttaacctttgttgttttactatctatttaattctttttcttcataaattatttcaaatttctaatttaaaatccttaatttattacttatgcaaagagaaattgtgattgccactacagagatttcgctgagattttgattaattgaatggtattcctgagtgtaaacaaaccaataataaaccaatctaataaacgataaactatttttcgagcattaactattgaactgaacaagtaaaacttgtctgactaaaattccatattttttgtgaccacatccacgtgactatcaatatttatttaatggtgctattgaattccgactataagtttaatatccattttttaaaagcagcctacgttcaaaaaggttactaaataactattcttcttctgcttgtaaaagtgttaattataaatattttactgactgcttggagtttaagccaagtacatgccaagtcaaatcaatctaatctttaaaatgcgatgtttttaaagtaatattgctttgaaagcaattttgttcgctcgaggagttagccgaatgcagttgttttggcctgattacccggccaaatattcaaagttcggaaggcaaaatcgaatcgcatcgaatcgaatcgataggtttgcggtactcaccctctcatactggtagaacgatcgacttgttccagcgcgcccgtacagatatggatagtaggcaccgtacataacttcggggcaggacactgccattgtcgcagtggcaagcgcacttgcaactgcaactgccactcactgccacacacacactggcactggcactggcactcacactggctcactgcttttgcggtttagcgatggatggtagttaaattggtattgtcacttgagcggggagggaattgtgatgccaatacgcgtggttccaattggattcgtaatcgtatcgggggtttgaaattgaatgctctctctgaagagagggagatagatatatagatagagagcgcgcggggagggaagggggctaaaacttggagtaattataaaaccggctttcaagtcaaggcgtgttttgttgtttttgttgtattttttctgcagcagttgtagtatttatttcttttgttggctggcaaaattcctggaatgaaaactccgctcggctaattatatttacatattgtaaaacaccatcgcgtttgtatcagcagctataattgctttttgtctgttttttgtttacgttttttgttgtttttcgcaaacttctttctatgcatttgccattcccgttcgtgggtaatttccttttcttttcgactcagtttcctcccctcgtcgctcttcgactttcttcacttgcttctttcttctttgtttgcttgtgcaggcaattgcaattatcatttccacattgttgattgctgttagtcgttgttttctattttttcagtttttttttccctttggcgttggaacgtcaatttcgtttctcatccgcgtttccgacgaagaattgccaactggaaggaaaatggagaaaagtgcaggagaaggcattaacaatttgctaattgtggtaagaaattcaaagctgatgagccaatttctggcatttatgttaaaaccgactttaatgatgtgactatttgaaccgtaaatgtctgttgaaaagcaattgcatgtaaacaaagcatcatcaagtttcaaaatggctatagaaaaccacaaacgaatgctttcacagctaaagtaattatgatcaaaataaaaaccaataaactggcacataaacggttttatagacgaagtgaattaaaacttgttaaagatatccgtcggaaaataaggaattactttaaaagtctttgaagttaattctttaattcttggctttagcttttagaaatatcttgaattaggtcgcaaattaatatgctaagcttttttgtagaatggaaataaataatcgttgcaactattgattgatacaataacagcagcagcgaatgccaaacgttgaacaaactattgcattgaacacagtaaaagctattgaaatgaaaatatagctaaggtccgacggcaataggaatcatttttaaataaacctccgtcgggacatgaaaacacaaaatttacattttaaaagctatctgtcacaaaaaatattcgtaatttaatgaataatcctataaattatatctgtgcttctactactgctattacatattatcccaatttaattggaaaataactatagctccataatgttcccgttacaaaaaacttaagctatttaacaacctttttttaatccttaactgttcagagcttttcacgttgtacctttttacaattcaattaaaaagtataggaacaatataaccaattaagtggaattaataaattaaccttatgatgtaaggtacaaacatcaatttcagacgtttagcctaatatgcataataaaattaaatgcaaatcgataaattaggcaaattatgataattataatgacaccagaaggaaaacgactgcggtccaatttgacatttcatttatcgaacccgcacttaccacttgaatgtttttagtgtaatccaataagatgttcagtgttgcttgcgtaaatcaactcaattctcgttacagtgcactttttgcaaaatattcaacaatttcacatctcttgacaaggtaaaacttgacttaattttcgtttgatcgttttgttgttgttgttaatttgaatagtaattaaagtgatacgcgctggggaattcgcacgtgaattcttgagattttggcgcagcggcttctgcgattatttttaaccgaaaacgagcagcaaacatttggtcggcgcactcaatgaaaatattttcgctaaatccacaaaatgccgaattccataaattcttggcggcccgattgtgcgagagcgagtgagagagagggcgatagccagcgagcgaaaatgagatggagaacggcactattttggcaattgcagcatccgcggaaatctctatttctataattattattctgctttgcgatgtggcacttggaaaacaaatgaactgcacttgccgcgatcactcactaggattttggttttgtttcgttttaattttacgatattctcgtttacgctgaaatcgaaaatccgaaatcgaaaatcccgcgcggcggtgagagaaaaacacggagagctccggctgccgctcaatcggaagagaaaaaacaaactggcaaaaggagcggtaaatccaatgcatttgcgggcagcgcgacggcagcgcagtcgccgcggcattgaaaacaaaatggcaatttcttgtatcgggccatctctctcgcacggcagtcattggaccgcggtgggagcgggacaactagtgtgctgcagttgccaagcaccgcccacttgattgctgccgcattcagcgttgtattgttgtttccaggtttccaactaacgatgccacatcggtgtgaaaataaaatggagtgcgtctcaattgtgtcctcaagtagacgaaactcctgctgtttctctctgattttaaagttcgacaaacagattgaaaggaattcgcattcatccggggccttctacttcgtccttttgttcctttccttgcctttccgcaatgaaaagtatgcgccaactgtgtcaacagtgtttgcagtgcccccgcaatccttgttttccagtccccttccaagccccaagccctcctcaaccgcgaagtttccgtattgataataatctgattgcaaatgaatacaatttattgtgctgttcattcgccttcatttcgccgcggattgttgacaaggtgtggatgcttataagtgaaagacggtctactacacctttaattgttagatttctgataggaacgtgtaaaaaaagctgaaaaatctgtggataatataaaaatggaatacatcaagtcggcatggaaaatagccctactacagagcatataggatctaaacttatgttttcatttacaaattccaggaaagtcggaacacaaagtttggttttagtgacagctaatatgatttgattactggttataccgatttggctaaatatcgaaatttgttttaatacgcagaaagttgtttaagcaatgttgcataaaatgttgtgggaaacttctataactacggagaaagctagaaaaaaaaccatgtttatgtgggagtttaacctgagaaagaagtttccagataaagaagacatggccgacgggacttcgagcggtgattatttaagggattctcaaagtagttaaggtagtcagtcttatagatggtcaccaagaaaactataatggttattacacagcctgcatcaaaaactaaatttctaaattctaatgccagataataataatatcttttatttattttgaaaatgatgagaatattaatctcttatactacaatccaattagacaaatcaaaagtagtgaactgtttttacttaaggcttttaataaaattggtctggtttcaaccttttgaataaaacattaagaaaactctttgaccaggtgcatattgataagctatgagaaca

SEQ ID NO: 7409 - DNA, 3816 bp, DROSOPHILA
gaattcctttcaatctgtttgtcgaactttaaaatcagagagaaacagcaggagtttcgtctacttgaggacacaattgagacgcactccattttattttcacaccgatgtggcatcgttagttggaaacctggaaacaacaatacaacgctgaatgcggcagcaatcaagtgggcggtgcttggcaactgcagcacactagttgtcccgctcccaccgcggtccaatgactgccgtgcgagagagatggcccgatacaagaaattgccattttgttttcaatgccgcggcgactgcgctgccgtcgcgctgcccgcaaatgcattggatttaccgctccttttgccagtttgttttttctcttccgattgagcggcagccggagctctccgtgtttttctctcaccgccgcgcgggattttcgatttcggattttcgatttcagcgtaaacgagaatatcgtaaaattaaaacgaaacaaaaccaaaatcctagtgagtgatcgcggcaagtgcagttcatttgttttccaagtgccacatcgcaaagcagaataataattatagaaatagagatttccgcggatgctgcaattgccaaaatagtgccgttctccatctcattttcgctcgctggctatcgccctctctctcactcgctctcgcacaatcgggccgccaagaatttatggaattcggcattttgtggatttagcgaaaatattttcattgagtgcgccgaccaaatgtttgctgctcgttttcggttaaaaataatcgcagaagccgctgcgccaaaatctcaagaattcacgtgcgaattccccagcgcgtatcactttaattactattcaaattaacaacaacaacaaaacgatcaaacgaaaattaagtcaagttttaccttgtcaagagatgtgaaattgttgaatattttgcaaaaagtgcactgtaacgagaattgagttgatttacgcaagcaacactgaacatcttattggattacactaaaaacattcaagtgttggcaattcttcgtcggaaacgcggatgagaaacgaaattgacgttccaacgccaaagggaaaaaaaaactgaaaaaatagaaaacaacgactaacagcaatcaacaatgtggaaatgataattgcaattgcctgcacaagcaaacaaagaagaaagaagcaagtgaagaaagtcgaagagcgacgaggggaggaaactgagtcgaaaagaaaaggaaattacccacgaacgggaatggcaaatgcatagaaagaagtttgcgaaaaacaacaaaaaacgtaaacaaaaaacagacaaaaagcaattatagctgctgatacaaacgcgatggtgttttacaatatgtaaatataattagccgagcggagttttcattccaggaattttgccagccaacaaaagaaataaatactacaactgctgcagaaaaaatacaacaaaaacaacaaaacacgccttgacttgaaagccggttttataattactccaagttttagcccccttccctccccgcgcgctctctatctatatatctatctccctctcttcagagagagcattcaatttcaaacccccgatacgattacgaatccaattggaaccacgcgtattggcatcacaattccctccccgctcaagtgacaataccaatttaactaccatccatcgctaaaccgcaaaagcagtgagccagtgtgagtgccagtgccagtgccagtgtgtgtgtggcagtgagtggcagttgcagttgcaagtgcgcttgccactgcgacaatggcagtgtcctgccccgaagttatgtacggtgcctactatccatatctgtacgggcgcgctggaacaagtcgatcgttctaccagtatgagaggttcaaccaggatttgtactcctcctcgggcgtcaacttggccgcctcatcgagtgcctcgggcagctcccactcgccctgcagccccatcctgccgccatcggtgagcgcaaatgccgctgcggcagtggcagcggcggcccacaatagtgcagcggcggcagtggcggtcgcagcgaatcaggccagctcctccggcggaatcggaggcggtggactcggcggcctgggaggactgggcggcggaccggcgagcggactgcttggcagcaatgtggtgcccgggagcagtagtgtcgggagcgtggggctgggaatgagtccggtgctgagcggagcggcgggacactcgctgcacagttcgcacaggacgcacgcacactccctcgcccacgcacacacgcacccgcactcgcacacacacacgcatacgcatcaaaccaaagaagaggacctcatcgtgccgcgcagcgaagctgaagcacgcctggtgggctcccaacaacatcagcatcataatgaatcatcctgctcctccggtccggactccccgcgccacgcccactcgcacagccatccgctgcacggtggcggcggagcgacgggcggtccatcttccgcgggtggtacgggctcggggggcggcgacggaggcggcacgggggcaatacccaagaatctgccagcactggagacgccgatgggcagcggaggcggcggattggccggcagtggccagggacaggctcaatatctatcggcctcctgcgttgtgttcaccaactactcgggcgacacggccagccaggtggacgagcacttttcccgcgccctcaactacaacaacaaggattctaaagagagcagcagcccgatgtcgaatcgaaatttcccaccgtcgttctggaacagcaattacgtgcaccccatacccgcgcccacacaccaccaggttagcgacttgtatggcaccgcgacggacaccggctacgccaccgatccgtgggtgccgcatgcggcccactatggttcctatgcccacgcagcgcacgcccatgcggcccacgcccacgcctaccaccacaacatggcccagtacggcagtctcctcaggctgccccagcagtacgccagccacggttccaggctgcaccacgaccagcagacggcccacgccctggagtactccagctatcccacaatggcaggcctggaagcgcaggtggcgcaagtacaggaatcgtcgaaggatctttactggttctaaacgccacctggcgatggagatcgccgatgtccttcggcgagtgtataaaccttgtcctggaagatctaaggacaccccggatcgaatacaatgtgcgactttgggtcgggattttgagagcgcttcttaagcaaaactgcagtgtctgtgtttctgtgtgagcaaaacaataacaaacgcaaaggattttgaaatttaatttaattttaccataatgtttaacgttaaactataattcgtaagcttaaaaacaacttgtaaacaaacgatttttcgcgcattcgagaccatttttttcggcgtaatttgattttgtaagtttagcatcccatatcagcaatttagacacacatacaataatgactatatacactatatatatataaatatacacataaatatataatggtattcgtaatcagcgttggtaacgtttaataatcaatatttcttgtatagttaacgcgaactttgacataaacttaaagcaacaacaaagttagaatttattttgtttaaacttcgatttttgcaaacttcaacaaactaggataacgaaaatcaaattgagaaaaaagcaaagcagaaaacccaataaaaaaaaagataaataaaataaaaaaaaaacacaatttgaatacaatcaataaactga

SEQ ID NO: 7410 - protein, 453 aa, DROSOPHILA
MAVSCPEVMYGAYYPYLYGRAGTSRSFYQYERFNQDLYSSSGVNLAASSSASGSSHSPCSPILPPSVSANAAAAVAAAAHNSAAAAVAVAANQASSSGGIGGGGLGGLGGLGGGPASGLLGSNVVPGSSSVGSVGLGMSPVLSGAAGHSLHSSHRTHAHSLAHAHTHPHSHTHTHTHQTKEEDLIVPRSEAEARLVGSQQHQHHNESSCSSGPDSPRHAHSHSHPLHGGGGATGGPSSAGGTGSGGGDGGGTGAIPKNLPALETPMGSGGGGLAGSGQGQAQYLSASCVVFTNYSGDTASQVDEHFSRALNYNNKDSKESSSPMSNRNFPPSFWNSNYVHPIPAPTHHQVSDLYGTATDTGYATDPWVPHAAHYGSYAHAAHAHAAHAHAYHHNMAQYGSLLRLPQQYASHGSRLHHDQQTAHALEYSSYPTMAGLEAQVAQVQESSKDLYWF

SEQ ID NO: 7411 - DNA, 9450 bp, DROSOPHILA
tcgaaaaaagaccattctttgaaacaataattgcatcgacatactaaaatcaatcaaactaaaatattttgttttagaaaagaatggaatgatttgaataatcagttatatatagcaaataaaaatataccaagtaaagcttaaaaagagatttaatcttcaaaacctttgtcaaattaattatatcagttttgaaagctagagaatatttttaaaacttagaaaaggactataatcctattaaaagtaaagtatatgccaataaaatgtttacacatgtttttgttatcctttaagttttagatatttttatcatacttattgtaagtacacacaaaattttgatgaggttataattagaacattggcctgatagcgaagccttcggaatttcccttgcccgagcaccgaaaaaagtccaaaaagcaggagccgcaggggcggaccaaaacggaagccatgtgcccgatctcagggcgggggctatcagctaattttgagatgggagctggtagctgcgatctggaagctgggatctgggagccggagagctggttgaaggtgctcccggggaggtgctccggcggaacgaagctgatgtgctattgagcaacttaagtcgcatgtggcatatcaacagcagcgacggacttatcgccaagtttcattcattccgcagcgactatgttaacttgtgggattagtgttgctacatacgacgacccgtcgcccatccgttctatatgccatggtgccaccacccacctcccaccagccacctcgcagccatcgcaaccgatccgatgcccatccaatccccgtcgaatcacacggatagtgtacatgagccgtagacccgatcgtcgagatcgtgccaagccgaacgatcgacgagtgaagatcggggcatcggcgtttggcttttggatcgctcgaacttatactataattagtcgtgttccgtctccccgagtaagtagtagtctggtctcggtccggagctgatctggccagctggttttagtctttagtcagcgctgtggagtggtgatcggttcggatcggatcgctcggttgtgaatgtgtgtttccattagggtcccgtcccgtcccgtccaaccgtcccttaaataggatttgattcctgtaaggaactgagcttttacaacaacaaaataatataaacataaaatatcttaattaaatcaggaagaacgcgtactattaattgaaaatatccagcaagtcgttgtgcgagtctcgtaccagttccagtgcctctcaaactgtcgcgtgtatatgcttggaaatgaaatgaaacgaaatacaagaattaaatcgttgaaaaaaaataagccagctcgattttcccacaaatattaaataaaataatattcctctaagaatatttccaatttattttgcaactgttgcgaaattaaagtgcccaattctctggctcatctttccaggcccagcgacggcaacatataaacttcaaattcgacgaggacagagcaaataattgtgcaggcttaagtgcatagggcatcatgttgcccttctggaagcggtaagaaaaatgacaaaagttagaaaaataatacaaatggttgcaaaaatttaagttaatcaaagaaagcaattgttaattattaaaaaccatgacaataatacttacttaacaactaataatactctatttaaaaatttaaaatttttttgaaatttttaatgattaaaacccagttatggcctaaaaaagtattgccaatttttttctttctaatccattcagaaagagcaaatattagtttttaaattaatattttagatatcagcaatacaaaaatacataatttaaaacatcacatttgttcaatttttttttaatttttcgaagcgcgatctcttaaaaacttgtaagctctctcttaagcgcctttagcaaactctcttgaattgacggcttaagagagagctgccaatcgaagagagctatgtccaattaaatagctagactgataagacgaagcacagttcctaaccctcctgatcttcgtcgacttctttgcaggctgctatacgccgctgtgatcgcgggagcgttagtcggtgccgacgctgtaagataaccgtagcccatgccatccatctggacattgaataatatactccttttccccgcagcaattttggaagacggctggtacggccggttcgattcaggactccgtgaaacactacaatcgaaatgaacccaagttcccaatcgacgacagttacgacattgtagactctgccggcgtggcgcgcggcgatctgccgcccaagaattgtacggccggatatgcgggctgtgtgcccaagtgcatagcggagaagggcaaccgtggtctgccgggccctcttggacccacgggattgaagggcgaaatgggtttccctggcatggagggaccatctggtgacaagggtcagaagggtgatcccggcccatacggacagcgtggtgataagggtgagcgcggatcgcctggtcttcatggtcaggctggtgtacccggagtccagggacccgccggcaatcccggagcccctggtatcaacggtaaagacggttgcgacggacaggatggtattcctggcttggagggtctatccggaatgcccggacctcgcggatatgccggccagcttggcagcaagggcgagaagggtgaaccggcaaaggagaacggtgattacgcgaagggcgagaagggtgagcccggttggagggggactgccggtttggctggaccacaaggatttcctggagaaaagggcgagcgcggcgacagtggaccttacggagccaaaggaccccggggtgagcacggtctgaagggagagaagggtgcctcctgctacggacccatgaagcctggtgcaccgggtatcaagggcgagaagggtgagcccgcgtcctcgtttcccgtcaaaccgacccacacggtgatgggacctcgcggcgatatgggacagaagggagagcctggcctagttggccgcaagggtgagcccggacctgaaggcgacactggactcgatggacagaagggcgagaagggtctgcccggcggcccaggcgatcgcgtaagtcgagttcatacttaaggctccaaatcgaagtggaagttgaaacctctataatgaaatatatacgtacagggtcgccaaggtaactttggacccccaggatctacaggacaaaagggagatcgtggcgagccgggccttaatggtctgcccggtaatcccggacagaagggtgagccaggacgtgctggagcgacaggtaagcctggtctgctcggtcctccgggaccgccaggcggtggccgtggaacaccaggacccccgggacccaaaggaccccgcggctatgttggcgcacctggaccccagggattaaacggagttgatggactaccgggtcctcagggatacaatggacaaaagggaggtgctggtctgcccggtcgccccggcaacgagggacctcctggcaaaaagggagaaaagggaaccgcaggacttaatggaccaaagggatccatcggacccattggacacccaggaccaccgggaccagagggacagaagggtgacgccggtttgcccggttatggcattcaaggatctaagggagatgctggcatacctgggtaagtgcaatgattcatttaatagtcctagcactcagtcgagtcccactgtggagccgagtcctgttcttactttccttcattaaagatcttatttaattcgaattaattttcgttcgtcctagttatcccggactaaagggtagcaagggagagcgcggcttcaagggcaatgctggtgctcccggtgactccaagctgggtcgtcctggaactcccggtgccgctggtgctcctggacaaaagggagacgctggtcgtcccggcactcctggccaaaagggagacatgggtatcaagggtgacgtcggcggcaaatgctcatcgtgcagggccggaccaaagggtgataagggaacgagcggactgcctggaattcccggaaaggatggcgcacgaggaccgcctggagagcgcggatatcccggagagcgtggacacgatggaatcaacggacaaactggaccgcctggtgagaagggagaggacggtcgcactggtcttcccggagcaactggagagcctggcaaacctgctctgtgcgatttgagtttgattgagccattgaagggtgacaagggttaccctggtgcgccaggtgcaaagggcgtgcaaggattcaagggagcagaaggtctgcctggtatccctggacccaaaggagaattcggtttcaagggtgagaagggtttgagcggagcacccggcaacgacggaacacccggacgcgctgggcgggacggataccccggaattcccggtcaatccatcaagggcgagccaggcttccatggaagggacggagcaaagggcgacaagggatcatttggccgaagcggcgagaagggagagcccggtagctgtgcgcttgacgaaattaagatgcccgccaagggtaacaagggtgagcccggccaaaccggcatgccaggacctccgggagaagacggcagcccgggagagaggggctataccggattgaagggcaacactggaccacagggacctcctggcgttgaaggaccccgcggcttgaatggacctcgcggtgaaaagggcaaccagggcgctgtcggagtacctggtaatcctggcaaggacggccttcgcggcattcccggacgcaatggacagcctggaccgaggggagagcctggtatttcgagacccggccctatgggcccacccggtctcaatggtctgcaaggtgagaagggcgaccgtggtccaaccggacccattggttttcccggtgccgatggcagtgtgggatatcctggagatagaggcgatgccggtctgcccggagtatctggacgtcccggaattgttggtgagaagggagacgtgggcccgatcggacccgctggtgttgccggacctcctggtgttcctggtattgatggtgtgcgtggacgtgatggcgccaagggtgagcccggcagtcccggattggtcggcatgcccggtaacaaaggtgaccgtggtgctcctggaaatgacggacccaagggctttgctggcgttactggtgctcccggaaagcgcggacctgctggtattcccggagtttccggtaagtttttgcagtatcccattcgaacatttgatgtgaaccatttggtttcatttgttcaggtgccaagggtgacaagggcgctactggcttgactggcaacgatggacctgtgggaggccgcggtcctccaggtgctcctggactgatgggcattaagggtgaccaaggattggcaggcgcccctggacaacaaggactggacggtatgcctggcgaaaagggtaaccaaggattccccggtctggatggacctcctggtttgcctggagatgcctccgagaaaggacaaaagggtgaacccggtccatccggactccgcggcgatacaggtccggccggaacgcccggttggccaggagagaagggtttgcccggtctggctgttcacggtcgtgctggtccgccaggcgagaagggtgaccagggacgcagtggaatcgatggacgagatggaattaacggcgagaagggtgaacaaggtctgcagggcgtttggggccagcctggcgagaagggatctgtcggcgcacctggtattcctggtgctcccggaatggatggtttgcccggcgctgctggtgctcctggtgctgttggctatcctggtgatcgcggtgacaagggagagcctggtctatctggtctgcccggactcaagggtgagactggacccgttggactgcagggcttcaccggtgctcctggccctaagggtgagcgcggtattcgtggtcagcccggtcttccggccaccgttcccgacatccgtggtgataagggatcccagggcgagcgcggctacactggcgagaagggcgagcaaggcgaacgaggcttgactggtcctgctggcgtcgctggagcaaagggagatcgcggattgcagggaccaccaggtgcaagcggattgaacggcattcccggagccaagggagacattggtccaagaggcgagatcggttatccaggagttaccattaagggcgagaagggtctgcccggtcgcccaggcagaaacggacgtcaaggtgagtttgtgatcccatatttgtatttacacaattggttcatataaccatgtcaccaatcaacgttatttaacccattcaggtcttattggagcacccggcttaattggagaacgtggtctgcctggcttggccggagagcccggcctcgtgggcctgcctggacccattggaccagctggcagcaagggagagcgtggtctcgccggcagtcccggacaaccaggacaggatggcttccccggcgcacctggattgaagggagatactggaccgcagggctttaagggcgaacgtggtctgaatggcttcgagggacaaaagggagacaagggtgaccgaggactccaaggaccgtctggactgcccggcttggttggacagaagggagataccggctaccctggcttaaatggaaacgatggacctgtcggagctcctggcgagcgcggcttcaccgggcccaagggacgcgatggacgcgacggaacaccaggtctgcctggacagaagggtgaaccaggaatgctgccaccaccaggacccaagggcgaacctggtcagccgggacgcaatggacctaagggagagcccggacgtccgggagagcgtggcttgattggcatccagggtgagcgtggcgaaaagggtgagcgcggcctgatcggtgagactggtaacgtgggacgacccggacccaagggagatcgcggagagccaggcgagaggggatatgagggcgccattggtttgatcggccagaagggtgagcccggtgctccagcccccgctgctctggactatctcaccggtatcctgattacgcgacacagtcaatcggaaacggtgcccgcttgctcggctggacacacggaactgtggacgggttactccctgttgtacgtcgatggcaatgactatgcccacaaccaggaccttggatcccccggatcctgtgtgccacgcttctcaacgctgcccgtactgtcgtgtggtcagaataacgtctgcaactacgcctccagaaatgacaagaccttctggctgacaaccaacgccgccattccgatgatgcccgttgaaaacatcgagatccgccagtacatctcacgttgcgtcgtttgtgaggcgccggctaatgtgatcgccgtgcacagtcaaacgatagaggtgcccgactgtccgaatggctgggagggtctctggattggctacagtttcctcatggtgagtatcggaacacttataacgttagattatagaagaatgatgagagttttcaaaatccacaagggatgcgtttccgaagtttccctagctttccagcagatggcgcacgttccaacgacactcttgcgccatctgttggatactgcgtagcgaaagatttgatacaatagttttaattttcaacctttattcctaactacttgtgggattttaaatagttcttttataatgatgctaatattaacccaaccatttcctataatagcacactgccgtgggcaacggtggcggtggacaggcgctgcaatcgcctggctcctgtttggaggacttccgtgcaacgcccttcatcgagtgcaacggcgccaagggcacgtgccacttctatgagacgatgacaagcttctggatgtacaacctggagtcctcacagccgttcgagaggccacagcagcagacgatcaaggccggcgagcggcagtcgcatgtgtccaggtgccaggtgtgcatgaagaactcctcgtaggacctccaatcccaacacagacacacccacagcacagagcataagtttaatctaaatgtaaagccttaaaattaccaacgaatcgtgtgcacacccacacgatcacaacacaaacacaaacaaacaaaccaacacacacacacacatacatacaccgacgaaccaacactgctacaaattccttaatctaaccaaaaagaaaaaaaaacggatccacaagtcgaagtgctaattaccgaccgacctggaccacaatgccattttttatctgccaattaatgttctaaacaaatgtaaactgcttctaagttacgttacgtatgttaagtaaatgaaacaaataaataaactagcctcggtcgtatgtccaaaagtataaaataaactatgtgccagcatgttccatttatttttgaaaccgattaaatgcgaaacaatgcaacaaaacgcggtatcgaacgaatatcgaacgaatcgaatcctcaactgctatacaaaacttgtcgcatatcgttttaaaataaactaaaatttataaatacaaattacgaccacaatttcatacaagcctatttagagcaaatattgttgaggataaaaaatcgtatgcccttcagtgataaacttcctgcaagacaaatactgcatactttttacccctaacattgagtgataagatcttcctcaaaagaccagggctaagggtaggctattgtggtggaaaccccgtcgcggagaacccttaaaaaagcaatgccaagccaaggatgagagcgaactcacctcgtgcacttgtgcgcatgccattgcctctctttgtgcggatttgcggtgggggagggggttggttagctgtcaagggggtggcgatgacgattggggtcgccgtggacggtttgcggggcataaagtggggtggaccgagccatatgataatgatatgcagacacacacacgcgcacaaagtccaattggtggttggaagcaggtcgtggaaaataagggtaggcctttgtggggcgattcaagttggaatcgtaaaagtgagttggaaaaaaagtgccagaagccagtgtgacttggacgcaagcggaggcggtcgtcggtgggagttgtaacttcagccagataagaggagctgctttttgtaggtgtggaggagcagcaagacggaaaaaatgtgtgtacctcgaaaaaaaaaacagtgaaaattgcgagctctcgtttggaaagcagcgtgaaatttgcataaactaacaagaccacaaagccaacgggaagtgcaccaccaaaatcagagactcccaagaagcagcagtcttccgccccaccaaaaaaaaaaaaaaaaaaaaggaagaggacacaccaccaccccta

SEQ ID NO: 7412 - DNA, 5944 bp, DROSOPHILA
gctgatctggccagctggttttagtctttagtcagcgctgtggagtggtgatcggttcggatcggatcgctcggttgtgaatgtgtgtttccattagggtcccgtcccgtcccgtccaaccgtcccttaaataggatttgattcctgcccagcgacggcaacatataaacttcaaattcgacgaggacagagcaaataattgtgcaggcttaagtgcatagggcatcatgttgcccttctggaagcggctgctatacgccgctgtgatcgcgggagcgttagtcggtgccgacgctcaattttggaagacggctggtacggccggttcgattcaggactccgtgaaacactacaatcgaaatgaacccaagttcccaatcgacgacagttacgacattgtagactctgccggcgtggcgcgcggcgatctgccgcccaagaattgtacggccggatatgcgggctgtgtgcccaagtgcatagcggagaagggcaaccgtggtctgccgggccctcttggacccacgggattgaagggcgaaatgggtttccctggcatggagggaccatctggtgacaagggtcagaagggtgatcccggcccatacggacagcgtggtgataagggtgagcgcggatcgcctggtcttcatggtcaggctggtgtacccggagtccagggacccgccggcaatcccggagcccctggtatcaacggtaaagacggttgcgacggacaggatggtattcctggcttggagggtctatccggaatgcccggacctcgcggatatgccggccagcttggcagcaagggcgagaagggtgaaccggcaaaggagaacggtgattacgcgaagggcgagaagggtgagcccggttggagggggactgccggtttggctggaccacaaggatttcctggagaaaagggcgagcgcggcgacagtggaccttacggagccaaaggaccccggggtgagcacggtctgaagggagagaagggtgcctcctgctacggacccatgaagcctggtgcaccgggtatcaagggcgagaagggtgagcccgcgtcctcgtttcccgtcaaaccgacccacacggtgatgggacctcgcggcgatatgggacagaagggagagcctggcctagttggccgcaagggtgagcccggacctgaaggcgacactggactcgatggacagaagggcgagaagggtctgcccggcggcccaggcgatcgcggtcgccaaggtaactttggacccccaggatctacaggacaaaagggagatcgtggcgagccgggccttaatggtctgcccggtaatcccggacagaagggtgagccaggacgtgctggagcgacaggtaagcctggtctgctcggtcctccgggaccgccaggcggtggccgtggaacaccaggacccccgggacccaaaggaccccgcggctatgttggcgcacctggaccccagggattaaacggagttgatggactaccgggtcctcagggatacaatggacaaaagggaggtgctggtctgcccggtcgccccggcaacgagggacctcctggcaaaaagggagaaaagggaaccgcaggacttaatggaccaaagggatccatcggacccattggacacccaggaccaccgggaccagagggacagaagggtgacgccggtttgcccggttatggcattcaaggatctaagggagatgctggcatacctggttatcccggactaaagggtagcaagggagagcgcggcttcaagggcaatgctggtgctcccggtgactccaagctgggtcgtcctggaactcccggtgccgctggtgctcctggacaaaagggagacgctggtcgtcccggcactcctggccaaaagggagacatgggtatcaagggtgacgtcggcggcaaatgctcatcgtgcagggccggaccaaagggtgataagggaacgagcggactgcctggaattcccggaaaggatggcgcacgaggaccgcctggagagcgcggatatcccggagagcgtggacacgatggaatcaacggacaaactggaccgcctggtgagaagggagaggacggtcgcactggtcttcccggagcaactggagagcctggcaaacctgctctgtgcgatttgagtttgattgagccattgaagggtgacaagggttaccctggtgcgccaggtgcaaagggcgtgcaaggattcaagggagcagaaggtctgcctggtatccctggacccaaaggagaattcggtttcaagggtgagaagggtttgagcggagcacccggcaacgacggaacacccggacgcgctgggcgggacggataccccggaattcccggtcaatccatcaagggcgagccaggcttccatggaagggacggagcaaagggcgacaagggatcatttggccgaagcggcgagaagggagagcccggtagctgtgcgcttgacgaaattaagatgcccgccaagggtaacaagggtgagcccggccaaaccggcatgccaggacctccgggagaagacggcagcccgggagagaggggctataccggattgaagggcaacactggaccacagggacctcctggcgttgaaggaccccgcggcttgaatggacctcgcggtgaaaagggcaaccagggcgctgtcggagtacctggtaatcctggcaaggacggccttcgcggcattcccggacgcaatggacagcctggaccgaggggagagcctggtatttcgagacccggccctatgggcccacccggtctcaatggtctgcaaggtgagaagggcgaccgtggtccaaccggacccattggttttcccggtgccgatggcagtgtgggatatcctggagatagaggcgatgccggtctgcccggagtatctggacgtcccggaattgttggtgagaagggagacgtgggcccgatcggacccgctggtgttgccggacctcctggtgttcctggtattgatggtgtgcgtggacgtgatggcgccaagggtgagcccggcagtcccggattggtcggcatgcccggtaacaaaggtgaccgtggtgctcctggaaatgacggacccaagggctttgctggcgttactggtgctcccggaaagcgcggacctgctggtattcccggagtttccggtgccaagggtgacaagggcgctactggcttgactggcaacgatggacctgtgggaggccgcggtcctccaggtgctcctggactgatgggcattaagggtgaccaaggattggcaggcgcccctggacaacaaggactggacggtatgcctggcgaaaagggtaaccaaggattccccggtctggatggacctcctggtttgcctggagatgcctccgagaaaggacaaaagggtgaacccggtccatccggactccgcggcgatacaggtccggccggaacgcccggttggccaggagagaagggtttgcccggtctggctgttcacggtcgtgctggtccgccaggcgagaagggtgaccagggacgcagtggaatcgatggacgagatggaattaacggcgagaagggtgaacaaggtctgcagggcgtttggggccagcctggcgagaagggatctgtcggcgcacctggtattcctggtgctcccggaatggatggtttgcccggcgctgctggtgctcctggtgctgttggctatcctggtgatcgcggtgacaagggagagcctggtctatctggtctgcccggactcaagggtgagactggacccgttggactgcagggcttcaccggtgctcctggccctaagggtgagcgcggtattcgtggtcagcccggtcttccggccaccgttcccgacatccgtggtgataagggatcccagggcgagcgcggctacactggcgagaagggcgagcaaggcgaacgaggcttgactggtcctgctggcgtcgctggagcaaagggagatcgcggattgcagggaccaccaggtgcaagcggattgaacggcattcccggagccaagggagacattggtccaagaggcgagatcggttatccaggagttaccattaagggcgagaagggtctgcccggtcgcccaggcagaaacggacgtcaaggtcttattggagcacccggcttaattggagaacgtggtctgcctggcttggccggagagcccggcctcgtgggcctgcctggacccattggaccagctggcagcaagggagagcgtggtctcgccggcagtcccggacaaccaggacaggatggcttccccggcgcacctggattgaagggagatactggaccgcagggctttaagggcgaacgtggtctgaatggcttcgagggacaaaagggagacaagggtgaccgaggactccaaggaccgtctggactgcccggcttggttggacagaagggagataccggctaccctggcttaaatggaaacgatggacctgtcggagctcctggcgagcgcggcttcaccgggcccaagggacgcgatggacgcgacggaacaccaggtctgcctggacagaagggtgaaccaggaatgctgccaccaccaggacccaagggcgaacctggtcagccgggacgcaatggacctaagggagagcccggacgtccgggagagcgtggcttgattggcatccagggtgagcgtggcgaaaagggtgagcgcggcctgatcggtgagactggtaacgtgggacgacccggacccaagggagatcgcggagagccaggcgagaggggatatgagggcgccattggtttgatcggccagaagggtgagcccggtgctccagcccccgctgctctggactatctcaccggtatcctgattacgcgacacagtcaatcggaaacggtgcccgcttgctcggctggacacacggaactgtggacgggttactccctgttgtacgtcgatggcaatgactatgcccacaaccaggaccttggatcccccggatcctgtgtgccacgcttctcaacgctgcccgtactgtcgtgtggtcagaataacgtctgcaactacgcctccagaaatgacaagaccttctggctgacaaccaacgccgccattccgatgatgcccgttgaaaacatcgagatccgccagtacatctcacgttgcgtcgtttgtgaggcgccggctaatgtgatcgccgtgcacagtcaaacgatagaggtgcccgactgtccgaatggctgggagggtctctggattggctacagtttcctcatgcacactgccgtgggcaacggtggcggtggacaggcgctgcaatcgcctggctcctgtttggaggacttccgtgcaacgcccttcatcgagtgcaacggcgccaagggcacgtgccacttctatgagacgatgacaagcttctggatgtacaacctggagtcctcacagccgttcgagaggccacagcagcagacgatcaaggccggcgagcggcagtcgcatgtgtccaggtgccaggtgtgcatgaagaactcctcgtaggacctccaatcccaacacagacacacccacagcacagagcataagtttaatctaaatgtaaagccttaaaattaccaacgaatcgtgtgcacacccacacgatcacaacacaaacacaaacaaacaaaccaacacacacacacacatacatacaccgacgaaccaacactgctacaaattccttaatctaaccaaaaagaaaaaaaaacggatccacaagtcgaagtgctaattaccgaccgacctggaccacaatgccattttttatctgccaattaatgttctaaacaaatgtaaactgcttctaagttacgttacgtatgttaagtaaatgaaacaaataaataaactagcctcggtcgtatgtccaaaagtat

SEQ ID NO: 7413 - protein, 1779 aa, DROSOPHILA
MLPFWKRLLYAAVIAGALVGADAQFWKTAGTAGSIQDSVKHYNRNEPKFPIDDSYDIVDSAGVARGDLPPKNCTAGYAGCVPKCIAEKGNRGLPGPLGPTGLKGEMGFPGMEGPSGDKGQKGDPGPYGQRGDKGERGSPGLHGQAGVPGVQGPAGNPGAPGINGKDGCDGQDGIPGLEGLSGMPGPRGYAGQLGSKGEKGEPAKENGDYAKGEKGEPGWRGTAGLAGPQGFPGEKGERGDSGPYGAKGPRGEHGLKGEKGASCYGPMKPGAPGIKGEKGEPASSFPVKPTHTVMGPRGDMGQKGEPGLVGRKGEPGPEGDTGLDGQKGEKGLPGGPGDRGRQGNFGPPGSTGQKGDRGEPGLNGLPGNPGQKGEPGRAGATGKPGLLGPPGPPGGGRGTPGPPGPKGPRGYVGAPGPQGLNGVDGLPGPQGYNGQKGGAGLPGRPGNEGPPGKKGEKGTAGLNGPKGSIGPIGHPGPPGPEGQKGDAGLPGYGIQGSKGDAGIPGYPGLKGSKGERGFKGNAGAPGDSKLGRPGTPGAAGAPGQKGDAGRPGTPGQKGDMGIKGDVGGKCSSCRAGPKGDKGTSGLPGIPGKDGARGPPGERGYPGERGHDGINGQTGPPGEKGEDGRTGLPGATGEPGKPALCDLSLIEPLKGDKGYPGAPGAKGVQGFKGAEGLPGIPGPKGEFGFKGEKGLSGAPGNDGTPGRAGRDGYPGIPGQSIKGEPGFHGRDGAKGDKGSFGRSGEKGEPGSCALDEIKMPAKGNKGEPGQTGMPGPPGEDGSPGERGYTGLKGNTGPQGPPGVEGPRGLNGPRGEKGNQGAVGVPGNPGKDGLRGIPGRNGQPGPRGEPGISRPGPMGPPGLNGLQGEKGDRGPTGPIGFPGADGSVGYPGDRGDAGLPGVSGRPGIVGEKGDVGPIGPAGVAGPPGVPGIDGVRGRDGAKGEPGSPGLVGMPGNKGDRGAPGNDGPKGFAGVTGAPGKRGPAGIPGVSGAKGDKGATGLTGNDGPVGGRGPPGAPGLMGIKGDQGLAGAPGQQGLDGMPGEKGNQGFPGLDGPPGLPGDASEKGQKGEPGPSGLRGDTGPAGTPGWPGEKGLPGLAVHGRAGPPGEKGDQGRSGIDGRDGINGEKGEQGLQGVWGQPGEKGSVGAPGIPGAPGMDGLPGAAGAPGAVGYPGDRGDKGEPGLSGLPGLKGETGPVGLQGFTGAPGPKGERGIRGQPGLPATVPDIRGDKGSQGERGYTGEKGEQGERGLTGPAGVAGAKGDRGLQGPPGASGLNGIPGAKGDIGPRGEIGYPGVTIKGEKGLPGRPGRNGRQGLIGAPGLIGERGLPGLAGEPGLVGLPGPIGPAGSKGERGLAGSPGQPGQDGFPGAPGLKGDTGPQGFKGERGLNGFEGQKGDKGDRGLQGPSGLPGLVGQKGDTGYPGLNGNDGPVGAPGERGFTGPKGRDGRDGTPGLPGQKGEPGMLPPPGPKGEPGQPGRNGPKGEPGRPGERGLIGIQGERGEKGERGLIGETGNVGRPGPKGDRGEPGERGYEGAIGLIGQKGEPGAPAPAALDYLTGILITRHSQSETVPACSAGHTELWTGYSLLYVDGNDYAHNQDLGSPGSCVPRFSTLPVLSCGQNNVCNYASRNDKTFWLTTNAAIPMMPVENIEIRQYISRCVVCEAPANVIAVHSQTIEVPDCPNGWEGLWIGYSFLMHTAVGNGGGGQALQSPGSCLEDFRATPFIECNGAKGTCHFYETMTSFWMYNLESSQPFERPQQQTIKAGERQSHVSRCQVCMKNSS

SEQ ID NO: 7414 - DNA, 5110 bp, DROSOPHILA
ccgacatcagccccatcaacgaccgcgaggagctgaccgaggaggtgatgcgctacctgccctacctggaggtgaatccatcgagcgacgggctcacccttaaggtggagtcgtccagcctgctgggaaaaccgctaaacgagcccgtcttcgactccgaagacaacattgtgaacgacgccaacttgcactcggccagccatcaaatacctccatatgtgcctgacagccacgactgcttcgcggaggactgcggcggcgacagctcctcgcaccaggtggaattcgaggtggtgcggccccagacggtgaccatgaccatgacctgcacgctgccctacggcggaccggacgctgggcacaccacattccaggccgacgacttcaacgcgatcccgtcggccgccgaggacagcgaatgcagcattctgaccacctccaactcgccgcagattggcttcaacgggagcagcttcgtggaggcggacgccatcgggagcacttgtacatacgcgcaacaagactacaccggaagtgtaattgaaacacacaatgatctcaactacgccgcacacgataacaacggagctctgctagcctacacatttgaggacttgccgcctcagccaaccggtagtcatttagagtttaacactaacaaatacgagtttgcaagttattataaaatgtgagagatatttaagtttgtgtaatttataactaatctaattgtacgtttataattttacaccaaattatatattaaatatgtatatgtatgcagataataccatatattccataaattctatatacatacaaaaaacgcgagaataaatgctttgcattgaaaatatttacgtcggagcagtctcatttactgcgtagtggaatgatcgctgatcgctggttcctgctatgcgcgacgaatgggaaggagattaaccttgcggcgatcagctaagtgctcccaaatccattcaataggatctccagcggctctcgcgaattatctacatatgtttatttacacgttacacaaatatgttatataaatcattggtggccaacaaaaggggatacagaatgaggctaaaccatcattagttgttgcacacgataaaataatccagacagtaaggtagtatacattcgtttctctttccgcggccgatttcctggctctcgacgagcgctgattacaaggtgctcgcctcgatatgtgggatattgtgtaggccggagtcgggattggaccagaagtagtagggggcgccctggctgaagcagaacttcatgtttagtgtctccccgtgatccacgtagtacatgagatagaagttgcacatctcgtcctcgttcgtgggactgtcatcaataaatagttggattaggagtggtgctagagctgcgtttcaaatcactgcgtacttaccctattttggtagtccgatggcgagtgctctgcatagtacacctcacggcgatcttatctccctcgattatggggtctgtgttgctggtgttatagaacatctggggcgtgaggggatctctcttgcccagctgcagccactcctgttcgccgtcgctgtttgtcctcacccggtagccggaaacgacctttcccaggccgtgggtgtgcacccggtacgcaaaaggatgcagcaccttctgctcgttcacctcgcaggccgtttccaggtgctccgtcttcatcgccggaatctgtccgtcagtgcccagcagcagagtgccagccagctttttccgactgccaggatggtactgattattttgaaaatcacgcatattaaacgaaaggaacttacggctcttctgtgtaatccaaaaacacaccagaatcatcagtggagccatctgaagaaaaacacatttaaatttccttatattgaacgcaatctattacttacctttgaacttatcaatgtgcgcgtagtgaacttgcagcacaaggtacttgattggcgagttcttgcccaccttgaaacccactccctcgggcagatttaacttttgggcgtctctggcccaagcgtatacgatctgttgagaggtaagtgttagtccagtaggtgaaattgtctattagcacatttggcagttagttaaaggaaaaactcgataaacaggttcaaaactcttattaaactgtgctgactgtcaaggattgacctattaaaacttagccagttaactcctaattatccgcgcatttcgatctttattcatatgccacatcaatcgttttgaaatgttactatatatgagttcgatttttgtgtcaagaacaagacaaaatttgactttaaaactatctttccgatttttccttaaaatttataatttgtctatcagaaagctgcctagtatgtccgcttcaatttgctgcagatgcaacgagaagatttggccacgggcagtttgcagcttgggtaagacgtaccatccgcaccacttcacctgcaaggagtgcggcctggtggttgatcctaaactgtttttcgcggtggacgacgacgtggtctgcagcgagtgctatctggacaagcatgccgctcggtgctccgcctgccggactccgatcctagagcgcggcgtggctgctgcggagcgcaagtggcacgaaaagtgtttccggtgcgtgagctgcagcaagtcgctggtctcggcgagcttctttgaagtcaacggatacctgttctgcaaggcgcacttccgggaactgttttcgtcccgctgcgcaggctgtgagaagccaatcgatcgtcgagccgtggtcgcgctgagcaccaagtggcatgccaagtgctttaagtgccaccactgccgcaaaaggatcagcgcacgggaattctggatcgagaacggtcaacccatttgcgcagcctgccaaactgtagtcccgagtccccgaaatttgtcggcccaataaatgtgtggtgtctatctgggggcctatttggacatttctttttcttttaatacctgggaattggagtggggtccgcaaggactggcagactcttcttgggaagctcggttcatctcgccacagttcctgtgagcaaaaatgtgcgtgttatttactagtctgaaaacatcacttgcaactcaccaggtggtcttcgaggttccgggctctccgcatccgtagagcagcatatggtgggccgtgttcatcgtggcattaggattgaagccaactatttaagatagaaaggttagttgaagtatttaaggaatgaatctcattcgaaaggacgtaccaatatagtaggtggtagttgggtcgaccttgatgggcgtgcacaagtacagatcgggctatatatgtacacatatatatatttgttagttttgttagagagaacaggcatattggataagtcaacaagtattattcaaatgggagtatggccttcagtgggccgtttgccctttttcgccaccctcgtaaaaacaaattcgtatctacggcgcaggttcgagaagtgcaatctacaggtttcggtttcagggccttacatgtgggtggcgaattgtgtgtattcgggtacaactgaacatatggaaaaatttgcacagtactcttatgggttttccccgcgcggaagatacgggaaaaaccagagcctatatcgaggacttttctaatctgattggaattgtatgcgcacagctgcagctgggcgaatctgttcatccatatggagcgaactccatgatgtatatgtatggcgtttttcaggaacctggacttacggtctggggcgaaacgttgggcatcaggaatggaaacgaagccgttgcgcctgttgcggagttcgactcgagattctgttgataaagggagttttggtaatccccctctttcacaaggccatccacactgatcactccgataagcaggagcagccccacggaagcggctatttcggatatgcgtggcattttcaccgtattcgaactatattcgagtgtgcactgcactgaatactttgtggaaaacgaaaaaaaaccttcctgtttggaagaacaatacgttttgtattgctctctccgatatttttccacacgtagctaggcccagtttatatgtaagtaagtgcgttctaggcagcaatcgatacccagagccattatatcgatgacggcgccagggctgcaggctaagggttagcgggacattcaaatatatataacttgttcgcattaaagtacataaaaccaagtgtaattttcaacctttcgaatacagtgatttaaagacacctcaacgcaaaaggaaaccccacaaaagccagcccaattcaacgtgtctgcgttccgttcgacccactggggaattccccttttcgcatgcgccattcaattgattttctacgagcagagttcccaatgtttacggtgcgctcatttggttgtagctgtaggcctcgagttggaaccgctgggacttggaaaacatacgacgcttaaatggaggatcagggcgacgtgacagaccaagccgctggtaagctgagtagttcgaatgcccagtgctccagaaaccgatgtgctaatggtaaagctatatagatgtacactcaagagcggtactaaattatttacaaaaaatcgtgtaattcccagatgaccccattatgggcagccacagtcagagtcgccagaactcgtccggcatgctgaacatgatggacgccagctccttcagcatgcccccccccaatctgcactcctcaaaggtgatcaacccgaacaaggcgatattcacaatcgacgcgaacacagggcaaatttttatagtgaacaacaaggcctgccagctgctgggctacacgtcgcaggagttgaggaacaagggattcttcgacctgcttaacggcaagacagagagccacatctcctccctggcggagatgcagatcgaaggcgatgagggccgggtcgtcctgctaagtggaaaggtcatcgagatgaagaccaagtcgggcggcaagatcctggtctctctctggatccggcagatcagcagcgatggccgacacatagccgtcgcggagcctgtggagaggcatatttg

SEQ ID NO: 7415 - DNA, 1432 bp, DROSOPHILA
gcctagctacgtgtggaaaaatatcggagagagcaatacaaaacgtattgttcttccaaacaggaaggttttttttcgttttccacaaagtattcagtgcagtgcacactcgaatatagttcgaatacggtgaaaatgccacgcatatccgaaatagccgcttccgtggggctgctcctgcttatcggagtgatcagtgtggatggccttgtgaaagagggggattaccaaaactccctttatcaacagaatctcgagtcgaactccgcaacaggcgcaacggcttcgtttccattcctgatgcccaacgtttcgccccagacccccgatctgtacttgtgcacgcccatcaaggtcgacccaactaccacctactatattgttggcttcaatcctaatgccacgatgaacacggcccaccatatgctgctctacggatgcggagagcccggaacctcgaagaccacctggaactgtggcgagatgaaccgagcttcccaagaagagtctgccagtccttgcggaccccactccaattcccagatcgtatacgcttgggccagagacgcccaaaagttaaatctgcccgagggagtgggtttcaaggtgggcaagaactcgccaatcaagtaccttgtgctgcaagttcactacgcgcacattgataagttcaaagatggctccactgatgattctggtgtgtttttggattacacagaagagcctcggaaaaagctggctggcactctgctgctgggcactgacggacagattccggcgatgaagacggagcacctggaaacggcctgcgaggtgaacgagcagaaggtgctgcatccttttgcgtaccgggtgcacacccacggcctgggaaaggtcgtttccggctaccgggtgaggacaaacagcgacggcgaacaggagtggctgcagctgggcaagagagatcccctcacgccccagatgttctataacaccagcaacacagaccccataatcgagggagataagatcgccgtgaggtgtactatgcagagcactcgccatcggactaccaaaataggtcccacgaacgaggacgagatgtgcaacttctatctcatgtactacgtggatcacggggagacactaaacatgaagttctgcttcagccagggcgccccctactacttctggtccaatcccgactccggcctacacaatatcccacatatcgaggcgagcaccttgtaatcagcgctcgtcgagagccaggaaatcggccgcggaaagagaaacgaatgtatactaccttactgtctggattattttatcgtgtgcaacaactaatgatggtttagcctcattctgtatccccttttgttggccaccaatgatttatataacatatttgtgtaacgtgtaaataaacatatgtagataattcgcgaga

SEQ ID NO: 7416 - protein, 365 aa, DROSOPHILA [sequence omitted]

SEQ ID NO: 7417 - DNA, 2774 bp, DROSOPHILA
agaaatattacattttttgtcgagtgcacagcccaaatttagatcgctttcttgtatcacaagcgtttgatgaaagggtaagagtgtttcgactgcaactttgatcccaactgctgtcaatattcaatgcctttgtgatggtttcgtttttatttgtctggccgtccccttacttattatagtacgcttggtattcatgatacagcacacacttgtgggattttgtctgcgccgctctgcgatgttatgtatcattgttttgaagcttatgctaatgcaccggactgatcggaagcacgtgtcaaatgcagatgggtcagaaaaaatattaatgaaggttcataacattacaggatataaaagtggatacgcagttttaaagacagtgaaagtcccacgacatggtcttttaagtttgtttcttttgccttcgcatcattttctttcatttgatggatcacattttatatcaaattcccttccaagatctcactctcctttatttttcgctttcaatgcaaacgacattcgacaaaagtggaagtgcattcaaaatctttttttttagccatgacaaggatcttgcagatctgagatttaaaattttcccaaaaggaaaaaatgcattatgtagacggacacaaaggacaaagagtgtgtgggagagggaaaaggatgggtaggtaggcacacagagactgagtaggaatagaggcacccaccacagaaaaagaacccctagaaagagaggaaaaatgtacgatcacttgtgcaaaggacttaggtcccggtttttcgagggcaggtagccaggatccgaccccgtaccaacccctgtagctcctctgccgaagtcgctgcctctgtcgcggcgcgtttccctctgccactgccgggtatttaaagccctagatcagaacagcaattatcattgcggaatctgattccacacagtcaacatctgtaaactaaatcttagaaaactctcgcaaggattaccatgacgagcatttgcagcagcaaattccagcagcagcattaccagctgaccaacagtaacattttcttgctgcaacatcagcatcaccatcaaacgcagcagcaccagttgattgctccgaaaatacctttgggtaccagccaactgcagaatatgcagcagagtcaacagtccaatgttggacccatgttgtcctcccagaagaagaagttcaactacaataacatgccctatggcgagcaattgccatcggtagccagacgaaatgcccgtgaacgcaatcgcgtgaagcaggtgaacaatggattcgtcaatctccgccagcatttgcctcaaactgtggtaaactcgctgtccaatggaggacgtggtagcagcaagaagttatccaaggtggacacactgcgaatcgccgttgaatatattcgaggactacaggacatgcttgatgatggcactgcttcatcaactcgtcacatctacaattccgccgatgaaagtagcaacgatggcagcagctataacgattacaacgatagtttggacagttcgcaacagttcttgacgggagccacccagtctgcccaatcccactcgtaccactccgcctcgcccacgccgtcgtactccggatccgagatttccggaggtggctatatcaaacaggaactacaagagcaggacctcaaattcgactcctttgatagcttcagtgacgagcagccagatgacgaggagctactcgattatatttcatcttggcaagagcagtgaaggggtcttactaaaagtcccaaacaaacaaatattgtacaaactgtaaataccctaaattgttgccttagtgagtgtaaaaccaagtctcaaatttcacattagcctctaagttaccccatatttttttttattatattttaacgcaatggaagacatatttttttcatagttataagtttgttataagcatggaagacactaaactaactacttttaagccaaaataaaaacatattgataaatttaattccaaatgttttttactgaaatcacttactcgtaaatatattcagatcgtcatgtagggtaattacaacgagttctcgttctcataccagcatcagagccaaaaaggtttttaaacaatctgcattttgaagcattgctttgactatatatatgttatgatattcgtttttaatttatgtatttttatattattattattattttttagcttagctgttttggcctcaggcttaataatggtactagcgatagaaataataatttcacaaaaaagttacccaatttattatttatattcaattacttttggagcgtggacatgactcactcaaaattcgtaaccaacatagagttaagcacctgacaggaaacaacagcgaatattttcatgattggttccctaacgagctacaattcggccgggaattgttaatggcgcgtaaatagcccggaaataggcagtcacgcctgagaggatgaaattgtcctagtccaaggatcagtacttgaagactcgcacaatccacgtggctggcgcacaccgccacaaagtttttcatcaagctggacgacgtcggcgagccgtgaaatgcacttccgctaaccccgtagctaaaaattggaaagtaaacccaccccaagggtgaaatattagggccattaaatgaatatgcaggaatgtcatctaggcaggagatgccacacccattatttagcatacaatatgcaaattgccaattgcgctgga

SEQ ID NO: 7418 - DNA, 774 bp, DROSOPHILA
atgacgagcatttgcagcagcaaattccagcagcagcattaccagctgaccaacagtaacattttcttgctgcaacatcagcatcaccatcaaacgcagcagcaccagttgattgctccgaaaatacctttgggtaccagccaactgcagaatatgcagcagagtcaacagtccaatgttggacccatgttgtcctcccagaagaagaagttcaactacaataacatgccctatggcgagcaattgccatcggtagccagacgaaatgcccgtgaacgcaatcgcgtgaagcaggtgaacaatggattcgtcaatctccgccagcatttgcctcaaactgtggtaaactcgctgtccaatggaggacgtggtagcagcaagaagttatccaaggtggacacactgcgaatcgccgttgaatatattcgaggactacaggacatgcttgatgatggcactgcttcatcaactcgtcacatctacaattccgccgatgaaagtagcaacgatggcagcagctataacgattacaacgatagtttggacagttcgcaacagttcttgacgggagccacccagtctgcccaatcccactcgtaccactccgcctcgcccacgccgtcgtactccggatccgagatttccggaggtggctatatcaaacaggaactacaagagcaggacctcaaattcgactcctttgatagcttcagtgacgagcagccagatgacgaggagctactcgattatatttcatcttggcaagagcagtga

SEQ ID NO: 7419 - protein, 257 aa, DROSOPHILA
MTSICSSKFQQQHYQLTNSNIFLLQHQHHHQTQQHQLIAPKIPLGTSQLQNMQQSQQSNVGPMLSSQKKKFNYNNMPYGEQLPSVARRNARERNRVKQVNNGFVNLRQHLPQTVVNSLSNGGRGSSKKLSKVDTLRIAVEYIRGLQDMLDDGTASSTRHIYNSADESSNDGSSYNDYNDSLDSSQQFLTGATQSAQSHSYHSASPTPSYSGSEISGGGYIKQELQEQDLKFDSFDSFSDEQPDDEELLDYISSWQEQ

SEQ ID NO: 7420 - DNA, 3457 bp, DROSOPHILA
tcgtgactattcagcggatttggttttggccaacatgttttcggatattgcaacacaacattgcttgctgcactgaattgctgctgctgcagcagagtgttgctgttgttgctgaagcattctgttgttgttgttactgttgttttgttgctgctgctttagttgtgctgttgttgctgttatcagtgaagcagacaaaagctttcagctttcgacgccagcagcaacagcaacagaaacaaacggcaacaaaaacacaaacaagcagcacaaacagccagattgcctgttatttttatggccgctgccattgtcgctgctgtggctataataatatgaaaagtaaacaaagttgctggctgtcgtcgtttcgccgccgagttgtcaacatcaacgcaacgcaatgctttcctatcctatccagctagccaaactgtactgaatataatggcaactacagctacaactacaactacaacgacaacaacggccacggctacaacaatgttttattaagtttcacgaaatatatatgagcgaaaagctctatgcctcgtttgctgagacagcagcaacagacagcggaacagaactgaacagaacacaactgaaccgaactgaacagaaaccaacacacaaacaaataacacgacaaaacgaaaagaaaccgaacacaaaaccccagcagaaaaggcaaaaaagctgaaaaagagtcgttgagaattctgtttgtttgccagctcaaaaataaataggattgtatataaatacatatgtatgtatggtacatacatacatcgataggaaagtctaaaaatcaaatattggagtggctaacttaacttgaagttgccatttcttgagatcataacgtgcaacatgacagcaaacccgttcaaacccctggtaatcgctgtttattttaacatttctctaaatagacttcaaatttaaaacgtatcttttagtggctctgtgagggacgataccgccaacgaatatgaccacctcaacccgcagcagcagcaacaaccacagcagcgagcacgaggagcgaacctccaacggcaccaccgcctacaaccaccacagtccaacgggttcgggatccggaacagcaggcgcctctattggatccaccaaccgagtgatgcaggcggacgaggacttcaacatccgcttcgtcaacctggtgcgcacccacaagtgtctctacgacaagaaggtgcccgagtaccgcaacaggtgagtggcgagtccatcggctgccagaagatacgatccagatcgttccgtacgttcagtcttaactaatttaaataactttttacagggataatcaggaaaaggcttgggtgcttatttcaaaggagacaagagaaagcggtaagcaataataggaaaaacattaatcccttaaattaatcagaactttcataatctttagtgatccattgcaaggagcgatggcgaaaccttcgggcctgcctatcccgctacataaagcagcaatccggatcggagccgcagcacaagccatactacctgaccgagcacatggcgttcctgctgcccttcctgaagtccagccgtaactctttggaggggaacaacagtctggccactctgtaccagatgtcccagcagcatttgcagcatcaaccatttctcctgcatccagcactccatgcgaccgaggagcacaagtactgcgccaacactagcatcaataataataataataacaacgacgtccataatggtgagagtatggaggtcttggagatgaagtactcgatatcggagaaggacgatgaggagaccatcgacgcctttgatcccgcggttaccaacaccctgggtatgaatcgtacttcgtccacgcccactcgcagttctgcccttcaaggaggcggaggcaattcaccggccagaagcgataccgctagtgcggatagcatgaaaaacttcattccagatgtgcagctggccgagacgggctcgcaactcatctacagcgatggtggacatggcacaccaccgcctctgcactaccatccgcactcgcatccacatcctttgacattgtccatggatcatcacccagcatcctacgaaccggggagcacgaaaagaatcaagacggaatgcgaggccaccagcacgatgacgaatgcaggaagtatttacggcggactgagttcgtcggaagtggcggacatggagttcttccgcagcattctcccagatctggcgactctcactccacagcaacgtcgcaagttcaagattggcattctggagctaattgacgacgttgtaacccgatatcccgcccaggatcacagcaacggaggaggcgtatctggcgtagtcaacggaagtggcggtagcagcaatgggggatctgttaagcatcaaaggcgcagctctggacgcgattggaggaaacaataaaggaatagaaagtgtatcggaaagtcactaatccttaactagggataggataagtttagttagaagcttaagggggatctgaagctggaatgggtactaattcgaatctgagctacttcagtccgctcactgttaatgtgttgtgtctactcaataagatgggtatgttttcaaaggccttcaattctttcaagtccgcgaattgtttcgattttgaccaaccattatgaatggtccatttacaaagagctgcaagaacttgcatgaccaaatatatacatatatatatgaacaactaatatatacatttaaagctattccgaaatcgaacacattcaacgaacaagaagtaatgaggtctccttataagccatttagttctgacgtagcagttaaggaattgtgaaaatagatttcaagattttagaaaatggctgcttcgaaaatatgttagtttaaggacactgtatatacgctgctattgaaacctaaactatagaatctgtgtacaaatgaatttccgtttgagtaaacaaagagggataaagagatagatcgatatcaaactgctgtgtgtaataataaacaaatgaaagtatggaaaattacacggtaaactttaatttaattgtcgacaacttcaacagagggctttttattgggccttgccccattttttaggcagcgatggaccacaataggtttcctttctgagagaaatgcacaaggacacgacttatcttcgcactaaaagctaaatttcgttagcggctctacggaggctgggatcggattggatcggatctacaacttcgaggagccagtcttggggtagaacttcttcgacgggtccttagccatgtcgagcagggtctgagcgggcttgaagggagctccgtacagctcagcataggattgcatcttgctgaccagtttgccggctccatactgatcgacccagcggaagggaccaccggagaatggcgggaagcccaggccg

SEQ ID NO: 7421 - DNA, 1308 bp, DROSOPHILA
atgaccacctcaacccgcagcagcagcaacaaccacagcagcgagcacgaggagcgaacctccaacggcaccaccgcctacaaccaccacagtccaacgggttcgggatccggaacagcaggcgcctctattggatccaccaaccgagtgatgcaggcggacgaggacttcaacatccgcttcgtcaacctggtgcgcacccacaagtgtctctacgacaagaaggtgcccgagtaccgcaacagggataatcaggaaaaggcttgggtgcttatttcaaaggagacaagagaaagcgtgatccattgcaaggagcgatggcgaaaccttcgggcctgcctatcccgctacataaagcagcaatccggatcggagccgcagcacaagccatactacctgaccgagcacatggcgttcctgctgcccttcctgaagtccagccgtaactctttggaggggaacaacagtctggccactctgtaccagatgtcccagcagcatttgcagcatcaaccatttctcctgcatccagcactccatgcgaccgaggagcacaagtactgcgccaacactagcatcaataataataataataacaacgacgtccataatggtgagagtatggaggtcttggagatgaagtactcgatatcggagaaggacgatgaggagaccatcgacgcctttgatcccgcggttaccaacaccctgggtatgaatcgtacttcgtccacgcccactcgcagttctgcccttcaaggaggcggaggcaattcaccggccagaagcgataccgctagtgcggatagcatgaaaaacttcattccagatgtgcagctggccgagacgggctcgcaactcatctacagcgatggtggacatggcacaccaccgcctctgcactaccatccgcactcgcatccacatcctttgacattgtccatggatcatcacccagcatcctacgaaccggggagcacgaaaagaatcaagacggaatgcgaggccaccagcacgatgacgaatgcaggaagtatttacggcggactgagttcgtcggaagtggcggacatggagttcttccgcagcattctcccagatctggcgactctcactccacagcaacgtcgcaagttcaagattggcattctggagctaattgacgacgttgtaacccgatatcccgcccaggatcacagcaacggaggaggcgtatctggcgtagtcaacggaagtggcggtagcagcaatgggggatctgttaagcatcaaaggcgcagctctggacgcgattggaggaaacaataa

SEQ ID NO: 7422 - protein, 435 aa, DROSOPHILA
MTTSTRSSSNNHSSEHEERTSNGTTAYNHHSPTGSGSGTAGASIGSTNRVMQADEDFNIRFVNLVRTHKCLYDKKVPEYRNRDNQEKAWVLISKETRESVIHCKERWRNLRACLSRYIKQQSGSEPQHKPYYLTEHMAFLLPFLKSSRNSLEGNNSLATLYQMSQQHLQHQPFLLHPALHATEEHKYCANTSINNNNNNNDVHNGESMEVLEMKYSISEKDDEETIDAFDPAVTNTLGMNRTSSTPTRSSALQGGGGNSPARSDTASADSMKNFIPDVQLAETGSQLIYSDGGHGTPPPLHYHPHSHPHPLTLSMDHHPASYEPGSTKRIKTECEATSTMTNAGSIYGGLSSSEVADMEFFRSILPDLATLTPQQRRKFKIGILELIDDVVTRYPAQDHSNGGGVSGVVNGSGGSSNGGSVKHQRRSSGRDWRKQ

SEQ ID NO: 7423 - DNA, 4275 bp, DROSOPHILA
agcccctcttgaccgcacaccagacttgttgttgtctcgcttacacataaaaaacagcgcttacatgtttacaactatttttacaaatggaaattttgtcaatctgtcttaacttcttggtaaatagtagatatattcataataaatgaaatagtctacattttaggccaacatagttttcttgctgtgcacttaatcgccttgtctatttaagcgatttgaaaacaaaaacgtgctacgaattggaatgcgaaaggagaggtagagagacgaagcgaaagagaagaagaagaccgcagaaggcatcgaagcgagcgcggcttaagaacgtgtgagcaaaacaaacgggccgagggaaaagagaaaaaaaaaacgtttcaagtgaaagtcgaacacaaaaacagaaaaggagaaggcgaacagagaaaattggtaaaaaatgaaattgaagccaagccaagttgctcttctctttggtatgttggccacaacaacaaatacaaccaacgactgcgacgccgactgagagccgctgtaaccaattagggtggtccttaataggcttgttgagaaaatacccgacacctttatattaagagaatattacattactcatacgacccgtagccccttcttaaataatatctataaaaattaaatcataataacatgtaaaacaatacatttcgaaaccataaagcagttaagactctgtaaaagtatgcaaactgattataaaaaatgtttggcaacactgcgtatgagtgattactaatacgcataggttccccattccacttagcacccctttctaaataaattccgttttgtgatatttattatcatcgtccaagcaacaaaatatgtaatttagctacacaaagatggcaaacaggtccaccctagtacatatccaaccgcggcagaggcagcatgttaataacagacgcctcggaataattttatttcaggttatttctgacgcgttaacacggctcggaaccgctggatatcgaagtcaggcgctgagcaattggactccacggcagtcagttgcccaagatcgcgcgagaggcttagacacacggagggagtagcccagtaactagactttcatatcacccgtactaactgatagagcaaatatagtcggccgcccatgggaaatgagcgaaattgccacctgactgacatccccctaaaaagttgttagttgttattacagcattccaaaaaaacatatcttttcatacgggtaagtctttggtgggctaatcgttaaatcgtttttttttttcagtgctatgtacaaaaatcgaattgaatttccattttgataaatcaataacttatttggctgaaggaaaaagttcaggtgttaattccatttgccatagagaaagttctttggctcgaaatttgaccgacttacacacattcccttaattcaattatatttgaataattgatattgttttaggtttctataaaaactatgagcagcttaatgttaataaaattaaattaattctcgcacacttatcattcccatgcataaacgatcattcgaagtgaatacaagctagcttagaatagtttatgaatttttaattcggtctgtaaaacaattactcgttaagtttccaataccaaccggtatccaaagtctaagcgctcaatttgattgagccatttttgcattgtcatggtgtgacagcaacgaacgaattaagtgaattacgagaaaccagttgtttagttgctcaggtgcaaaaccacccgagatttcggggtcaggggggcctttaacttgctaactcacctaaccgacccctccacgtccctccccgccggtggtgaccgtcgcctcttgacttatttcttttgtaccctaccccttttccgcttttaatgggttaacttacaactttcttttcctccctctctctctctttctctcttactctcttttagaattcgactaaagcggaagagaacactgacgggggaaaccagagattgtgtatcgaatccatcgcttagccagctatgtcggaggctgccacgcccccaggatcagtgccaggaacagtattcccacctggcttcgatcccactgccgaatcggtggagaagactctctgcttccggggtttctgggcctgggccgtgctgatattcctgattgttctgggcatattgctcttcatgtggctgctgcgcaagtgcatccaaggaccggcctaccggaaggccaatcgcatcgatggcaaggtggtcatcgtcaccggctgcaacacgggcattggcaaggagacggtcctcgagttggccaagcggggtgcccgcgtctacatggcctgtcgggatcccggtcggtgtgaggccgcacgactggatatcatggatcgcagtcgcaaccagcagctcttcaatcgcaccctggatctgggctccctgcagtcggtgagaaatttcgtggagcgcttcaaggcggaggaatcccggctggatatactgatcaataatgccggcgttatggcctgtcccaggaccctcacagccgatggctttgagcagcagttcggtgtcaatcatctgggacactttttgctcacgaatctgctgctggatcgactgaagcacagctcgcccagtcgcattgtggtggtcagttcggcggcacatctctttgggcgaatcaaccgcgaggatctgatgagcgagaagaactacagcaagttctttggggcgtacagtcagtccaagctggccaacatcctgtttaccctcaagctgagcaccatccttaaggacaccggcgtaacggtgaactgttgtcatccgggtgtggtccgcaccgagatcaaccgccacttttccggtcccggctggatgaagaccgccctgcagaagggctcgctgtacttctttaagacacccaaggctggcgcccagacccagctgagattggcgctggatccgcagttggagggctccactggtggctattactcggactgcatgcgctggccattgtttccgtgggtccggaatatgcagaccgccgactggttgtggcgagagagcgagaagctgctgggtctgccaccgctggagccacctccacctgtccagagccccacccagaatggcaatggcactcaaaacggcaatggtagttccagtgccagtgccagtgccagtagtaacaatcccgcttcacgggaaatgcaatccgtggaaacggtcgtggtcaatcgttcgtagttgtggtcagagtccttcattggagtgcagaccttgctcttaatttaattccctgtaatatggcgtgcttgagtacccttggaaatacccagtgcggaatgaggccgattcgggtctaatttatagagatatatagtaatatatttatgtttgattttcacatgagattattgaaagaattcggttcttgatattgtataatccacgttctatattaattaactatgtttaaaattgttgatttcccagggtatttgagtcttcggtcaatcgaagttagcttttgcatactctcttgtttttttttttgtcgctctcgttctgtacataattttaaggaaaagaaaacccattaaaataaaagttaaacctgacatgcaatcctgttttcgactctcctctttctgttgctctctccattcctgtcgccccccccccccccctacaccattgctctttcacagaaacaaaaagaaagagaaagaacgaaacgataacaatcagcataaagcgaacaatttacgacaacaaagcgaaatcaatggaaacgctgtctgcgctgctgcgtcctctgctgcagcggtcgctgccactgcactttcgtgtgcgagcgagttggttggatggaggaggaggaggcgtagggggagagcaagagcgtgagtaggtgaggtgagtaagcccggtgagtggagggagagcgagtcaagtcagtcagtcgccctgctttctgctgcagtggtcgaaacggtgaaataataaacaaaagtaatatcaatttacttaaccaaatcaattataaatagattttccagcttgaataaatcaaaacctataaataaattttccaaggcatcgacgttattcgagccagtgcaaccactgtgcacttgttcgctgatccacattagccattagcattaacgaaaatcacataaaaccatatagtgagcaagcgagcgagcgagagcttggtgccgcccaggtgcgagcaagagcgcagct

SEQ ID NO: 7424 - DNA, 1556 bp, DROSOPHILA
aaccgctggatatcgaagtcaggcgctgagcaattggactccacggcagtcagttgcccaagatcgcgcgagaggcttagacacacggagggagtagcccagtaactagactttcatatcacccgtactaactgatagagcaaatatagtcggccgcccatgggaaatgagcgaaattgccacctgactgacatccccctaaaaagttgttagttgttattacagcattccaaaaaaacatatcttttcatacggaattcgactaaagcggaagagaacactgacgggggaaaccagagattgtgtatcgaatccatcgcttagccagctatgtcggaggctgccacgcccccaggatcagtgccaggaacagtattcccacctggcttcgatcccactgccgaatcggtggagaagactctctgcttccggggtttctgggcctgggccgtgctgatattcctgattgttctgggcatattgctcttcatgtggctgctgcgcaagtgcatccaaggaccggcctaccggaaggccaatcgcatcgatggcaaggtggtcatcgtcaccggctgcaacacgggcattggcaaggagacggtcctcgagttggccaagcggggtgcccgcgtctacatggcctgtcgggatcccggtcggtgtgaggccgcacgactggatatcatggatcgcagtcgcaaccagcagctcttcaatcgcaccctggatctgggctccctgcagtcggtgagaaatttcgtggagcgcttcaaggcggaggaatcccggctggatatactgatcaataatgccggcgttatggcctgtcccaggaccctcacagccgatggctttgagcagcagttcggtgtcaatcatctgggacactttttgctcacgaatctgctgctggatcgactgaagcacagctcgcccagtcgcattgtggtggtcagttcggcggcacatctctttgggcgaatcaaccgcgaggatctgatgagcgagaagaactacagcaagttctttggggcgtacagtcagtccaagctggccaacatcctgtttaccctcaagctgagcaccatccttaaggacaccggcgtaacggtgaactgttgtcatccgggtgtggtccgcaccgagatcaaccgccacttttccggtcccggctggatgaagaccgccctgcagaagggctcgctgtacttctttaagacacccaaggctggcgcccagacccagctgagattggcgctggatccgcagttggagggctccactggtggctattactcggactgcatgcgctggccattgtttccgtgggtccggaatatgcagaccgccgactggttgtggcgagagagcgagaagctgctgggtctgccaccgctggagccacctccacctgtccagagccccacccagaatggcaatggcactcaaaacggcaatggtagttccagtgccagtgccagtgccagtagtaacaatcccgcttcacgggaaatgcaatccgtggaaacggtcgtggtcaatcgttcgtagttgtg

SEQ ID NO: 7425 - protein, 406 aa, DROSOPHILA
MSEAATPPGSVPGTVFPPGFDPTAESVEKTLCFRGFWAWAVLIFLIVLGILLFMWLLRKCIQGPAYRKANRIDGKVVIVTGCNTGIGKETVLELAKRGARVYMACRDPGRCEAARLDIMDRSRNQQLFNRTLDLGSLQSVRNFVERFKAEESRLDILINNAGVMACPRTLTADGFEQQFGVNHLGHFLLTNLLLDRLKHSSPSRIVVVSSAAHLFGRINREDLMSEKNYSKFFGAYSQSKLANILFTLKLSTILKDTGVTVNCCHPGVVRTEINRHFSGPGWMKTALQKGSLYFFKTPKAGAQTQLRLALDPQLEGSTGGYYSDCMRWPLFPWVRNMQTADWLWRESEKLLGLPPLEPPPPVQSPTQNGNGTQNGNGSSSASASASSNNPASREMQSVETVVVNRS

SEQ ID NO: 7426 - DNA, 9051 bp, DROSOPHILA
gggcgcgcacggtgaattgcgagggacccgccgccaagtggacgcaatgtgaggtgaaaccaccagactccttcgcaggcacaacattcgcaggaacgctatccattagtcgtgaattttatacataaacaagcaatattcacaaggaaaacaatgaaatagcaagtttgaccggagcggtgttgccagataacgaaacgaccatagatagcttttcaaaataatcgaaaattgtatcgataggcagctattacagagcttaggcgcggattttaaatttgcattactccctcaaaagccaatgaaagtcagtttgatttcgccgttcgcagtgttggttgcatttattaaggctctatttaatgtgggcgagttttttaatgtttacgttggttgagttaaatacatatatacgatattttgttcacaattacattcagattttgttttgctctcttcggcgcgcgtcgattggtttttccttttctataatgttaatgttgtcgctttgatttgacctacttatttaaatacacaaaagggaaatcgtcgagagtaccaaaaaaaggcaattgaaatcaacgttattcgatttaaagatcagttccggttgttatgttaaaaaaaaaagatgaaattcactaattattcgttatgcttgaaatgtcaatgagaattatgatgtatggataaatatcggttatatttgacgtctattgcgctttatttattgataattgattgttaatgttctttgaatttgttggatatcaaataattttgattaattttttttgttttgtttttcttttttactataatttgactaagttttgcaaccgcgatttcaaacttccaccctgatggtattttgtttcttatttttcgtgttttgttagttttgttgtttttcatcatgtaatcattatcgatttgtgaataaatattggaagtgataaacatatagcgctgttattatgcgggactgcgttgctttctaatcctcatcgtcctcagattcggcctcctgcagccaagtcaaccaggcgttcacttggaacaaagcggatcctttgcctggatatttgtcggaaatctcctccttccacaggacgaatgcctcctcctctataatttcagattcgtaaagatacttgaaccaacggcacagcatgcctaacgaagaaaaaagcaaatataagttgccgataaaacagattagatttaaaatgttgagcacttacccttggggaaattttcattgtagcagaacgtttgcagagcatagagagccatcaactgaagctcgttctgtcccaggaaggtctgcagcatctggctgtagttctccagcagctgttgctccttctgggtcaccgatttctcagggtgctccttggggtcgaggttgtccgccagcgtcgtctccttggtcacatacttgaccaccacggtcattagggcttggataaagcccgggtccttgtagtatttgttgtcaacgttggccttgatccacttgtagaagttgttggggttcgggtcgctttgcagctgttttagcatctcggcctgtaccttcaatagcggataaaggaaagaaagcttgcgatcctcgagtatcccggccaagcgctccttgttccgatccgcctccggcaggctgttcataagatcaactttgctcgcccggaatttctcttccagcgcatccttgccgatgaccttgaccagttgctgcagcacgagcaggaacagcggatagtgttggccattgtccgtgaagttggcgatatcgcttaacttcagcaatgctggctcgcaaattgtctttgccagcaagctggctacaagactaacgattcggggattgagtgcctctcgctcgttcatcttgttgaccacctgcttgaaaatctcgaccacgatgttcggcttgatattggattgcttgcgcaatgtctgcagaaggcgcacagcacgctccaagaagacatcgtttacacggtccaagacctccatcagcagattgatgcacacatccttcagcgccttctctggcagcttaagctcgaggaaaccatctacaagcttggtgaagcgatctggagtggtcacaggtattgcagcatcttcctttacctccgagacttcaactggagcagcgtcggcctcctccgtctttgtctcatcaatatccttgatctcaatttccgtcacctctgcatcctcctcctcatcgtagtagaacctatccttgaagtactgactggccttcttagacagctcctccttgttgggacccttatctttcttttgttgcttggccgagccaataccgccggccggagtgcttggtctctccacggagccattcttgccctgatctttgccgtcgtgcgatccctttctgcccgcctgaccgtctaaatccaacttctccgctcctgatgaaaagttcggcgaagaagaggtggccttcaatcccctctcctgttgaactcccaaaagagttcggttatcagcatactcagcagatggtgttgacgagggacgcgttggattgatcagatgggatgtgggcgtgccgagcatagggtagtgggagttcgagagctggccctgcgagctgccctggttgttgctgccgctgctattgggcggtgttgacatgggcaacgtagccggaaacttttggttctgggaggccgctcggaagagcaaggagttggctgccgggcgcatttgcaagttctccaccgcatcctggttcgtggtgatcaagttgcgtttgaacctcggtgccaattccttactacccagcagctgattgcccccatactgtccgtcattgcgatccctgtcacgatcgttattcctacgcgaatcatcccggtcccggttgttggaggatcctccgccactgcctcctccattctggttgtgcttgttgtagcgattgccatagttagctccgccgctaccgccctgatcgcgatccctgttgcgatcgcctcgattgttgtactggcgattgtcgcggtctcggtcacgattgctcgtagcgaacctgaaattgtttaaaattaggttttgtactttcaaagaatttaatataatgtgactactattcaaactatacacccgaccagacaaaagtgtgttcattactcccatgacgttcacaatacttacggcgagacaatcggagaagctcccgtaacactcagtccgctaaacatgtcattatagccgccaggctggatattcagatggaaacgattcatccagctgtccgagtcacgatcattgttgcgcatatcacgattgcgattggggaacggagtgcgtatgattgagtcgtcatccgagcgtatttgctttatggggacggggccttcggtggtgcccaatttgcgcggcacccaattgttctggcgcaattcaattacgtcctttagcataaaacgtatccgcggtggatattcagatgattttgaccgacgttcaagcttctcgaagtactggttcatcagctctttgccctgttctgaatccagattcttgccgcaagtcttgagcagttgagccaggcattccatgtcctcgcacatttcctgcgtaccggccgtacgcttcttcttcttgtcaaatagctccatgatgcactgatgcagcacgttcttcgacagcatgtccagcttgttgagctctccgatgaatttgacgttgccgagcatgcgctgtttggccaaatggcggcgctcctcctcgtcggcctcattttcaggcggaggtctgttgtcgttctcgtcgcgcttgagtcggttgttgaacttgtcgcggcagaccgcgatcagcaggcgtaagaaggtggacgaattgcttggttccttgtcgaatgacggggcttcctcggaaagtcgcttgcacagctgcgcatacatagacgagtacttcggctcgtctaaggccttgtcgaatatcagcaaaatcacgcctttcaaaatagcaatagagttaagatccagcttcaacagttcatcgctcagttcctggaacttctcgggcgttagcttgttcaaaatacccctcacacgccggaagacggcgtcgttcttttcgctttgggtgagtccatgctgtggacgcaacgatggtggtatccagcgtccggtgatcggtggcggtgtgcttgccttgccagcctgtgatcgttcctgctgctgttgagaatgaggagtgcctcctcctgcggccgacgctgatccggagttcagagaaatgttcgaagaattggaagtggagccagagatctgagcagacgcactgccgttgcgaagattgggtgtgcgactggacggggttccgccgtaacgatctgcgtcagacctgccgtagctgcggggtcctccgctcgctcctgcccctgatccgcctcctccgtttcgctctaggctgttggtgttgttgtagcgctggtgcgatggtgaatcctcgtagttgtcgcggtagttgctgctgtatccgctactcacgcctccatcgttgccaccgcgcgaagccccatacgacgacttgctgttggttgagcttgctgcagatccgttgtaaccggatgaagagttggaattgctgctgttgccgttcccgttgccgctgccgtaacgtggctgtgtgccgttgctcccattgccgttctcgtagttgcgggcggagcgataattgctgccaccgcttccagagccgactgccccagaccctcctcctcccacggagtttgagtttattgatcgattgtagctgccatcggagtttgagtgatagttgctgcgactaccacgatgcgatccgccttgctgatcctgctgctggtatctaccagaagaggaactgccgttgtagctgtcggagttgccgcctaagccttgacccaaaatgtcactattctttggatagtaacgcgacgacgacgagtcaccctggtaagatcgtcgaggtcttgggctcacctcactgtcgtgttggcgaattttgacggaattcttactatagccagtggaaaagtgtccggtcggtccaccagatgatcggctgccgttcctgccgccctcgctgttgccgcttatggccggagatcctccgttgccgccggcgctcttatatcctgagccgttagagccgcccttgcggtaattgccgcccagcgaattcgatcctgacgatggcgaggagcccttgtcgatcttcaccagattcttgaggttgttaaacgtatcggtcgctgtggtgatcggcagaagattgggactggtgttgagcagtgttttgccgaccgacggtgtcggtggggtttggccaccgcagctgacgccgataacgccgccgcctccgccaccaccgcgattggttggctgctcgtaattgcgctcgatctcgctgggattggccgttattaccagtcgtaaatcgctgccgccgccgatgctcttcgtatcaccggtgctggtgcctccctcaatgatgatcgctttaccgccccgaaactgatctatgatgacgcctgcctggtgcccgttggtgactccggaccaacgttgcggactgtcgtcgtaagagtgcaaaaggggagcggcgtcgtacgttgatagaggaatggtggatgcttttcttgatcgactcgggggcgaaatgggtgcgtgcttgggtggcacggagtgggctactcttggcgtcttggttggtttccccgttttctggggatctggatcctagttaagggtcttagatcctcctcgtctgctctgtggttctgatgatccttggggacactcgacgaaacgcacacaaatctaacacacacacgcgtacgcacacagagacaagttatgggttatgggtgctggctttttatccaactctgctactgttccttccgatttcggttcttcctggttggttcctttaggctagaagtaacaagtcctgcgtggtaacacctgggattcgtctctccgtttcgttacgtcacactgggtatggccttgcgtttagggaatcctggagagaaatgggaggaggaaacaaacaaaagccggaaccgtggcaaattaataaaaatgagaatcagacgaatcaacaattacgtacaattgtgacaaaaatacaaaagaaaagtgatcctagtggtgtgcgtgtgggattatttaaatggacgttatttgctaatctcgtccgattgtttttgtttacactcgatttcactgcgagcaagcgccagcacaataacaataacatcacctgccatccaaactggaaaatatgcatttaatggaaataacctcggatgagcaccttcaagtttattccacttccactctctcccgccaattgaaacggcactgccgcattctacggaatcgcatgtgtgcaagtgttggtggcattgccatttaagcattaagtgctgggaagattataattaatcacaggtttacacaatgccaaccagctttgtgccgttgcttagttttatttttgcaaagttactttcgcttgattgactcatttgttgtagcctgccgttctttgttccagctttctttgtttggcgcactctctcccaccacaaacttaaacaacaccaacacacatgcaccgaaaagaactagaagctgcgtccgtgtgtcagtgtcctttctttgtgttggggtttatggcctcagctttggggatctcctctctttcttcctctctcccgctttccattcagctggccatcccgctcgcacgcgatgctggtcttctgcgccacggaattaaagtctcttgaccccgggaaataggcagaggcgcacaacgagcagggggttgcaattgctgattagctgagtcactactccattccgctcaatttgcttggtttaattgattggccataggacgacgaagtcgcaaacaaccctgcgatttgtcattgtgcgagtacaccacatacatacatacgaactttgggcctgcaataatgtagtctttcgtgcggggaagggataagccaaaactaaacacccccaatgcgaaaacccaccctctgctgcattgaggcgtcgaccccgacctgagaaatgagccccccctgcttccgcacagacccagttgtggatgattttgacctcaattcgagcgttcggctcggctcttgtgcacaagtgtttgtcgctgtctgcatgtttaactggccaagtggcacacccacattgcaaacagtatttattttactagtttttcgggggcttcaagagcaaatatcttgagaaaacccatgaaaacgcactcttctttttcccccatcgatagtgacgaaagcacacacacatgcaagcagcacaatgcgtgtgtgtgggagatcagaaagcagctggaaggcacacgccaaaagtgaagctgtggaaatggaatggaagaaaaaaaaaactccatgagagggctgtcttcccggggagggggcactgtagataactcaagcaaaggcagcgggcaacgtcaacacagcatttcagattttccgacgtgccgacgccattttgtggcgcaaataggtgtacctacacacacagtcatacgcgtaaactttctttgtgtttttttttctctcgaaatgattcatgcaaattaacgttttgattgacgaatttcgaccctgcttgctcttgaaaattattaccgcgatggagcgactatggcatctaggggagctcctcacttttattgatttcactacttgatttttcgccgtgaagaaacgaggacgttcacacaagcacacacacttatacagacacaatagaatcggttttctctggcacatcgtggaaaatttataggctaaaatgcggaaaatccacctgcaaagaagtgtactttccatattctctctaaagacagcaaaaaaccatttgcaaagtatactcgttaaattatttttactaaccttttcttgagtaatttcgtatagcaaatcacgcaaaggttccacgaaatagagctggaacaaaaatcgatgtgcgtttggttttatcggtgtagccagaagatagtagtatcgatttttcgcatgcagcaatcgataacctgttaacttaactaaaaatgtgccaagtagctatttcacaatccatggtgtggaacttggaaaaatatcgatgactcgaaaagctatcgaaccggctcgactactcaacagtgctgcaaaagttttatttcgattaggtgttgacaaattttgaacgaccgcaatatttaaatcgtatttcaagcagatcttttgtacaaaaacagtttcatttattaataattgatatacctgctttttatgttgttgcttgttaaactataacaaaagtaaactaatttaaactattattactaatattattattattcgtagatgaccaaactgtaattttaaattagtgagcgaatattgtatattaatattgtatccttattgattcgaaagattttgctttatagttgctaagtgcattgagtatattaaaaaaacagtatctaagcgcaatacaacatttttacctctgatgtgcaatgctcgttcatatctagaactggatcttgtgagtataaatttgttaattaaaactaattactaagcccacaaacgaggacatcattttgctaccttcattttcaaattgttttcgtcagcgtttacagagggtataattttatttaattgaaatgaccgatcgttagcaaccagtgacagatatagtttaaatattgcggcacacatcaacattgtagtccgtgccctaggccgcactatcgcctcgtttgatatatgtatttccctggcattatcaacgcagtcatctacaacccttttccctccccaactccttgctggttttccacacacaaatatacacacacgcacactcacacactgtcgcactcgcaggacaaccatgaagaagtgggaaaccgaacagaagaacaatttaattagtgatgacatgttgccatttaatt

SEQ ID NO: 7427 - DNA, 4457 bp, DROSOPHILA
gttccagctctatttcgtggaacctttgcgtgatttgctatacgaaattactcaagaaaaggattccctaaacgcaaggccatacccagtgtgacgtaacgaaacggagagacgaatcccaggtgttaccacgcaggacttgttacttctagcctaaaggaaccaaccaggaagaaccgaaatcggaaggaacagtagcagagttggataaaaagccagcacccataacccataacttgtctctgtgtgcgtacgcgtgtgtgtgttagatttgtgtgcgtttcgtcgagtgtccccaaggatcatcagaaccacagagcagacgaggaggatctaagacccttaactaggatccagatccccagaaaacggggaaaccaaccaagacgccaagagtagcccactccgtgccacccaagcacgcacccatttcgcccccgagtcgatcaagaaaagcatccaccattcctctatcaacgtacgacgccgctccccttttgcactcttacgacgacagtccgcaacgttggtccggagtcaccaacgggcaccaggcaggcgtcatcatagatcagtttcggggcggtaaagcgatcatcattgagggaggcaccagcaccggtgatacgaagagcatcggcggcggcagcgatttacgactggtaataacggccaatcccagcgagatcgagcgcaattacgagcagccaaccaatcgcggtggtggcggaggcggcggcgttatcggcgtcagctgcggtggccaaaccccaccgacaccgtcggtcggcaaaacactgctcaacaccagtcccaatcttctgccgatcaccacagcgaccgatacgtttaacaacctcaagaatctggtgaagatcgacaagggctcctcgccatcgtcaggatcgaattcgctgggcggcaattaccgcaagggcggctctaacggctcaggatataagagcgccggcggcaacggaggatctccggccataagcggcaacagcgagggcggcaggaacggcagccgatcatctggtggaccgaccggacacttttccactggctatagtaagaattccgtcaaaattcgccaacacgacagtgaggtgagcccaagacctcgacgatcttaccagggtgactcgtcgtcgtcgcgttactatccaaagaatagtgacattttgggtcaaggcttaggcggcaactccgacagctacaacggcagttcctcttctggtagataccagcagcaggatcagcaaggcggatcgcatcgtggtagtcgcagcaactatcactcaaactccgatggcagctacaatcgatcaataaactcaaactccgtgggaggaggagggtctggggcagtcggctctggaagcggtggcagcaattatcgctccgcccgcaactacgagaacggcaatgggagcaacggcacacagccacgttacggcagcggcaacgggaacggcaacagcagcaattccaactcttcatccggttacaacggatctgcagcaagctcaaccaacagcaagtcgtcgtatggggcttcgcgcggtggcaacgatggaggcgtgagtagcggatacagcagcaactaccgcgacaactacgaggattcaatcttaactctattgctattttgaaaggcgtgattttgctgatattcgacaaggccttagacgagccgaagtactcgtctatgtatgcgcagctgtgcaagcgactttccgaggaagccccgtcattcgacaaggaaccaagcaattcgtccaccttcttacgcctgctgatcgcggtctgccgcgacaagttcaacaaccgactcaagcgcgacgagaacgacaacagacctccgcctgaaaatgaggccgacgaggaggagcgccgccatttggccaaacagcgcatgctcggcaacgtcaaattcatcggagagctcaacaagctggacatgctgtcgaagaacgtgctgcatcagtgcatcatggagctatttgacaagaagaagaagcgtacggccggtacgcaggaaatgtgcgaggacatggaatgcctggctcaactgctcaagacttgcggcaagaatctggattcagaacagggcaaagagctgatgaaccagtacttcgagaagcttgaacgtcggtcaaaatcatctgaatatccaccgcggatacgttttatgctaaaggacgtaattgaattgcgccagaacaattgggtgccgcgcaaattgggcaccaccgaaggccccgtccccataaagcaaatacgctcggatgacgactcaatcatacgcactccgttccccaatcgcaatcgtgatatgcgcaacaatgatcgtgactcggacagctggatgaatcgtttccatctgaatatccagcctggcggctataatgacatgtttagcggactgagtgttacgggagcttctccgattgtctcgccgttcgctacgagcaatcgtgaccgagaccgcgacaatcgccagtacaacaatcgaggcgatcgcaacagggatcgcgatcagggcggtagcggcggagctaactatggcaatcgctacaacaagcacaaccagaatggaggaggcagtggcggaggatcctccaacaaccgggaccgggatgattcgcgtaggaataacgatcgtgacagggatcgcaatgacggacagtatgggggcaatcagctgctgggtagtaaggaattggcaccgaggttcaaacgcaacttgatcaccacgaaccaggatgcggtggagaacttgcaaatgcgcccggcagccaactccttgctcttccgagcggcctcccagaaccaaaagtttccggctacgttgcccatgtcaacaccgcccaatagcagcggcagcaacaaccagggcagctcgcagggccagctctcgaactcccactaccctatgctcggcacgcccacatcccatctgatcaatccaacgcgtccctcgtcaacaccatctgctgagtatgctgataaccgaactcttttgggagttcaacaggagaggggattgaaggccacctcttcttcgccgaacttttcatcaggagcggagaagttggatttagacggtcaggcgggcagaaagggatcgcacgacggcaaagatcagggcaagaatggctccgtggagagaccaagcactccggccggcggtattggctcggccaagcaacaaaagaaagataagggtcccaacaaggaggagctgtctaagaaggccagtcagtacttcaaggataggttctactacgatgaggaggaggatgcagaggtgacggaaattgagatcaaggatattgatgagacaaagacggaggaggccgacgctgctccagttgaagtctcggaggtaaaggaagatgctgcaatacctgtgaccactccagatcgcttcaccaagcttgtagatggtttcctcgagcttaagctgccagagaaggcgctgaaggatgtgtgcatcaatctgctgatggaggtcttggaccgtgtaaacgatgtcttcttggagcgtgctgtgcgccttctgcagacattgcgcaagcaatccaatatcaagccgaacatcgtggtcgagattttcaagcaggtggtcaacaagatgaacgagcgagaggcactcaatccccgaatcgttagtcttgtagccagcttgctggcaaagacaatttgcgagccagcattgctgaagttaagcgatatcgccaacttcacggacaatggccaacactatccgctgttcctgctcgtgctgcagcaactggtcaaggtcatcggcaaggatgcgctggaagagaaattccgggcgagcaaagttgatcttatgaacagcctgccggaggcggatcggaacaaggagcgcttggccgggatactcgaggatcgcaagctttctttcctttatccgctattgaaggtacaggccgagatgctaaaacagctgcaaagcgacccgaaccccaacaacttctacaagtggatcaaggccaacgttgacaacaaatactacaaggacccgggctttatccaagccctaatgaccgtggtggtcaagtatgtgaccaaggagacgacgctggcggacaacctcgaccccaaggagcaccctgagaaatcggtgacccagaaggagcaacagctgctggagaactacagccagatgctgcagaccttcctgggacagaacgagcttcagttgatggctctctatgctctgcaaacgttctgctacaatgaaaattggcatgctgtgccgttggttcaagtatctttacgaatctgaaattatagaggaggaggcattcgtcctgtggaaggaggagatttccgacaaatatccaggcaaaggatccgctttgttccaagtgaacgcctggttgacttggctgcaggaggccgaatctgaggacgatgaggat

SEQ ID NO: 7428 - protein, 869 aa, DROSOPHILA
MYAQLCKRLSEEAPSFDKEPSNSSTFLRLLIAVCRDKFNNRLKRDENDNRPPPENEADEEERRHLAKQRMLGNVKFIGELNKLDMLSKNVLHQCIMELFDKKKKRTAGTQEMCEDMECLAQLLKTCGKNLDSEQGKELMNQYFEKLERRSKSSEYPPRIRFMLKDVIELRQNNWVPRKLGTTEGPVPIKQIRSDDDSIIRTPFPNRNRDMRNNDRDSDSWMNRFHLNIQPGGYNDMFSGLSVTGASPIVSPFATSNRDRDRDNRQYNNRGDRNRDRDQGGSGGANYGNRYNKHNQNGGGSGGGSSNNRDRDDSRRNNDRDRDRNDGQYGGNQLLGSKELAPRFKRNLITTNQDAVENLQMRPAANSLLFRAASQNQKFPATLPMSTPPNSSGSNNQGSSQGQLSNSHYPMLGTPTSHLINPTRPSSTPSAEYADNRTLLGVQQERGLKATSSSPNFSSGAEKLDLDGQAGRKGSHDGKDQGKNGSVERPSTPAGGIGSAKQQKKDKGPNKEELSKKASQYFKDRFYYDEEEDAEVTEIEIKDIDETKTEEADAAPVEVSEVKEDAAIPVTTPDRFTKLVDGFLELKLPEKALKDVCINLLMEVLDRVNDVFLERAVRLLQTLRKQSNIKPNIVVEIFKQVVNKMNEREALNPRIVSLVASLLAKTICEPALLKLSDIANFTDNGQHYPLFLLVLQQLVKVIGKDALEEKFRASKVDLMNSLPEADRNKERLAGILEDRKLSFLYPLLKVQAEMLKQLQSDPNPNNFYKWIKANVDNKYYKDPGFIQALMTVVVKYVTKETTLADNLDPKEHPEKSVTQKEQQLLENYSQMLQTFLGQNELQLMALYALQTFCYNENWHAVPLVQVSLRI

SEQ ID NO: 7429 - DNA, 3378 bp, DROSOPHILA
atctatctagacaagggaaagggtacatatgtacacacatatatatcggtggcacagtttgccgtaaacacgaccatggttacccaaaaaaaggtgatggaaagcggagggctaagggttgcagcaccgcccactgggcgggtggtggaccgagccaaaggactacgcaccaccaggtgacgagggcgagataaagagagagagcgcaggtcaagagagagagagagagagccgagagagagagccgtgagagattcgaacaggagctaaaaaggagcagccgaatattttgtgtgtacctaccggagacgaagcggttggactggcaactcctatattcctcctggatctccttatcctggcactccttatccgtatccgtatccttatccggaaagtcggagtccgtatttctcggtcttaacccttggcaatcctcaggatttgggagtggaagacatgggataagacactgctcctggaactcctggaacgcactctatatcacttccactttccactgggctattgcactttacacacacttaaaacacaactttaattataatacacctaggcgtgagtgtgtgtgtgtgagtggggcgggggtgagcctgtgtgtgtgtacatatgctgctgccgcgattgaaaaacacacaaatcctgacaaataaacgcttttccacgcttctgattaccgcacacgttaactgcgttaagtggcaaattgtttgcacaattttgcagcgctctcttgcggttaactaattaaattttaatgattttgccggagccgtttctttcacgtcgcccatccgatttcgatgtgcggaaggcgatagcgattgaccacgaccagggctgtcaggtggcgtatcagcggtttttcttagcgaactatcgataagcacgttgcgcgctgtgcagcacttgtccggtcatcgggtctatcgatatcgggtggcgtttttgttatgattttggattacatggttggtttaacccgaaataccatgctgaaaactcggggtattgtgcttggcatcagcaggtcgtacaccgccaaggcgaagaggggtgtgctggcgcaggacaagtcgaagatcaaggagtactcaccgaagacgacggacagccatgagcaccgagtttacgtgtggggctttcaggaaaccggcgctctcggtctccagaccaacgtgaagaaggccaaggaacgctacacggagatggtgcaccatcccacccgcttgcagttctccaacaacaacgaaatcacggatgtggccgccggctacgggttcacggtctacgccgtgaatagagatgacggagagacgctctttggcagcggtttgaacaccgactcccaactgggtttccaggtgaagggaaatcccaatgatccggccaaccttgacgtgatcatttatcctacagccattaaactgccgagagttcagggagaaacagacgaggacatgcgtgtgaagagcatgtcggcgggtagagctcacctggtggttctgacccaaaacggaaccattttcaccctgggaaacaattcgtacggccaatgtggccgctccatcatagaggaggagcggtacagcaagagtgccctgatccacaggatatcgcaggaagatatatgcggcaaggaggatgaggtggtccaggtggagtgcggccaggaccacagcatgtttcttaccaaaaagggacgcatttacacatgtggctggggtgcggatggtcaaacaggtcagggaaactaccacaccgccgggcagataaccctgattggaggagatgtggaaaaggagaagattgtgcggctcagctgctcctcggactgcgttttggcccttaacgaggcgggcgatgcctttggctggggcaattctgagtacggacagctagatgactcagagctggccgaaacccaaataaatatccctagagctctcaaactaacgaagtccatcgggaaaatcaaggatgtggctgcgggaggctcattttgcatggccctcaacgaccagggtctggtgtacacctggggctttggcatcctcggcttcggacccttcgtggagcaaacatccaagccgcagcatctgttgccgcctttattcggacgaaatgacttcagcaacgaaaccacagtggtttccatcggatgcggagtgtttcacatgggcgccgtcaactcggacggagatctcttcatgtggggcaagaacaggttcgggcatctggggctgggacacaagaaggaccagttctttccctttaaggcggccatcaacggaaaggtcaccaaagtggcctacggagtggatcacaccattgccttgtgcaagccgttcttctagattaagctgtttgttttagattagttaacttaaagtatactctagtcgaaaatactattgccagtggcagcccaaccaataaagatcacactgctaaagatcacaaattcgcgtttaatacatgtaagtagtttaaagaacatttagattaatttacttgtttctcttacgcatgctgatagttgccatgttttccgccctcaggttgtttttgctgtaaatagcttcgttctgaatccgttctatacattaattgttagaatagagtttaagagcatatatataaaatatgtacttggaatgccgcagtgtgtctgtgcgcgtgtaccgatccaatctctccgtatcctttcaatccgccctcgaggctaatacatttcacgtatttgtcacaatttcgtcgatcgcttttgattgcgttctaggtacattttcgttacgcttccttactagggtctataatttgctaaactcgcttggccaatgatgatatatccacccggagtgggtgtgtgtcctgctaaccagtggtaaccagatctagacttgtaggcatggctctgtgtatgtataaatcgattctaagtaataatttgtttaggttgtgttatcatatgggtgttgtagcttaaaagatcctcctcctcctccaaagctcaggcctgttgcctagcctcgttggcctcgtaggcctccacctcggcgatgttggccaggtcgtactcgatgacgcccttgcccatgaactcggcgtacttggctgactccggcagcggatcagccgatctcttcgagactgtaatgggtcgaggaatgggaatggatcagtaagttgctggcacctgtaagacattgctactcaccgcctgagacgaacttctccatcatgtagaccttcatatcgaagcactcgttggcaatccgctccgagatgagcgagacatcggtgatgcggggcatgaccacacgcatctggcgccgcacgcgctccgtatctatg

SEQ ID NO: 7430 - DNA, 1378 bp, DROSOPHILA
aacccgaaataccatgctgaaaactcggggtattgtgcttggcatcagcaggtcgtacaccgccaaggcgaagaggggtgtgctggcgcaggacaagtcgaagatcaaggagtactcaccgaagacgacggacagccatgagcaccgagtttacgtgtggggctttcaggaaaccggcgctctcggtctccagaccaacgtgaagaaggccaaggaacgctacacggagatggtgcaccatcccacccgcttgcagttctccaacaacaacgaaatcacggatgtggccgccggctacgggttcacggtctacgccgtgaatagagatgacggagagacgctctttggcagcggtttgaacaccgactcccaactgggtttccaggtgaagggaaatcccaatgatccggccaaccttgacgtgatcatttatcctacagccattaaactgccgagagttcagggagaaacagacgaggacatgcgtgtgaagagcatgtcggcgggtagagctcacctggtggttctgacccaaaacggaaccattttcaccctgggaaacaattcgtacggccaatgtggccgctccatcatagaggaggagcggtacagcaagagtgccctgatccacaggatatcgcaggaagatatatgcggcaaggaggatgaggtggtccaggtggagtgcggccaggaccacagcatgtttcttaccaaaaagggacgcatttacacatgtggctggggtgcggatggtcaaacaggtcagggaaactaccacaccgccgggcagataaccctgattggaggagatgtggaaaaggagaagattgtgcggctcagctgctcctcggactgcgttttggcccttaacgaggcgggcgatgcctttggctggggcaattctgagtacggacagctagatgactcagagctggccgaaacccaaataaatatccctagagctctcaaactaacgaagtccatcgggaaaatcaaggatgtggctgcgggaggctcattttgcatggccctcaacgaccagggtctggtgtacacctggggctttggcatcctcggcttcggacccttcgtggagcaaacatccaagccgcagcatctgttgccgcctttattcggacgaaatgacttcagcaacgaaaccacagtggtttccatcggatgcggagtgtttcacatgggcgccgtcaactcggacggagatctcttcatgtggggcaagaacaggttcgggcatctggggctgggacacaagaaggaccagttctttccctttaaggcggccatcaacggaaaggtcaccaaagtggcctacggagtggatcacaccattgccttgtgcaagccgttcttctag

SEQ ID NO: 7431 - protein, 454 aa, DROSOPHILA
MLKTRGIVLGISRSYTAKAKRGVLAQDKSKIKEYSPKTTDSHEHRVYVWGFQETGALGLQTNVKKAKERYTEMVHHPTRLQFSNNNEITDVAAGYGFTVYAVNRDDGETLFGSGLNTDSQLGFQVKGNPNDPANLDVIIYPTAIKLPRVQGETDEDMRVKSMSAGRAHLVVLTQNGTIFTLGNNSYGQCGRSIIEEERYSKSALIHRISQEDICGKEDEVVQVECGQDHSMFLTKKGRIYTCGWGADGQTGQGNYHTAGQITLIGGDVEKEKIVRLSCSSDCVLALNEAGDAFGWGNSEYGQLDDSELAETQINIPRALKLTKSIGKIKDVAAGGSFCMALNDQGLVYTWGFGILGFGPFVEQTSKPQHLLPPLFGRNDFSNETTVVSIGCGVFHMGAVNSDGDLFMWGKNRFGHLGLGHKKDQFFPFKAAINGKVTKVAYGVDHTIALCKPFF

SEQ ID NO: 7432 - DNA, 3756 bp, DROSOPHILA
ctgactgctgggggatcagggtcaccttctccgacgcatgatcatcgatgaagggcaccagaccatcctccaggaccacattggcaataatattcctggcacgttcctccgccgttccggcgggcaccaatctcacccgtaacctctccacctgctgctccatggtaactgactgtctgatctccgccagaacaagcgaatctcaagcgagagccaatcagctagctaaagagtatttcaaagagagattctagagaagaattcgaacacgaccctggagctatgatgtcatcagcagctagctagctattcggtggatattcattcggtgtggcccctcaaccagaaccagatcaacagccaagcatgcgtcgaatatttgtatacccaatatatagagcagtcgcacccaaaccacatggaaaacgtttcgaaatactttcagaaattttttttgggagggagactttaaatgcattaatttatggacatattctaataccttatgagaggaacaaaaatcaatttatatacatatatcgtaccatttaatgagtattctcagtgtgctactatattaaacgtgtttctacgtttaaccggcaaaaacagctgataactacgactgtttatgttttccgatttgtttatgtttatggtcggaagcgtttccgaccatattaagtatattcttgatatattatattatgaatattcttaattagatatattcttgatcagaatcaatatcaactgtctgtccttctgtaggaacgtcgagatcccagaaactataaaagctacaatgttgagataagggtcacagcttcccgagacatagtcgcagcctttgttgaaccatgtaccacgcccactctaacgcccacaaacataatgggcaaccgacatttaaacaatcactatagcactgaaaaagctgacaacctcaaacttcatacgtttggcagctcggccagcatttcagttcattgatatacagaacattgttcagtctacatcaattttgaattgtgaatattcggtaaagattattgtgataaaaatggaaacccaaagcgagtttactgaggaacagaaccaagaccaacccacccaggaccaacctacctaccagccgcgtctgaacgaggtggcccaaaagtttctcgccgatttggacgaggagcgcaagcgattgtccgcggagtttccactttgcgctctgctaatcgacgaatgtaaaatcaatttggctctttacagggtattttaatggtacttatcccaatattgcagctgtggaccgtgtcttctccactggtcgtattcccggcaaagagttctacgcagacgtgtaccaccagaggccgatgaagattacccaaaaggtcttcgtgcccgttaataagtttcccaaggtgggttttacacaattagttgtcccctccgtccgcaaaataaatccgtacccttgcgcagttcaacttcgctcggaagatcctggggcccaaggggaactcggtgcgtcgcctaaaggaggagaccaactgcaagattgtcatcaagggtcgcagctcgatgcgcgatcgtaacaaagaggaggagctgcgcagctcaggcgacccgagatatgcccatcttcacaaggatctctttttggaggtcagcgcggtggcccctccggcggagtgctatgcacggatagcctacgccctggccgagatccgtaagtacctcattccagacgacaacgacgatgtttggcacgagcagcagcgcgagctgatggaaatgaatcccgagtcggccaagaaaagtaacggactcaatatggcgccctacaggtaatggtcatcttattctctctgcataccgatgcaacttgacttacttgacaagcaagttaagcatgtggtatccatctgcttgccattgggcaaagggtaaaaatccattgttattttgcagatcgatcttcgacaagacgattggaggcaacaggaatggggctcccaagtacaacaaccagattaggcgagttacggaaaatccgcgcgagtaagttacttgtaaagtataattttgtatcatttaatgaccaaaccaggagttaccgcgtcctagtagttccttaaatcctagccaacatgcgttgagccagcaactaacattttcatctttatagagtcgccgatatggaggaggtggaatatgattatgatgaacatcgtatgccccccagtcgtccgtctttgggctttgagtatagcaaacgtaagtgttattagattataatatcaaaatcaataatcgaagctatgtaatatactagaatgaataatattatgaaactaataaataaataataaataataataataataataaatcaatacaaataataatcaaccaattttatagcacctccatcaatgacagcgacaaacgctacgccatttaaacgtgcatatccgtatccgactgacatgaatcgtacgcgcgaaccgcccatcaagtcatataagcccaatccgtatacaatacttaacaaatatataaataatagagcgccaagtgatttcgtcgcacaacgctataattgaaaacaaaggacaatgcttacgttgtaaaatccatgccggggaactcatggaaaagaagaaagcagcattcaaaatgatgctatcaatgaataaattttaaaaaaagcacttgcgctgacaatcctacaagcaatattaatttgaattttttattggcctggattcgtaattttctatgaatgtaaaaaactaataaaataaaatgcattgcatgaatttgaaaaattctttgaaattagatctaactataaccgatttgtttacacaataccattaaaatgaagttataaatctaagaaataaatccaatttctaccgacattccaaaaaatattgaaaattctcgttctcgctttgtttgttgtttctctcgaattcagaacgagctaagattttattatcttggtagatgatcaataaaaccaatgtattaatttatttgagtatcgatatatatctatacatacaaattgcaattacatacaatagccacatatttttgatttactttctcttggtcaagcgcagcttcaacggctccttggtcactaaaacaggggcggcatcgaaacggaactccacctccttgcgtggagattgaaccagatcaaaattggccaaaatcttagccaccgccaccttggagttgacttttcccatgcgaagagcttggggcaaagaattaagagaacaggatcaggaagaagacaagaccactggtacaaaacacatccttacctatgcagtgcctaggaccctctccaaaaggcatataagctgcctgatcgtagttcatgttatttgaatcgaagcgatggggatcgtagccattgggattgggaaaatagacgggatcacgctgcatgccaaagagcgagatcagaatgggtgttcccttggctatgatgtgattagttccaggtacgggataatcttcggtgcactctcgattgaggaatggtagcccggggtatttgcgaatggtttctgcaaaaatacgtttaactaaggatcgttgaaactgaatgctatgtgaaacccacccatgatgcagatgtccagaaactttaagtcctgcaccgcctcgtaggtgaacctatccttgggcttcagattgtgcttcatcagcacagcatccacttcttcttgcgcc

SEQ ID NO: 7433 - DNA, 1239 bp, DROSOPHILA
aacattgttcagtctacatcaattttgaattgtgaatattcggtaaagattattgtgataaaaatggaaacccaaagcgagtttactgaggaacagaaccaagaccaacccacccaggaccaacctacctaccagccgcgtctgaacgaggtggcccaaaagtttctcgccgatttggacgaggagcgcaagcgattgtccgcggagtttccactttgcgctctgctaatcgacgaatctgtggaccgtgtcttctccactggtcgtattcccggcaaagagttctacgcagacgtgtaccaccagaggccgatgaagattacccaaaaggtcttcgtgcccgttaataagtttcccaagttcaacttcgctcggaagatcctggggcccaaggggaactcggtgcgtcgcctaaaggaggagaccaactgcaagattgtcatcaagggtcgcagctcgatgcgcgatcgtaacaaagaggaggagctgcgcagctcaggcgacccgagatatgcccatcttcacaaggatctctttttggaggtcagcgcggtggcccctccggcggagtgctatgcacggatagcctacgccctggccgagatccgtaagtacctcattccagacgacaacgacgatgtttggcacgagcagcagcgcgagctgatggaaatgaatcccgagtcggccaagaaaagtaacggactcaatatggcgccctacagatcgatcttcgacaagacgattggaggcaacaggaatggggctcccaagtacaacaaccagattaggcgagttacggaaaatccgcgcgaagtcgccgatatggaggaggtggaatatgattatgatgaacatcgtatgccccccagtcgtccgtctttgggctttgagtatagcaaaccacctccatcaatgacagcgacaaacgctacgccatttaaacgtgcatatccgtatccgactgacatgaatcgtacgcgcgaaccgcccatcaagtcatataagcccaatccgtatacaatacttaacaaatatataaataatagagcgccaagtgatttcgtcgcacaacgctataattgaaaacaaaggacaatgcttacgttgtaaaatccatgccggggaactcatggaaaagaagaaagcagcattcaaaatgatgctatcaatgaataaattttaaaaaaagcacttgcgctgacaatcctacaagcaatattaatttgaattttttat

SEQ ID NO: 7434 - protein, 340 aa, DROSOPHILA
METQSEFTEEQNQDQPTQDQPTYQPRLNEVAQKFLADLDEERKRLSAEFPLCALLIDESVDRVFSTGRIPGKEFYADVYHQRPMKITQKVFVPVNKFPKFNFARKILGPKGNSVRRLKEETNCKIVIKGRSSMRDRNKEEELRSSGDPRYAHLHKDLFLEVSAVAPPAECYARIAYALAEIRKYLIPDDNDDVWHEQQRELMEMNPESAKKSNGLNMAPYRSIFDKTIGGNRNGAPKYNNQIRRVTENPREVADMEEVEYDYDEHRMPPSRPSLGFEYSKPPPSMTATNATPFKRAYPYPTDMNRTREPPIKSYKPNPYTILNKYINNRAPSDFVAQRYN

SEQ ID NO: 7435 - DNA, 3882 bp, DROSOPHILA
ttcgttttggggagcgcaaattgtttcattttcgagttttgctactcggcgatgtgtgaaaattgttatttttgtgatctgtgagggaatattaatattcattgttgattaaatttgaagatcatctacttcctggcacaattaaaagccgtcgcaattaagggaatttatttcaaaaacggtcattgtgggatttccttcgccgccatcatattcagttttcaatctggctgaaaaggagaaatccgactgtcgctgaactcgagtaattaccactcggcttgtgtcaatcaagggaaatgctatatcgtgggtagttttaattgaatattacaagagggatgtgcattaataaggaaatcaatttaaatctcagtcggctggcatgagaaaaactaaactcgaaactctaaaaaatctgcgggcgtaggatccgatccacacgacccatggaaaccaacggacccacgacccatcggtggtgcaaatcagggtgatgtgtctaacgtctgccaatggcgaacccaaatccgaaacagaactcgaaatctctcaatgaagcaataagtctcaattgaattggatttcggtcatataaagtgcaaggtaatgagtttgagttaccagttacgagagagcacagaattgttggcctaatcttgtgtttatttggatttcttttggtcaacactaagtctaatcgttggcaactaatcgattaagttatctttaagttgtttttgagatagtaccaccggaggaaatagaaaccgtgcgaaacctgcagtcacggttccgctgaaatactcgtaacatgcgggtgcgcaccaccaaaaagggggaaaaactaataaaaatattgcgaaaactctgagaaccgcacaagatctcgaacaattcccacagagaattttcatttggtaagaacaaaaaacagatcattcagactactcactcattattaaatatttatatatatatattttttagaacactcagaatgcctcgatttttccagttgacgtgggctcttcttttgattttaataggtttcaccactgctgttacttttatcggagatgatcctgtggtggagctctccttgggcagaatccaaggagatactatgcagagctttgggaacaagacaatctacgcattcagaggaatacgatacgcgcaatctccagtgggacagctccggttcgccaatccagttccggaaactagttggggtgacgaggtgttcaacgcaacatcggattccctcgtttgtccacaaccaggagtagtttctttaatgagtgaagattgcctaaagatcaacgttttcacgaagagcttcgaggacaaattcccagtgatggtgtatattcatggcggagccaatgtcctgggaagtggacacagcagctatgaagcaggacctcaatatttgctagatcaggacgtagtttttgtggcttttaactatcgccttggagctctgggctttctaagcacaaatagcagtgagacaaagggaaactttggtttcctcgatcaggtgatggctctggaatgggtaagggatcacatatcacactttggtggtgatccagagttggtgactattatcggaataagtgctggctcgatggcagtcagtctacacttggcctcgcccctttccgcaggtctcttccatcgggcaatcctcatgagtggatcggccaccaatcactttgatatagataaccttttttggacacgaaaactggctcgtgagctgggttgtccaatgtatgatcccacggatgtggtggagtgtctccgaaacgaaacgtggacacgcattgtggaagtttgcaaggcatgggaaacgtatcagcttgttaatatgaagtggaactacgagatcgatggacactttctacacaaccatcctacggagctaatcaaggagggaaatttcaacaaggttcccctgctaatcagtttcacggccaatgaattcgattacaatgcaaatggtgtggttcggttgctcctatttaaatatttagtatatcttttgacttttttttattcgtagtgcacttggaaaaccagcatctattacacgattttgcctcaaactttgtggattatgccccagagttgtttctctatcgccacgatgcacaaattggagagaaactgaaggatttttatctaggtgacaatactacggaaatcaattcggaaaacatagagaactttggacagatcttttctgatgcatatattgggcatggtgtccatcgtctggtccaactagctagtcactttaccccagtttattatacgcgaatggattacgtgggtgatcaaagtctctcagctcctttgaatggtgaaaacaagcccgtaggagtgggccatgcggatgatctgcactatgtgttgccgggttattggtatggtcccttaatggcggcaaatgattcggatgtttttatgatggaacgtttaaccagctggtttacccactttgccaaaacagggtaagtatactaaagaacaagaaacttaaaatgaaacttttgtaaacgtcttggaggtgaaattgaagaacatatggcttttgatggtaaacaataaaatcgattgaattcttcttccgttccaggacacccctaaacagcacggatatttggccaccctgcaactcgacggtcttgaagatgctctacaacggggtggtgacccaggtgggttcgcccggctattcgaatcgatatgccgtctgggacaaactgtttcccacggccgcccagggcggaggcgctgccttgaaactcagtttcgccgtggccatcgccactggtgtggcctcccggctcatcgggaaattaatgtagcaattaggtgtggaaaaagcttatcaataggccgtttagattacgctaatgaccttcgaccgttgttctcggcttgctcttcgctggagcaaatgcagctatttactttgattaattaatcaagaaaggcgtgagattttccctgtttccactgcgagcttagcttttctttgggggcaattagttattggcctacagcggattggctcagcttaaatacacattaatttgtctttaaatgttttcggctttacactttgtttttggggggcggaaccttcaaactctgacctctttgagctttgaataattgtatttgtcaggtcaggttggcatgtgtaaaaacaaaattgctgtttaccactctgcccctgcgtgaaaatccgaggggttatcccattacacagatgcgctgctattgacatttacgatttgctcttgcgtgaaaatgccaaacaatgcgatgggatacaaaaggattatcgcctcgcccagcccccttttttggggtggctggatgtgaaatggcagacttttcgtgatggggagtcaataattattttcgaagttgaaaataaacaagagtagggtctttaaaatatctttctttacgctttacactcattagcacgcactttcattggggtcaggatccacgtttaaccctctaccaaccacaaaggacgcacacaaggacctgacaaagttgggcaaaagaaaatatggaaaattaacttgttaacttggcccatagaaatatgaggggcaaaggcaaacacagtcgactaagtatacgcattgtgccttattcccttttgggacagatatatatgtatgtatatcccacaaaaaggtgggcaagtcaacttgacaaggaccacgacatgacctggcatttggtgacatgacgggaatgacaatgaaaatgggcaaaacatttgcaaatttttaattaaatttccctcaacattaacacatagttgcgcttttcaatcgagat

SEQ ID NO: 7436 - DNA, 1695 bp, DROSOPHILA
atgcctcgatttttccagttgacgtgggctcttcttttgattttaataggtttcaccactgctgttacttttatcggagatgatcctgtggtggagctctccttgggcagaatccaaggagatactatgcagagctttgggaacaagacaatctacgcattcagaggaatacgatacgcgcaatctccagtgggacagctccggttcgccaatccagttccggaaactagttggggtgacgaggtgttcaacgcaacatcggattccctcgtttgtccacaaccaggagtagtttctttaatgagtgaagattgcctaaagatcaacgttttcacgaagagcttcgaggacaaattcccagtgatggtgtatattcatggcggagccaatgtcctgggaagtggacacagcagctatgaagcaggacctcaatatttgctagatcaggacgtagtttttgtggcttttaactatcgccttggagctctgggctttctaagcacaaatagcagtgagacaaagggaaactttggtttcctcgatcaggtgatggctctggaatgggtaagggatcacatatcacactttggtggtgatccagagttggtgactattatcggaataagtgctggctcgatggcagtcagtctacacttggcctcgcccctttccgcaggtctcttccatcgggcaatcctcatgagtggatcggccaccaatcactttgatatagataaccttttttggacacgaaaactggctcgtgagctgggttgtccaatgtatgatcccacggatgtggtggagtgtctccgaaacgaaacgtggacacgcattgtggaagtttgcaaggcatgggaaacgtatcagcttgttaatatgaagtggaactacgagatcgatggacactttctacacaaccatcctacggagctaatcaaggagggaaatttcaacaaggttcccctgctaatcagtttcacggccaatgaattcgattacaatgcaaatgtgcacttggaaaaccagcatctattacacgattttgcctcaaactttgtggattatgccccagagttgtttctctatcgccacgatgcacaaattggagagaaactgaaggatttttatctaggtgacaatactacggaaatcaattcggaaaacatagagaactttggacagatcttttctgatgcatatattgggcatggtgtccatcgtctggtccaactagctagtcactttaccccagtttattatacgcgaatggattacgtgggtgatcaaagtctctcagctcctttgaatggtgaaaacaagcccgtaggagtgggccatgcggatgatctgcactatgtgttgccgggttattggtatggtcccttaatggcggcaaatgattcggatgtttttatgatggaacgtttaaccagctggtttacccactttgccaaaacagggacacccctaaacagcacggatatttggccaccctgcaactcgacggtcttgaagatgctctacaacggggtggtgacccaggtgggttcgcccggctattcgaatcgatatgccgtctgggacaaactgtttcccacggccgcccagggcggaggcgctgccttgaaactcagtttcgccgtggccatcgccactggtgtggcctcccggctcatcgggaaattaatgtag

SEQ ID NO: 7437 - protein, 564 aa, DROSOPHILA
MPRFFQLTWALLLILIGFTTAVTFIGDDPVVELSLGRIQGDTMQSFGNKTIYAFRGIRYAQSPVGQLRFANPVPETSWGDEVFNATSDSLVCPQPGVVSLMSEDCLKINVFTKSFEDKFPVMVYIHGGANVLGSGHSSYEAGPQYLLDQDVVFVAFNYRLGALGFLSTNSSETKGNFGFLDQVMALEWVRDHISHFGGDPELVTIIGISAGSMAVSLHLASPLSAGLFHRAILMSGSATNHFDIDNLFWTRKLARELGCPMYDPTDVVECLRNETWTRIVEVCKAWETYQLVNMKWNYEIDGHFLHNHPTELIKEGNFNKVPLLISFTANEFDYNANVHLENQHLLHDFASNFVDYAPELFLYRHDAQIGEKLKDFYLGDNTTEINSENIENFGQIFSDAYIGHGVHRLVQLASHFTPVYYTRMDYVGDQSLSAPLNGENKPVGVGHADDLHYVLPGYWYGPLMAANDSDVFMMERLTSWFTHFAKTGTPLNSTDIWPPCNSTVLKMLYNGVVTQVGSPGYSNRYAVWDKLFPTAAQGGGAALKLSFAVAIATGVASRLIGKLM

SEQ ID NO: 7438 - DNA, 10486 bp, DROSOPHILA
ctcccctccccaccaacaatctgtatgttcttggcatggagtgtagtcgcctttaagccgccttcaaagcgaactttatttcattaacacaaccatttgcataatcctcgctttcttgctttcccgctcgctcatccggcgcatatgttcactgcctccgccttgctttgcatttattactcatacgcacgtttaactgctgaatacattttcattactcggctacactcaacccgcgacgagtaatgaataatcggcgcaataatgcaatatttcagccgggccattactggcactgttgcgtctccgtttgcggcattaaaagctggcttattgtcaaagaaacactcgagggctttaagtctgctccaagtttatggacactcggatgggcagtagaccatgcggatttgacgcagccaactcgagtgggagtgaccggcaaagaaagtaccattcaatttgattgctattaaggggaattcgaaaatccaacaatgaagtaaacaactttagttgggatgagccgggattctcggaagtttatgttacttctacagaatttaaattttctggctgataagaataattatttgtatgctactttaatattggcaagaatgtttgggaaattaaggtgtccgacaaacaaaaattaacttccaaccttgcctaagactaagactttcccaaattctatcttttctctttaatcactcgggttcaatttatcaatgacgtggaaaacaggagtaaaatatattaattagttagtatagctagttaattgtgacctgtacatataccgaaaaaaagtaacgaagcaactgaaagggtataagattgtcggtttggctaggcttgttttgttgtacttgtttcgtgccacggaatgttgaccttatgtcaaccaatacctgtgagttgcccgttggtatttgccaatttctgtcttcgtggtcggcacttgtttttatcttttgtgcttactctgattggttttcgttttgttttgttcgattttacttttattgaaaacgcagccaacttaccctgctgcgatacacacatacatatacattcaatatatataatatctggattaacttatgcgaatgagtgtcctcagcgactaatacatgtacatacacatcggaactgaaaacaatggtctgcttacgtctaatctatgtattatatctcatactgctgtatctgtatctcatgtggtaggtatagtactatatagttaaacgtagccttaggtctaggtaaatacatgaaaattattgccatacagttacaacgtcgttcaatgcgaatactgacagttttgagaagtgggatgcactgcgtctgcctctgcgtctggcggagcttacaaaagtatcaaaagagcaaaatgcattagaggacgcgtcccttgcagaatcctccccgccggattcgccgtcccgatcccgacacggatgcggagcattccgcctcctgcggcagggaggagctcctttgcagcggactcggctcatagctgccgattagtcagctgaagtccacgccctcgccgtcgtccgagcatccggatatggtcttgtggaatgttgccggtgccatcagggcacgcgccgctatcatctggaaattctccgacgcccggaagccactgcgggtgcagacgcatctgcacactatccgcttgaaggcgatgcgaaactcattcgagaagagcgcatagatcatcggattaatggccgagttgcagtagcccagccagaagagcaccgaaaagaccgtcggctgaatgcagtggtcgcagaaggcccggatcagatacatcgtgaagaagggcagccagcaaacgatgaagccgcccacaatgatggccagcgtcttggctgccttggtctccattcggaaccgcttcacctgaaacttggcgctgcgcttgcctgcccgcttcttggccgacagtgaggtggtcgagagtccggtctctaggtctccgggaccggacgcagctgcgtccaaattaaaggtggtctcgccaatgtcgaagaggctcgtcttaaaggaggcacgacgtccgttggcgctactgattaccgcatagtgtggcgatgcctgtggctgctgtcctgcgtcgaggacattctcggaggagggaaaggacaccttgatggccaccttctcgtgtcgctgtcggcagacgcgcatcgatgtggcccgcttgggggcgcctccctgaaggtgatcctcggtggaggcacccagtcccgaggccacggctccacccccgcccccgttgctgttcacgctgagagtcgaggacattgagtgcaccgagaggggcgtgcgctggggggtggagcaaggtcttcctcggtgaatgcgcaatatgagctgggactcgtccactcgattgttgcccgactcgcggggactgcctgcaattagtgagtggtgcaatttggcggagtttgcatcgcggtgacctctcatggattaatttctgtgggtttggtggtttctttggactgaatatgagtgtgtgacatggatgttggacattcagcttgtattgtacatggacatgtggttatatggacgatctgtggctgctgttggctgttggttcgaggtgtttgagttagatacaatcgtttaagtagatgcaagatacatttctccttgagtaaggtaaattaaatttgttgactggcacttcacgaagagcggttaactaactacatactgttacattgagataggtttaatggtggtaaaaacttacgactatttgagtataataaaatgcttctctacttttgtaaaatacaaacacattattcatagagagaaaagggactcattccattataaaaatctagttcatgaaaacgtacaaatattggagtttttaaaatgttttttgttttggttttttcgtttgaatttatctaggaacaggcatcgaacaggggacttgggttttatggatattgatcacatcagttataaatgcaaaatattgtcggtaattaattgttataaacaagttgtttaatttattgtggtttatttgtagggtcggttttttctttatcgtttcgagctattcgccctctgggaatggctttattagcctaattttatttattactctatgtgggattggtcggaaggggtggttcgttggtatctaagcactgaaaatggaactgaaatgctatacgccatggatatgaatgaaaaataggagaggaggaaacaaaccaatttctcaattgtcaattttttcaaaaactgtccgacgtaattaggcaaaatggccaagcccatttgttttgggctatcattgccaagttgtgaactgaataaatattggtccagatgcggatacacgtgtgcccagagttatctcaatttaaagcgaagcagccgcatttttatttgcataaaccatattaaacctattgaaagcaaatatggttcgcctatgaataaacgaagtgggtgaaaggaaaatgtgtacaaacaagaagcccaacatatgcaggattcagtaaataaaaagggatacactattgattttgttttcccctccaccaaaaataaaagttaaacaaacaatttgtatacaaatatacaacgaaatatcctaatgtatgtaaatatgccaggatgtgcaggcgcaatcccggcgaaagcctttatatttccaaggaccctgtccgagcctcgggatgtttcgcatcctgcggcgcagctgatttaaataaatgtatatctttcgcccgccactaaggataatccctgcacataaatgtacattgaaatgctgggtcgcattcgaccatttccatttcactgagcgctgtagttttcgtgcattaattcagcatttacaattcactcgcaacatttttgcgggtctttgtgtggcccttaattgaatggcatttaataataattaagcgtctgagtgccgcgaggtaattgcccagaattgatttgtccgccgccagttgttattatgcgcggacttgcatgctacgacgagcactgtcgccagcctttgaccttttggacgatgtcctggccgggacagaagacaagtgtggctgcaagtcaaggcccaggactcggctcaagttgagcctttctgccagtggcagctcgcacgaaagttgccggatcctttccgttttgttctgctcttgacacggggccagggtcacacttctgaaatttctaaggcctaacaataacagtgacctcctcctcgtggtcgggtgccgtgaaccacggcaagtttgaacttgaaacttgattaccttcaaaagccacgaaaaacgagaaaggcgcgtgggccggatggcacacctacctccaaaaataatagagaatagaggaaccaggacaaaaagcatcagcaccacccgcattgtgtcacggagcgatttccgacgttgtgcacgcacagccaagtggcccatgttcatatgtatacgacctgggctcaaaataatgggagtggacgcgctgataggaagttattttgaggaatattttaaattgaaattttcatttgatagaacaatgaatgaaaggaaaaatagaagaaattatatataattaaataaatgcctgacttgtcttgaaatcaccaaatggcttaaaacaatttaagtgtaattaatggataaggcataaacagttgaactgatttagtgctaaacaaaattatatgcctttcgctaaacaagtaaaaatgtaaaaaagcgtttaagttatattttctggcggtgtatccacataaaactataacgagctgccccgcgtgtgggtgtgtgggtaaacatctctctttagccgcctccaaatgtgtgtgtgtgtgtgtttgtttgcgaggagacaaagcatatttcaaggctgccacacgacgattctcgccagtgttggtgggtgggtgtgagtgtctgtgtgggctgctggcaaatctgggctttgtgctcaaaatggcgccaactaacgacacgacagtgccaaaacaataacaactgccaaggcaacgggagcaagaatgtcgacaagagcattggtcttaagctgctggcaccgaaatgcactatccgcttccgttttttgaaaagcaactgaactccaatatggcggcagtcagcgccccaaagtatgcaatcacgtttaaaatgcaatttcgtcgcatactcgtacatcgcagagctgcaggatttgtggggcccataaattagcggggagcactgatttgcactggcacgaaggttggctattgattttcccgctgaagttagtcggtcggtcggttgacttagttacggcagattatcggcgaatgcgtgctatggatagaatggaacataatatttccgagaagtgtgcccaatgagctgatcacgcggaagaaagtgcgctgtggccctggccaagtaatgggccacatattaaaataaacacccagtgccagtctaatgggggctcccgacttcaaacacaatctgctcccggggattatcgccaccacagcgtctttggggaccagtgaggcctgaaacgacaaaaacctaagaaaatagaaaattgcaaacagaacatgctaacagggaagacatattatattttatttcgttttagccgatggctcgctttcatgtctgccattttctggctggaatcccgctcctatttaatcccaacctcaattttatctaagccgatttgtttgatgtgcttcctcagcgtttatcgatttcttgtttttgcccaacttggaatataatgctaattatgatgcgtgacttcttctttgagcatgtgatttatattatgctgtaatttaaaaggaatgagacatgagcaggacgttgattgtgggtattaaggattgattgaaactcgaaaggagttaggttaagccaattgggtatttcataggttcatagcgggttattcacaatttaaagttggagcgcttgttaatcatacgcatctatatgttcacatagttgggtacactaagctaattaaaatttatgagttaggactttccggtactaagttattatcacattcatttgaataaagtagggggatttaaattacaaggattttaatttgctccgtgctttacagagtttttggtttatttaaaatatattttcctctctttgcttacataaaaatgagaactctattttcaattggttttaaggggttgactttgtaatgcctgggctttcactaagtgtatatgcatatgtatacttataaatttactcatttccaggttatttatcatgtttatttatgtgcaaaacacaaaaacaaattgccgacatatgtatatataaatgtttggatgtgtgcgtgaagttatttatgaatgtaaatttagtggtactctttttagcgccatcgatttatacatttccgccgtgtaagttgttatacactcccccgacaatttatgctcttcgggtgttggttattcaggggggacgaggacaaggtcgagtgggtggttctgtgggggtgtctggaatgctcagtgtgtgaatttgtacacttttcggtaggataaccaaaataaaacgggacaaacgggacgtcacactattgactacacgtcgagagattttaaattgtttagcaatcgatattaaagcttgaataaaaggaactagctacgtgattacgttacttatttggtaagtaaacaaatatatatatatatatatatgtatatatagagagatagtgatgagtatcaaaaccaaactgttagctacgcacacgttaaaccaaactgatggtgacaaggttcaaacaaatcgtgtccaaatgagctggtggttgtggttgctgggtcagttaactacggatataacttacccttggtggtcttgaagccctggttgatggctctcgtcgttctcacggcagcccggtagatgcgccagtagaagaagagcatcacgaacatgggtatatagaatgagcccagggcggagtacaggacataaccccgatcgttggtcagctcgcacttccacggacaactgccggaaattgtttggggtctgttctgcggcggtgcgttcagtagatcgaggtccatttccgtttccgtggtgctcgagctggacgctgtcgtcgtggtggttgcggttgttgaagtactggtcgagtcaatggccgcaatccgaatctccgcggatccatcgatgggtgcgaaaccgggatcgtagggattgtaggcgttgccgttgccgatatggggcggggatggaggcaaggatgcctcgccctggtccttaatgctatctaaccctagttgaccatcctccgagcttgacatcgtggtggtgtagtaaagcgtatggtttccctttggataggtcggctgtataaccgcctagaatgaagagtagagtagagtagagtagagtagagtagagtagagggatatgggatcatgagatgatacttgatattcggaggaccacattaaaattccaccctcgtcctggcaccctcttcacggcgccaagaagccaataaaaatgcaacttaaagcgggttatattgccagagatattcgccgacgtgttgcgcataaatattactcgtggctaaaggtggcgttaacaaaaagccaacagaccggcgaaataaatgccgcgagctgtatgtgagaacatgttgggccatcagagaaggagaatcagggcatgttgcccaacccatcgcatcctgactatacgccgtaataataatcgatgccaacagcctcgactcgctaaccgggtttcagcctggcagcgggctgaatgccagccattcaaacgtggcccattcaactgcactcagccactgcagttgtgaatcgcatcgaattgaattgaattcagttgagttgaatggtatggaatgtccttcgaaaggatacattttcgcatgtgcagctattgggaagccatcacatcatcggcaccttgatgcaaactggatttatatgtctggctgggcaaatacaagcagtagtacaaccaaaagactggagcagggccaaaaggcgagtagtcatgtatcctgcccgatctgattacccagtgactggggtgcccataaattgtgcgccccggcatgttggcaattttgttgcggcatgtgtaacacatcattatcaatgtcgttgcgtaagaataatgtcaaataatgtccccagaaaaggggacaaaattagaagcaagtcccttcctttcaaaaggacgaaattcgtgtcttgttttacggtaattttggcacaaatgagccggattgcagtcttcaggaccagccagtgtcgcttccattgtcgatgtggttgagagaaaccactgctgccaaccccaaaatggtgtcaatgacagaatggccctcagttttggggctatagaaacaacttttggcagtcggtcgcctgactgcctgtcggcctggcttttgttctttatgaggctgacttgagcgtgctaaaaacagtttaccgactttcaattttgccggcccttttcggcttcaacgttggcagagacaaaccgcgtttcccatttaccccgttaatttatcgcatcgggtcacttgtgggtcagttgctgcccccaacttaccttttgatccttccagccgactagcggcggaaagcaaataaaaaatgagagtacccaaatgccggcgattaaggacttggccttcttcgtggacattatgcttgggtaggtgacgggtcgtgtgaccgccacatagcggtccagtgatatggcacacagattcaggatcgatgccgtgcacatccagacatcgacagccagccaaatgcggcaccagagatcgccgaatatccaaacctaagggttgcaaagtatgaaatattttaataaaaaagaatcactaatattgcgtaattgttgtaaaataaaaaaaatgaattttctatttagattatgattagtgatcttattcgaatgaatttctgaatgtaagtattgttcaaatgcttccattgtaattaaagcatcatttggtttagcatctcaaaacatttcatttcatacattagacatttctaaaacgtggtggcttgattgaaatttaactactagaacttaccttgaagacttcccaggtggctgagaagggtaggacggccaaacccaccagaagatcggccacagctaggttgacaataaagaagttcgtcacactcctcaacttattcgaacagaagacggcggcaatcacgaggcagttgccaccgatgaccagaacgttgatgaactcgagtacggccagggagatcagattggctggttccgtccatttcacagatttgatgagatcctcgcactctgtttcattcatggcggtacttttgagatgggtgtgtatctgagttcaccacctgcaacagacagcagcagacaacacggggaagttttataaaaaaaaaacgatacacaacaaaacatttgactggccacctaattgctgccacaacctgccctcgcgtgcctaattaatttataaaaaggctggcctataaatagtccaaaaatgaatggaacagtcgttgaacgaggaaacccaaatgaaatataaatgtgcgtgggttagacatgaccagaaggcattactctattttgggaacaatgtgaactgagccacactttcaaattgcttgacaataattggaatttgaaaaatacaaacaatgtgcttgggccttaaactaaaaattgtaaagatttttctatttgttatacaaattacacaaattttttgtaaattgaagaggtgctttgctggttatccctttaaatacactgtgacgaaaacgtatcattacaaggataagagaaatcgccccaagccataaatgtaaaaatagggcaattaagggcagaagtgaacaaaaagatgggcagaatgagcaggagggctgaaaaataaaagaggatgtgccgcaatgccggtggcgtatttgcttaattgttttgtaagacaacataagcccaacctttgggtctcatccgacgctgacctgggccaataatgtaaaattaaatactcgtggatatataatactgaatggtaattatatttatgtacacatatacatattctgagtcggcggatggaagtcgtacacacatcttgcacacttggtattcaactgcagttgcacattgcaatttaattgccgtaattaattaagctcgtttgcaatacgttcgagtgcgtgagtgtgtgttgcgtgaactttatgaatgaatttgctgccgaattggcactgtcagcacttttcaattattgtggaggaactgaatgaagaggagtgcactcaaatagctgataatgcccgataaaatataaaatcggctaaacaagcaatcaactgccataaagt

SEQ ID NO: 7439 - DNA, 2501 bp, DROSOPHILA
tgcaggtggtgaactcagatacacacccatctcaaaagtaccgccatgaatgaaacagagtgcgaggatctcatcaaatctgtgaaatggacggaaccagccaatctgatctccctggccgtactcgagttcatcaacgttctggtcatcggtggcaactgcctcgtgattgccgccgtcttctgttcgaataagttgaggagtgtgacgaacttctttattgtcaacctagctgtggccgatcttctggtgggtttggccgtcctacccttctcagccacctgggaagtcttcaaggtttggatattcggcgatctctggtgccgcatttggctggctgtcgatgtctggatgtgcacggcatcgatcctgaatctgtgtgccatatcactggaccgctatgtggcggtcacacgacccgtcacctacccaagcataatgtccacgaagaaggccaagtccttaatcgccggcatttgggtactctcattttttatttgctttccgccgctagtcggctggaaggatcaaaaggcggttatacagccgacctatccaaagggaaaccatacgctttactacaccaccacgatgtcaagctcggaggatggtcaactagggttagatagcattaaggaccagggcgaggcatccttgcctccatccccgccccatatcggcaacggcaacgcctacaatccctacgatcccggtttcgcacccatcgatggatccgcggagattcggattgcggccattgactcgaccagtacttcaacaaccgcaaccaccacgacgacagcgtccagctcgagcaccacggaaacggaaatggacctcgatctactgaacgcaccgccgcagaacagaccccaaacaatttccggcagttgtccgtggaagtgcgagctgaccaacgatcggggttatgtcctgtactccgccctgggctcattctatatacccatgttcgtgatgctcttcttctactggcgcatctaccgggctgccgtgagaacgacgagagccatcaaccagggcttcaagaccaccaagggcagtccccgcgagtcgggcaacaatcgagtggacgagtcccagctcatattgcgcattcaccgaggaagaccttgctccaccccccagcgcacgcccctctcggtgcactcaatgtcctcgactctcagcgtgaacagcaacgggggcgggggtggagccgtggcctcgggactgggtgcctccaccgaggatcaccttcagggaggcgcccccaagcgggccacatcgatgcgcgtctgccgacagcgacacgagaaggtggccatcaaggtgtcctttccctcctccgagaatgtcctcgacgcaggacagcagccacaggcatcgccacactatgcggtaatcagtagcgccaacggacgtcgtgcctcctttaagacgagcctcttcgacattggcgagaccacctttaatttggacgcagctgcgtccggtcccggagacctagagaccggactctcgaccacctcactgtcggccaagaagcgggcaggcaagcgcagcgccaagtttcaggtgaagcggttccgaatggagaccaaggcagccaagacgctggccatcattgtgggcggcttcatcgtttgctggctgcccttcttcacgatgtatctgatccgggccttctgcgaccactgcattcagccgacggtcttttcggtgctcttctggctgggctactgcaactcggccattaatccgatgatctatgcgctcttctcgaatgagtttcgcatcgccttcaagcggatagtgtgcagatgcgtctgcacccgcagtggcttccgggcgtcggagaatttccagatgatagcggcgcgtgccctgatggcaccggcaacattccacaagaccatatccggatgctcggacgacggcgagggcgtggacttcagctgactaatcggcagctatgagccgagtccgctgcaaaggagctcctccctgccgcaggaggcggaatgctccgcatccgtgtcgggatcgggacggcgaatccggcggggaggattctgcaagggacgcgtcctctaatgcattttgctcttttgatacttttgtaagctccgccagacgcagaggcagacgcagtgcatcccacttctcaaaactgtcagtattcgcattgaacgacgttgtaactgtatggcaataattttcatgtatttacctagacctaaggctacgtttaactatatagtactatacctaccacatgagatacagatacagcagtatgagatataatacatagattagacgtaagcagaccattgttttcagttccgatgtgtatgtacatgtattagtcgctgaggacactcattcgcataagttaatccagatattatatatattgaatgtatatgtatgtgtgtatcgcagcagggtaagttggctgcgttttcaataaaagtaaaatcgaacaaaacaaaacgaaa

SEQ ID NO: 7440 - protein, 637 aa, DROSOPHILA
MNETECEDLIKSVKWTEPANLISLAVLEFINVLVIGGNCLVIAAVFCSNKLRSVTNFFIVNLAVADLLVGLAVLPFSATWEVFKVWIFGDLWCRIWLAVDVWMCTASILNLCAISLDRYVAVTRPVTYPSIMSTKKAKSLIAGIWVLSFFICFPPLVGWKDQKAVIQPTYPKGNHTLYYTTTMSSSEDGQLGLDSIKDQGEASLPPSPPHIGNGNAYNPYDPGFAPIDGSAEIRIAAIDSTSTSTTATTTTTASSSSTTETEMDLDLLNAPPQNRPQTISGSCPWKCELTNDRGYVLYSALGSFYIPMFVMLFFYWRIYRAAVRTTRAINQGFKTTKGSPRESGNNRVDESQLILRIHRGRPCSTPQRTPLSVHSMSSTLSVNSNGGGGGAVASGLGASTEDHLQGGAPKRATSMRVCRQRHEKVAIKVSFPSSENVLDAGQQPQASPHYAVISSANGRRASFKTSLFDIGETTFNLDAAASGPGDLETGLSTTSLSAKKRAGKRSAKFQVKRFRMETKAAKTLAIIVGGFIVCWLPFFTMYLIRAFCDHCIQPTVFSVLFWLGYCNSAINPMIYALFSNEFRIAFKRIVCRCVCTRSGFRASENFQMIAARALMAPATFHKTISGCSDDGEGVDFS

SEQ ID NO: 7441 - DNA, 4558 bp, DROSOPHILA
ctacctatactccagtacttcggtgctgtccactatttcaccgcaggagagcttctcccacatcgaggagtcctcgattgggggcagcgatgacgccagattagcatcccacagaaccggacacaagttgtgcgttaatgaaggtacaatacttcttcgtctgctgcgtattttagttgtaaagcatccctttgtcattctagccaagcacaacaaaatggacactctttacgcgaaacagttccagctaaacacctcagtgagtaaccacgagctgagggtctcgttacctgactcaagccacacagaaatcggcggttcaatatgctcctcgaaatccgagaacgatatattcaagaacaagcttcagccctgcgtctccacttataacgtagttagtctgcacgacgtgagcacgaaacccaagaagcttgatctgaaatgaagttcgaaatccgttgtgtacatgtgtaaatcgaatctgagcatactgtcatatgtaaatagcaacatttgtgaaaggacaattaagtattggggcggaaaagcatgtagatgaataaatcaatttaattgttactctacagcgttttgatggaggcgttcttacctttgatcggtcgaagcccaaataaataaactacactccgctctagcgcaacaaataactgaataacactttaatagcttcgtatggaatcgtcacgatttaacaactttctatacacatacatagagactacgaaaagtaagcgtttaactaaatatcattatggattcttgtgcgacttgattgactgaggtcaacagccccaccagatcgtacaatcacgtggtcatatatgaacgtgacggtatcaaacggcgggatttggaatgctttgcctgctaaccattacaattatccaggttttaatgggttcctaagtttaaacagctcgcaaactttttacaaatgtatatatatatactgtaagcgtaagcccgctacaaaatggttctaaaatatcgtatcggtgttgtcgtatttgcggtcccaatatcccccgctgtataaccaatcgtcgatctttgtatgtgggttagttgcgtatttaaaccacctgcaatgggtataagcgcaatgagcaatccaccggttgaatgcaatcagacttttttacctgggggaccagtcatcgctattggtggacttcctttgttttcgtgtgtgcctttgtttctcctcgagacgggtcttctccttggaggcaccatccaagttaccttcctctaggtgtaatatatcaggtcgcaatcgcgaatcggtagggcatagtgtcagcggtggtttcatgttgctatccatggcgttaagctgcagcgcaaaatgcgtaaactggtagtactgcaatgtagaagttagactggagattaaactggactgcgattcagggtttctgggaggatgacccacctcgctacagttggagggtctgggcttacagctccacaaggtcgtcgagtcgggaatgtcaagtgagtacgcggagtcactcttcgggatgtcgccttcctgctccataggtggatagctatcgctctgaaatgtaacaatttttgagatactcatcgcgggtaactcaagaaagtcttacacttacgtcttgaatggacaggctgcgaaatgagtttagcttaaaactattcaatttcgagaacatcttctttggagttccgttcggagagccatcgtagtcatcgttcttcctggttccctgcttcaaaaactggacgtaggactcggcagagcagcatttaatgaactcggtccatttcccgtagaggaagtatagattggtttcactagggttgatttttgtctcggattaacaactagccgaacttgtttaaagctatatgtatttacctagcatccttcacaaatccctctactcggtgcaagtttttagctccagatccggcggacttgaaggtgagactagccacatggccagtggcgtggttagtgatctccatctttccatactgctcaatccacagcctgcccactattatgttgtgtacacagcaattgacattagtccaactgtagctctcgttccatctggaaaaacaccgagataagtgttaatttttttgctaaaacgtatacaaggaaacctactttggaaactcgacggtcacagttcccttcggattcacctcaacactcttgccccagaacttgatttttgggctaatcgtgccgtggaacttgaagtccttggactctgcgtgaaatgcagacactggaggatggtgggaaacctgctcgcagacgattcggtagtcgcccttctgcagctcgtatgtttcaccaagcagaggattaaaaggttttcccaggcgctcccagttggaggctaatgctgatacggcaaaagctgaaagataatttttagtaagaacatatcgcacacaaatgtattacaaattaactgaagcagataaaacattcacttttgttggagatgtatgcatatttcgagatgtagtcattgaactcagtataaagactcataaattcagtgcggaaaaggaatccattaccacagacaatacgttttgcaggagcaacacccttatcgtttagtggtcaataaaggaaacataatcagcgagtactctatccggcatataaactattataggtacagacaggaatcggtgtacatttggaataacgccgatcacttacaggtgggttgataagccctaacttttgataacactcacccgccacgtatttcatccgatctgccgggtgttcctgctgagctgcttcggtgagcagttgtgcgtactccatgtactcacagagcctctgaaggaagctcaatggttcgttcagcatgaccggcatggtgattttgctcaggtccttgccgatgcagttcttcagaatggcccagatgcttacctccttgcgggaaatcatcgtggccggaagctcagttctgtgggtgataagatatggcgcggatgagtaatgtcaaccggaatcacttggactacgcacctttccacatgctctgcgtagtcgccctctgccatcttgggtgtggaagcaggtgcagctttaatcgactggaatcagattgttatagcgtgtctctgtgggttaattgattgctagttgaccctctgctgtggagaccaataagtttacgcacggaaagacatgtgagtggaattgcgatgatgcgggccaacggtgggccagtccgaaatctagacaggattatactctgaaggtgagataagccgataattttggctgtgggagtgggtacccacacatgtgcaattcataccttttactcgttttctactttttcgatttcgattgattgtaatcttgtgaccagggctcgtcactcattgatttttctgctgcaaatgaaggctggacttgttagttgtgaatgtgagtgggctgagatctgctttgtttcgcctcacatcgtgccgaaactgagttcctattgagctaattgaggtgtttgcgtgttgtacctagcgcttactctaaaatataggctgtgcacgaaaatttaatcaatagtgataagaaagctttcgccagctttctgagagcgagctttcgcagggttgctttcgctgaatcgatttgtgattactctcgtcgactaacgggtctgtgtgggtgtttaacgttttggttgtacctgcctgtatatgaaaatacagtaagcactcaattgtgttaaactcaaattaataaataacgtttgcagaatatcgtctataaaaaatttgtagaatttcagaagctttggactttggggcttcccaacactgcaaaacgttacatatttatcgccattgcaaatatagagtctagtagtttagaaatatatcttttaaattatcatagaatatttttataaaagcagactgaatatgtttattacgccacttaaaaagttgtttttatcaacacccaaaaatatgctaaatgaagcaccgaaggccgttttcatttgattgattgaatggagcagagttaaatttgaatagtttcgctttaattaaccagataatatatttatatatatagaatttgcatgttgtacacttatatatattccatatatacaagaaataaaaacaacattcctcttaacactacttcgcagctaattgactaaaatgtggtgagcagctcctcctggatgctattcgatcgaagtagttgagtaggggtaggtccgccggcgaccgtgttcaggactttggaggacgtagccgaggcgttcttgaggtcgtgatactcgtcgcagaacgtctagtggtggatagtggagatagcattacgtcaaacatggattaccttcattgcttaccttgagacggctgcccaggaagatggcacgctcgcgcttcctgaccatgtagtccgacgacatgagccacctgtgctccaagcaatcctcggtgtatggccgctttctgaattttcaaaagaaaagtgtacagagtcattgagtcattg

SEQ ID NO: 7442 - DNA, 1747 bp, DROSOPHILA
gtacaacacgcaaacacctcaattagctcaataggaactcagtttcggcacgatgtgaggcgaaacaaagcagatctcagcccactcacattcacaactaacaagtccagccttcatttgcagcagaaaaatcaatgagtgacgagccctggtcacaagattacaatcaatcgaaatcgaaaaagtagaaaacgagtaaaagatttcggactggcccaccgttggcccgcatcatcgcaattccactcacatgtctttccgtgcgtaaacttattggtctccacagcagagggtcaactagcaatcaattaacccacagagacacgctataacaatctgattccagtcgattaaagctgcacctgcttccacacccaagatggcagagggcgactacgcagagcatgtggaaagaactgagcttccggccacgatgatttcccgcaaggaggtaagcatctgggccattctgaagaactgcatcggcaaggacctgagcaaaatcaccatgccggtcatgctgaacgaaccattgagcttccttcagaggctctgtgagtacatggagtacgcacaactgctcaccgaagcagctcagcaggaacacccggcagatcggatgaaatacgtggcggcttttgccgtatcagcattagcctccaactgggagcgcctgggaaaaccttttaatcctctgcttggtgaaacatacgagctgcagaagggcgactaccgaatcgtctgcgagcaggtttcccaccatcctccagtgtctgcatttcacgcagagtccaaggacttcaagttccacggcacgattagcccaaaaatcaagttctggggcaagagtgttgaggtgaatccgaagggaactgtgaccgtcgagtttccaaaatggaacgagagctacagttggactaatgtcaattgctgtgtacacaacataatagtgggcaggctgtggattgagcagtatggaaagatggagatcactaaccacgccactggccatgtggctagtctcaccttcaagtccgccggatctggagctaaaaacttgcaccgagtagagggatttgtgaaggatgctagtgaaaccaatctatacttcctctacgggaaatggaccgagttcattaaatgctgctctgccgagtcctacgtccagtttttgaagcagggaaccaggaagaacgatgactacgatggctctccgaacggaactccaaagaagatgttctcgaaattgaatagttttaagctaaactcatttcgcagcctgtccattcaagacagcgatagctatccacctatggagcaggaaggcgacatcccgaagagtgactccgcgtactcacttgacattcccgactcgacgaccttgtggagctgtaagcccagaccctccaactgtagcgagtactaccagtttacgcattttgcgctgcagcttaacgccatggatagcaacatgaaaccaccgctgacactatgccctaccgattcgcgattgcgacctgatatattacacctagaggaaggtaacttggatggtgcctccaaggagaagacccgtctcgaggagaaacaaaggcacacacgaaaacaaaggaagtccaccaatagcgatgactggtcccccaggtggtttaaatacgcaactaacccacatacaaagatcgacgattggttatacagcgggggatattgggaccgcaaatacgacaacaccgatacgatattttag

SEQ ID NO: 7443 - protein, 455 aa, DROSOPHILA
MAEGDYAEHVERTELPATMISRKEVSIWAILKNCIGKDLSKITMPVMLNEPLSFLQRLCEYMEYAQLLTEAAQQEHPADRMKYVAAFAVSALASNWERLGKPFNPLLGETYELQKGDYRIVCEQVSHHPPVSAFHAESKDFKFHGTISPKIKFWGKSVEVNPKGTVTVEFPKWNESYSWTNVNCCVHNIIVGRLWIEQYGKMEITNHATGHVASLTFKSAGSGAKNLHRVEGFVKDASETNLYFLYGKWTEFIKCCSAESYVQFLKQGTRKNDDYDGSPNGTPKKMFSKLNSFKLNSFRSLSIQDSDSYPPMEQEGDIPKSDSAYSLDIPDSTTLWSCKPRPSNCSEYYQFTHFALQLNAMDSNMKPPLTLCPTDSRLRPDILHLEEGNLDGASKEKTRLEEKQRHTRKQRKSTNSDDWSPRWFKYATNPHTKIDDWLYSGGYWDRKYDNTDTIF

SEQ ID NO: 7444 - DNA, 2651 bp, DROSOPHILA
atgctccataatgttatcagtgaaggcgacaatgcggctgaatgggaattgtgtgggggcggagatttcccatcggcagtcgggagcaatcaaaatgtgtaaattagcagtggcaggtaacaaatcctcatcgtcgccgtgatgtccgtgcacatcctcccgttacaaggatcgtgatcacagcagacagcagagagcagccagaattgcaatttccactttaatctccgctgcacacggagcacggccacagcttataattccgtttataattacacacaagccagaaaaccctgcctgcatttccaactgcattctgaccccaggacgacaaatgttgtcagcgctgcaaaagtgctggcccaaaaacctggcggcaacactcccctaattagcgcaaaactcggcggatgtcagcccaaccgaaggaaaccgaacccatctcaactgagtagaaatgacctgaacctctgaactgctgaactgctgaacctaaccagctcagctgccggatttcgagtggaaagtggcatctggcgtgcggcatttggaatttacaattacgccggtggcgaaatgcactggagcctcaggtcggaaaatcgattgcagtttggccaatcaattatgcacagcctggaaccataaggacacaacgaactgcagcactgcaaggaattcagccaagcgatttatgagtttttgcgaattgagctaatgactttatagatgcacaaaataaatgaatcgacttcaatttaatttgcgtatataacacttagaaagttttggtaattacttttattgttttaaaattatacccctttaccagcaatgtttagatattaagttactttgaaaaatttaaattttgaattggtcaaaatatacccacaacttaactgtctacaaaatattccttgaacattacaatacatttcaaattttgtgcttgtagaattgtttaaatatttttgttgctcacagctgatcataaattatggtgtcgaaagtttctcgcgatacgatttacgttgcagtcaaaaatatcctgctgaactcgcaggccaaaggaccagactgcctggagacggtggagctgcagattgggctgagggattatgatcctgacaaatgcaagcggttccatggaagtgtactattgcatcacctggcggttccacaactaaaggtctgcgtcttcggggatcaggagcactgttataaggccaaagccataggagttgattgcctagatgtggaggctttgaaaaagctgaacaaagatcccaagttgacaaagaagttgtccaaagcttacgatgtcttcctggcctccgaatcgataattaagcagatcccaaggctactgggtcctggtctcaccaatgcgggcaaatttcttactcctttggctcgtggcgaatctatgagttccaaaatcaaaatactatctaccaaaaagaagcatatgaaaaggatggaatgtctttccgttaatgttggccatgttggcatgcacccagaggaactagctcgaaacatagcaatatcgatcaactttttagtgtccttgctgaaggataactggcagaatgtgcgctcacttcatataaaatcatcgttgggcgtacctcatcagctctattgaaagtttcctaatcgaaagtgtaaagagtagtgtctatttgtgtaaagtatgcgtgcaataaaatttcagtattattattgttttttttttcaaaaaatatattatcagttgataataaatttactcgttttaaagtagaattgcaatctaccacaattaagcccttttttcaaagcattttgtcaattttttgtttatctttttgtcttctccgctttttcctcaagtattcgacaaaatctcagtaagctgtgacataatttctttggcctcacatcccactctttatttggcttatgagcaatcccctttgttagcccaacgatatattataaatttcttttcgagtttttccgagatgtggaggggattggtctaagccaagccggggagataagacaagttcacggcacatgctgagcacgctaatcaggaagtcatttttattggggatccagcaaagaggcaacaaatgtgctgcgcttgacttgtccgcaataattatggctgtttgttgctgcgttgataagaacgtggaaataattacggcctaggcaaaaactttgatccggatgggaaaaccgccgccagattggcgcctaccatgaataaactgaaactaaataacaaattttaatatagattaaaaaatcaaaagtacagcaaacaatgtcgcttcaaattgcggaaatataacaattgtattggcatactgttaatttaactgattttaagtaagtttaagcaacattaagcatttttaatgaatattaattaaggttttctcatccgaaaggattcccaaactgtcccattatgttggtcattctcagctgaaacgaacttttggtatgcaagtcggatggaaaatgtgtcatcctgaaaagaagttgctaatttcttattcaaattaaatatgagcggctgctccagccttggagctcttggaaaacatatcggaaaactcaattacgaattcatttcgcttgtcaactttgac

SEQ ID NO: 7445 - DNA, 651 bp, DROSOPHILA
atggtgtcgaaagtttctcgcgatacgatttacgttgcagtcaaaaatatcctgctgaactcgcaggccaaaggaccagactgcctggagacggtggagctgcagattgggctgagggattatgatcctgacaaatgcaagcggttccatggaagtgtactattgcatcacctggcggttccacaactaaaggtctgcgtcttcggggatcaggagcactgttataaggccaaagccataggagttgattgcctagatgtggaggctttgaaaaagctgaacaaagatcccaagttgacaaagaagttgtccaaagcttacgatgtcttcctggcctccgaatcgataattaagcagatcccaaggctactgggtcctggtctcaccaatgcgggcaaatttcttactcctttggctcgtggcgaatctatgagttccaaaatcaaaatactatctaccaaaaagaagcatatgaaaaggatggaatgtctttccgttaatgttggccatgttggcatgcacccagaggaactagctcgaaacatagcaatatcgatcaactttttagtgtccttgctgaaggataactggcagaatgtgcgctcacttcatataaaatcatcgttgggcgtacctcatcagctctattga

SEQ ID NO: 7446 - protein, 216 aa, DROSOPHILA
MVSKVSRDTIYVAVKNILLNSQAKGPDCLETVELQIGLRDYDPDKCKRFHGSVLLHHLAVPQLKVCVFGDQEHCYKAKAIGVDCLDVEALKKLNKDPKLTKKLSKAYDVFLASESIIKQIPRLLGPGLTNAGKFLTPLARGESMSSKIKILSTKKKHMKRMECLSVNVGHVGMHPEELARNIAISINFLVSLLKDNWQNVRSLHIKSSLGVPHQLY

SEQ ID NO: 7447 - DNA, 9620 bp, DROSOPHILA
cctgaagaacttcgacatactcaccctggctgccgcagtccagctccagaggcttctggcgctggccaagcgaagatcttaggtgcaatatctgtcgtccccatttcgtaatttccagtttgccgtttgcaataagttggaataaaagatcacgtgcgtaaaatggtggcataaaatttacttagctactatttaaggggatgaaaaatacacgttgttcggagttagttaatgtacttaaaagtaatcgcaaactatttaaataaaataaaatagaagtaggtgttcatatccttatcagtgtatatattcaaagaaggttgcgcacgatacacgcagcgaaagaaggatcgctccccatgtaaagtggccgaatattgaaagataaccgctacaattatgataataataataatggtaaacagaggggaaggcacacacgcataaagtcaagttttgggttggccatcggggcggtcagtttcctcgcgataattgcaatggtggtagtgatgaatgtggagatggtgctaaaacaaataaaattaggtgctccagcgactgtgtgaggagagggggtccgaaatacattacaggggtggtcgtgtcctagcagtaacatttatattctttctatgtagaaacgatagcaattattcaatttaaactatgaagacactctccacttttgcacttaagagcgatataaaggatacgaattggctacagtgggcacatatacaaaacttacaaggtcatatgctctccacgagcatatctgcatatagcatataaactatatatatataaatatatatatatatatatctatatatataaatgtacacgaactataatgcttagcgaatctagctacttgatcagatacaagtcctgttcctgttcctgtctctactcctgttcatgttcactgggagcgacgtgctcgccgccgcttcttgcgcttcctttggtcctccgctagaggctcctcccgactctagttcatccacttgcgacagttgggcgctccacaggcgcacggtatcttgtgcgactcgtcctcaatgtcgaacttgtagtcgtacgagagctaaagcacagaatttaagagatattgtgagttaaggtacaggcgaaacacttctatttgcgggacccacctcctcgccgcgatagatcttccgcttggcgaatattatgatccgcacgtcgcgatcgacctccactatctcggtaacacagttgggattgcacgaatggttgatgtagcgcgccaacccgccgcttagagtggcgtccaccacgcggtcttcatccagccggaacatgtagatgccacggttctggggaatcagagattagtcaaagttacaagaaaacatggtcgcgaaacccaccttggactcgtactgcttctcgcgtatctcggagacctcggtgcggataacctcgccaatgtactcgattatcatggtgtgcttttcaatgtcccgagctgcatacaagccaagaccctggatcttagatctagaaaatgagagcttaagtaatcagtggttattgactaggacctaatgtctcacctcgccaagtagacgttgttgcgccactcctgcttcatctttttgtactgggagctcttcgaatgcacgaactgcttgctgtacgggcaggccacttctccggcaatcgcagccgagttggccatccgctgcgtgctgcagctgccggccgtgcgttgcgtatgcggcttcctccagacgagcagctgtcgttgcttgggttccgtacgcgccgctccagacggattgatggctagcgggaactcaagaagcgggttgcgaccgtacttgaagcggtagtcagtgagcgtctcaatgcccgggaggctttccaggattcgcacaatggccggttccgttaggccaaataggtcctcaccactgatgtgctggggaaagagctgcaaccacttgtgcaccttacgcagtcgcgtgattggctgcagaatctgctgccagaccgccgagggcgaactgccccgaaactcgcgctccggctccttgtcgccggcgtcctgcacctggatgcgaaactcgggcttgcatccggcctctgcgatactgcaaatgtatcgacacctacgattgggtcgtcgcacgcaccagtagtagcgactctatgggggaggaagaggaacgggatttaagattgctgttcataaacatggcggccgaccggctggtacttgtacttaccaccttgtagccaatggggtagatgtagtggggtgtgtggaaggcctccagctgatgcggcagtaactgacccacgttcaggaacgtcatgttgcccacacggagcaggttgcttagctctgaatagtgcatgacggtggccacctgacggttttcatcccgatcgacaaaaactctccggtggacaaccagggagctcagttcattatctgccacagagcctcctaatccggcgccagtcgtggcgcctgctcctgcacccatcgtgatgccggcatgagcatgaccatgaacgctgcagtgcacggacttgttcttgtaaaagacgcactcctcgcgaatggcgcatggcaggtggtacaggctgttgcagcgcgacttgaaacacttgatggtggcgcctggttggtgacaagcgctacacgcctggctcagtcccgcttgcagagctgtctggaagttcatcagcgccccagacaccgtctcgtacacgccgttggaccacagggcgcagttaaggtgaacctgtatgtgaaagtgtacattaagctgtgatgcaatcaatcattagggttacactttctacttacccatttatccacatcgaagttaagcagtcgcgagggtccatctgcctggccgtcaccacgctgattgcagaagacacactgccgcgtgtcctccaactgcagcccactggtctctgtttcccacacagtattattgaccggtccagccccagttccggcaccagcagttccgtcgagctccagtccggatggcgccgagtccgtggtgaagcaatcagcactaaaacacttcacaatgcatttgcgctgtgcggggatatttgtggggttgcccggtacgctcggcgttttctcatcctcgtcctccggttcttgtttgaccaccatttccgctggggcagttgagctggcgcagaagctgccaggcgagtctccgttggatgattttacagcagaaccgccggctggctgaagcagcagactagccgcctccgcctggccatcctttccattccacttgaatctcgcaaagcaggcgcgatcgcagaagtacacaaaaggagggggaaccgattttcttggcagcatgtccatcagttgagccaaccgggggagttgctcttctagggcaggaacactgtgccgaggaactcgcagcccagtggcgtgaaccacatttccgcagctgcggcagagcttacgacgcccgttgaggatcttcctcagatgaccgtgactcacttgactcagtggtcgcttgaagtcgacgtgcttttcatcgtcctgattcataaactggtcctccaacttgttgccaatcttgtcctcgatgatcttgcaggtaagggcgggcgccaagtgcagtagattggccagatcccgcagcacgccggctatgttctccgatgccgaggcgggcagtgcgagtatcacattctggttcttctgctggtaattgttattattattattgcccagcggtcccattcccagctccatctgctgtgtcttgcgcagctcttcgccgcaggatcgaagcagtggagacacgggaaagcgcatggtcagcggatcctccggcagtgcgaccggcgacatccgtccatggcaacggctgtttccattgagcagtattagacccggatagcgggtaagtcgtggaagagtcgcccacgcagctacgccctcgctctccaccaggtctacggtctccaaattgcaatccttgacggctccaatgtgccgcaccaggcgttccctaggattgcgctccatatgcgtggagaactcctggtcataaaaatcattttggatgctagacattggtagcatcttttctgctcccggagactctgctggcgagggtgaacgggttcgtgcagatccaccaactagacctctacttccgccaaagcgttcgctatcgtacaacgagggtatccctggcagattcactcgaccatagcggccgagaacggtgccatcacagtcctccagaccttccaaatgcctgctcagtggccagcctcgagatccgcccttcagctttcctcctccagccgatgatgatccggcagaagccgcagaactcattgaggcgggcgaaccacctccagaagtctcgttgctcccgataagaaagtgaaagttgcgattgagatgcggctccagaacttgaagcggctgcatttggcggatgtgcgtcagcaacttctcggtaaatgcatcgtgatcctcttctaccttggagaacttgcgaacccgcttcttgagcatgggcgaggaactggctccagtactggcgcccactcctcccaaagtaactccttgtccggtactggtgatcacatgaccagtccctgatgccgcgccttgtatgtactgggtccccggcggcattcctgccagttggaccattgcacctgccggtagtggacctgttagatccttaagagctccacccgcttgtccggcgttcagatttgtgcgcctcggcttctggacctcacgtttgcggcgcttcctttggtcgcctgccttgctctccatggtgggcacggggatgggcactgcaccctgtccagtaactggaaggggaatcgtcgcattctgtggttggttctggtgcagttgctgctgctgctgctgtggatgaactgccatatggagctgatgctgtacttgcaaatgcatttgagcgggtatctgtccagcggcatgtccggagatttgtccggacatctgcccagacaggtgtccttgcatagtcgcctgcatttgcgcctgcatctgcacctggccctggctctggttctggatgggttgtgcctcgttcgggacaccggatttctttacataagtggcaatcgctgagatcagctgtactttgtcgggagtaccttgtccagtcggagttgttggtagggaggtgcttatgggaatctctgcctgttgctggatctgcttttcgtccagttgtgggtgcatggggagcttgcgtttttgaggctctccaggcttgaacggtatctttgtggtggctacacctccttctaaatggttattggtccattgcgcagacacaaggggacctccggagtgaggtgcaactcccgctgcagtagctccctgttccgaatgaagcggcggctccgcttgctctggcagcgattcgtcgccctgctccatgggtagtgacatagctaccgccttgggcttcatctgcagttccttcggagccgcttgtttggtggatatggatatggtgacgttcgatataggagcagtggccatttcgtaaggcggaggaggtagtagttcagccggcttcgaagtggcttccgtcactagtgttttagcagcaacgggtcctgagatgaacgacgtctccttcgacacaatctgcacagtctgcttgacttggtggggtgacggttgcagctgctgcggctggtgtagttgctgctgctgctgctgctgtggtggcggtggtggtggaggcgcctggttttggctctgattctgcataattgctgctggctgatcggatttctgctccagctttgcctcccctcccactcctggtgtggtaattgcgaccgcactaacaggtagagccgtcgctgaggcggtggctacctgttggctgcttcctccgctagctactgttgtggtggtggtggacgtggccacagatccactgctactactactacctgccgcctgcgtggcagtgggcaccggaggaatcaccggacgtgccagttgatcctccaaacttctgaccttccccatgctgggcgcccgtacgttgataaccttgcgggcggaaagaggtgccgaagctgaggcggaaccaacgtgagccgaagtgatgcttatctggttgaggctatgactgctgctgttgttttggagcagttgctttagaagtgcattatcctccgctgccgagcgttggttgttcataggtgtggcgttcactgtaggattgggtgtgctgggattcgaggcagttgaggtagatgtggccatttgaatttgattggcggactgattttgaacctggttaatagccgtcattgtggcattggcgttcaaacgcttctccggcgtgccgatctcctcagcccgctcctcactggtcggagtaccagtgctatccttcacaaccgcctcctgtttgaccagtagctttgctttagattcgctgccaacttcttccagcttgactacgtccggagccagactaacgctgagtttggtgggcgtattggcggtcgttagtttcagctgcattgaagctcccgaggtagctgatccggagtttgcagaagatcccgccttgtctgcactagaatcctgaatcaaagcatgatgcatctgcagcgccgcctgactggacaacgtggttgtagttatcatcttcggtttttgctgggccatggtcgtcttggacagcaccagggatatgttcttgttctgaatggagattattggccgcgtgcccatcatcggactgtttatgcagatggtccccgccgaaacggaaacggtggaggtggtggccagatctgaggcattccccgaagccatggtaaacgtcacgggtgtgcctgctccactgcctaccgcggagattgattggctttgagcagcctgtgagtgctgctgctgcttaaagatgttaaagctgggtggacaattgagtgtattcttgtcgagcggcttaatcaccacgctgttgatgttggtgaactcctccgggcctccagtcgattcctgggacttgctcttgttgagaattttttgaaggttctccgagtaggctgtaatctttcgaggcgctggcgcatcgtcttccgaatgggccgcaggtcccacagttgcggaatcctgaaccattgcgtacgtttggctggggttggtggtggtgatagtcactatgctgcctgtgggcggagccaggcctccaccactggtcacctgcagctgctgaagctgctgctgctgttggatctgttgttggtgctgctgaagttgcagcatctttttgctcaccaccttggtggccacaattttggtgttcgccggcttgatctgtagccccgaaaacgagacaatggtgccgctattttttggcccgcgtttgataagtttggtaaagttgtgatgtgcatgagaatggacgtgcgggtggacctgctgaccaccgctttgctgcgcagcactcattacggtagtcacctgaccgcccggctgcagcagttgcttgctctctacaatcgtggctcctccggctgtggccgctccactagcgctcatcagcggcttgagcagcggcaccgatatagtcttgttgccaatcgacactttcgccgtggtctgcgttacttccgacagcttcttggcgttaaccatcagctgggttttcatcttggggtgaagattcacccggtttaacaatgttgtagtgggcgtttggctaccagtggccgtggtattgaagatgttgtagttcgtgtgaccggatttctgtgtgaggattgtagtggtgccggctccactgactcctgccgttccgttgttagcgtttaaaataatggtggaggtagtagctccaataggcgttcctgctggtgttcccgttccggtggagttacccacagatgtagagctatccgcgccgctggctggcatcagtacgtagtcgaggtcctcagatttgccggagttttcagcatgatcctgccccgagccactgggctcgatggaaatgacggacgcggttgacgatgatgacgaggccgacgatgaggcaccctcctttttggtaaagctggtaaaggctgtgtttcggtgtagcaaagggttagattgactgttccttggagtgctgattctgtactcactctgcttgtcagcgtcctccgccttgatggcacccatctcagtgccggagccgaagttgcacactatgatctgctgatcgcgggcgtcccagacgccgtccgccgtctcgacatcctgcggctccgacgcagcttttacctgcgccttagcctgctgtccactccgctggtagaggagctgctgcggcgcggtgctcgacgctttggcgggcaaactgggcgctgccgttccagttccgagaagcagctccgtcttggccttcttgcgcgtgggatcctccgccggagtggcggtgtcgtcgccgctgcgcttctgcaggctgaccgcattgaaggcagcggcggccacggatgctactctttcgggtttcgccttttcggcggcaccaagcgatgttgtcaccttcggtatattcataacaaacacacaagtggaaacgcggaacgccggatgcgatgcgctgcgtttcgtgggacgggaagggcggcggtctagctagctagggctcgcgcggcctgcttttttttttaccgagcgaaaacatgcacgattagtcaaaaaaattttattttcgtgtatgcagagcagtgttaccagatggtaaaacgaccattaccctgaaacgttcttacccatccctggttttccactcagaaacccaccacttttcccatcccatttcaacatatcgccatggcggttgcaatcgaataacgtttgtacagcaatcatttttcgttaacttcagaagtttttaatacataacataattattgtgttccacgtgcaatatggcacattttcaactgcaagaataaaccatagtctggacagggccgtcagctcactcgaccaatcggtggtctatcgatatatgtttttagcaccacatttattagctcgatctggcaacggtggccgttgatgcaacacatctttgcacaatacaattttataaataagtaatatattttgacataaactcaccatgctctcattaaagttagtctcccagctctttaagcaaagccttgcgtgtaagttgcagtggcgcttcctgcctagccacatccaatccgataacagtttgcaacaaaccacttaaacttttctttgcagcgggcaacatggcaattgtcaacacagccggtcttaagtatttcgctccgcctattaaataccagagtaagtagttgcatttaaatgtgcacaatgaatttagagcaataaatgaatgaatgtgggaacccccagatgtggagcagccggagagacccaagctgagggtcattgagcgccagccccagctgccgccaaacatccgtccgccaaagatgcagaagcgcctgcgatacatgcgcggtccggagatggtgcacaacacgctgctccataagcagtacgcaatcgtggccac

SEQ ID NO: 7448 - DNA, 6915 bp, DROSOPHILA
atgaatataccgaaggtgacaacatcgcttggtgccgccgaaaaggcgaaacccgaaagagtagcatccgtggccgccgctgccttcaatgcggtcagcctgcagaagcgcagcggcgacgacaccgccactccggcggaggatcccacgcgcaagaaggccaagacggagctgcttctcggaactggaacggcagcgcccagtttgcccgccaaagcgtcgagcaccgcgccgcagcagctcctctaccagcggagtggacagcaggctaaggcgcaggtaaaagctgcgtcggagccgcaggatgtcgagacctttaccaaaaaggagggtgcctcatcgtcggcctcgtcatcatcgtcaaccgcgtccgtcatttccatcgagcccagtggctcggggcaggatcatgctgaaaactccggcaaatctgaggacctcgactacgtactgatgccagccagcggcgcggatagctctacatctgtgggtaactccaccggaacgggaacaccagcaggaacgcctattggagctactacctccaccattattttaaacgctaacaacggaacggcaggagtcagtggagccggcaccactacaatcctcacacagaaatccggtcacacgaactacaacatcttcaataccacggccactggtagccaaacgcccactacaacattgttaaaccgggtgaatcttcaccccaagatgaaaacccagctgatggttaacgccaagaagctgtcggaagtaacgcagaccacggcgaaagtgtcgattggcaacaagactatatcggtgccgctgctcaagccgctgatgagcgctagtggagcggccacagccggaggagccacgattgtagagagcaagcaactgctgcagccgggcggtcaggtgactaccgtaatgagtgctgcgcagcaaagcggtggtcagcaggtccacccgcacgtccattctcatgcacatcacaactttaccaaacttatcaaacgcgggccaaaaaatagcggcaccattgtctcgttttcggggctacagatcaagccggcgaacaccaaaattgtggccaccaaggtggtgagcaaaaagatgctgcaacttcagcagcaccaacaacagatccaacagcagcagcagcttcagcagctgcaggtgaccagtggtggaggcctggctccgcccaacatcaacagcgtggtgattaagccgctcgacaagaatacactcaattgtccacccagctttaacatctttaagcagcagcagcactcacaggctgctcaaagccaatcaatctccgcggtaggcagtggagcaggcacacccgtgacgtttaccatggcttcggggaatgcctcagatctggccaccacctccaccgtttccgtttcggcggggaccatctgcataaacagtccgatgatgggcacgcggccaataatctccattcagaacaagaacatatccctggtgctgtccaagacgaccatggcccagcaaaaaccgaagatgataactacaaccacgttgtccagtcaggcggcgctgcagatgcatcatgctttgattcaggattctagtgcagacaaggcgggatcttctgcaaactccggatcagctacctcgggagcttcaatgcagctgaaactaacgaccgccaatacgcccaccaaactcagcgttagtctggctccggacgtagtcaagctggaagaagttggcagcgaatctaaagcaaagctactggtcaaacaggaggcggttgtgaaggatagcactggtactccgaccagtgaggagcgggctgaggagatcggcacgccggagaagcgtttgaacgccaatgccacaatgacggctattaaccaggttcaaaatcagtccgccaatcaaattcaaatggccacatctacctcaactgcctcgaatcccagcacacccaatcctacagtgaacgccacacctatgaacaaccaacgctcggcagcggaggataatgcacttctaaagcaactgctccaaaacaacagcagcagtcatagcctcaaccagataagcatcacttcggctcacgttggttccgcctcagcttcggcacctctttccgcccgcaaggttatcaacgtacgggcgcccagcatggggaaggtcagaagtttggaggatcaactggcacgtccggtgattcctccggtgcccactgccacgcaggcggcaggtagtagtagtagcagtggatctgtggccacgtccaccaccaccacaacagtagctagcggaggaagcagccaacaggtagccaccgcctcagcgacggctctacctgttagtgcggtcgcaattaccacaccaggagtgggaggggaggcaaagctggagcagaaatccgatcagccagcagcaattatgcagaatcagagccaaaaccaggcgcctccaccaccaccgccaccacagcagcagcagcagcagcaactacaccagccgcagcagctgcaaccgtcaccccaccaagtcaagcagactgtgcagattgtgtcgaaggagacgtcgttcatctcaggacccgttgctgctaaaacactagtgacggaagccacttcgaagccggctgaactactacctcctccgccttacgaaatggccactgctcctatatcgaacgtcaccatatccatatccaccaaacaagcggctccgaaggaactgcagatgaagcccaaggcggtagctatgtcactacccatggagcagggcgacgaatcgctgccagagcaagcggagccgccgcttcattcggaacagggagctactgcagcgggagttgcacctcactccggaggtccccttgtgtctgcgcaatggaccaataaccatttagaaggaggtgtagccaccacaaagataccgttcaagcctggagagcctcaaaaacgcaagctccccatgcacccacaactggacgaaaagcagatccagcaacaggcagagattcccataagcacctccctaccaacaactccgactggacaaggtactcccgacaaagtacagctgatctcagcgattgccacttatgtaaagaaatccggtgtcccgaacgaggcacaacccatccagaaccagagccagggccaggtgcagatgcaggcgcaaatgcaggcgactatgcaaggacacctgtctgggcagatgtccggacaaatctccggacatgccgctggacagatacccgctcaaatgcatttgcaagtacagcatcagctccatatggcagttcatccacagcagcagcagcagcaactgcaccagaaccaaccacagaatgcgacgattccccttccagttactggacagggtgcagtgcccatccccgtgcccaccatggagagcaaggcaggcgaccaaaggaagcgccgcaaacgtgaggtccagaagccgaggcgcacaaatctgaacgccggacaagcgggtggagctcttaaggatctaacaggtccactaccggcaggtgcaatggtccaactggcaggaatgccgccggggacccagtacatacaaggcgcggcatcagggactggtcatgtgatcaccagtaccggacaaggagttactttgggaggagtgggcgccagtactggagccagttcctcgcccatgctcaagaagcgggttcgcaagttctccaaggtagaagaggatcacgatgcatttaccgagaagttgctgacgcacatccgccaaatgcagccgcttcaagttctggagccgcatctcaatcgcaactttcactttcttatcgggagcaacgagacttctggaggtggttcgcccgcctcaatgagttctgcggcttctgccggatcatcatcggctggaggaggaaagctgaagggcggatctcgaggctggccactgagcaggcatttggaaggtctggaggactgtgatggcaccgttctcggccgctatggtcgagtgaatctgccagggataccctcgttgtacgatagcgaacgctttggcggaagtagaggtctagttggtggatctgcacgaacccgttcaccctcgccagcagagtctccgggagcagaaaagatgctaccaatgtctagcatccaaaatgatttttatgaccaggagttctccacgcatatggagcgcaatcctagggaacgcctggtgcggcacattggagccgtcaaggattgcaatttggagaccgtagacctggtggagagcgagggcgtagctgcgtgggcgactcttccacgacttacccgctatccgggtctaatactgctcaatggaaacagccgttgccatggacggatgtcgccggtcgcactgccggaggatccgctgaccatgcgctttcccgtgtctccactgcttcgatcctgcggcgaagagctgcgcaagacacagcagatggagctgggaatgggaccgctgggcaataataataataacaattaccagcagaagaaccagaatgtgatactcgcactgcccgcctcggcatcggagaacatagccggcgtgctgcgggatctggccaatctactgcacttggcgcccgcccttacctgcaagatcatcgaggacaagattggcaacaagttggaggaccagtttatgaatcaggacgatgaaaagcacgtcgacttcaagcgaccactgagtcaagtgagtcacggtcatctgaggaagatcctcaacgggcgtcgtaagctctgccgcagctgcggaaatgtggttcacgccactgggctgcgagttcctcggcacagtgttcctgccctagaagagcaactcccccggttggctcaactgatggacatgctgccaagaaaatcggttccccctccttttgtgtacttctgcgatcgcgcctgctttgcgagattcaagtggaatggaaaggatggccaggcggaggcggctagtctgctgcttcagccagccggcggttctgctgtaaaatcatccaacggagactcgcctggcagcttctgcgccagctcaactgccccagcggaaatggtggtcaaacaagaaccggaggacgaggatgagaaaacgccgagcgtaccgggcaaccccacaaatatccccgcacagcgcaaatgcattgtgaagtgttttagtgctgattgcttcaccacggactcggcgccatccggactggagctcgacggaactgctggtgccggaactggggctggaccggtcaataatactgtgtgggaaacagagaccagtgggctgcagttggaggacacgcggcagtgtgtcttctgcaatcagcgtggtgacggccaggcagatggaccctcgcgactgcttaacttcgatgtggataaatgggttcaccttaactgcgccctgtggtccaacggcgtgtacgagacggtgtctggggcgctgatgaacttccagacagctctgcaagcgggactgagccaggcgtgtagcgcttgtcaccaaccaggcgccaccatcaagtgtttcaagtcgcgctgcaacagcctgtaccacctgccatgcgccattcgcgaggagtgcgtcttttacaagaacaagtccgtgcactgcagcgttcatggtcatgctcatgccggcatcacgatgggtgcaggagcaggcgccacgactggcgccggattaggaggctctgtggcagataatgaactgagctccctggttgtccaccggagagtttttgtcgatcgggatgaaaaccgtcaggtggccaccgtcatgcactattcagagctaagcaacctgctccgtgtgggcaacatgacgttcctgaacgtgggtcagttactgccgcatcagctggaggccttccacacaccccactacatctaccccattggctacaaggtgagtcgctactactggtgcgtgcgacgacccaatcgtaggtgtcgatacatttgcagtatcgcagaggccggatgcaagcccgagtttcgcatccaggtgcaggacgccggcgacaaggagccggagcgcgagtttcggggcagttcgccctcggcggtctggcagcagattctgcagccaatcacgcgactgcgtaaggtgcacaagtggttgcagctctttccccagcacatcagtggtgaggacctatttggcctaacggaaccggccattgtgcgaatcctggaaagcctcccgggcattgagacgctcactgactaccgcttcaagtacggtcgcaacccgcttcttgagttcccgctagccatcaatccgtctggagcggcgcgtacggaacccaagcaacgacagctgctcgtctggaggaagccgcatacgcaacgcacggccggcagctgcagcacgcagcggatggccaactcggctgcgattgccggagaagtggcctgcccgtacagcaagcagttcgtgcattcgaagagctcccagtacaaaaagatgaagcaggagtggcgcaacaacgtctacttggcgagatctaagatccagggtcttggcttgtatgcagctcgggacattgaaaagcacaccatgataatcgagtacattggcgaggttatccgcaccgaggtctccgagatacgcgagaagcagtacgagtccaagaaccgtggcatctacatgttccggctggatgaagaccgcgtggtggacgccactctaagcggcgggttggcgcgctacatcaaccattcgtgcaatcccaactgtgttaccgagatagtggaggtcgatcgcgacgtgcggatcataatattcgccaagcggaagatctatcgcggcgaggagctctcgtacgactacaagttcgacattgaggacgagtcgcacaagataccgtgcgcctgtggagcgcccaactgtcgcaagtggatgaactag

SEQ ID NO: 7449 - protein, 2304 aa, DROSOPHILA
MNIPKVTTSLGAAEKAKPERVASVAAAAFNAVSLQKRSGDDTATPAEDPTRKKAKTELLLGTGTAAPSLPAKASSTAPQQLLYQRSGQQAKAQVKAASEPQDVETFTKKEGASSSASSSSSTASVISIEPSGSGQDHAENSGKSEDLDYVLMPASGADSSTSVGNSTGTGTPAGTPIGATTSTIILNANNGTAGVSGAGTTTILTQKSGHTNYNIFNTTATGSQTPTTTLLNRVNLHPKMKTQLMVNAKKLSEVTQTTAKVSIGNKTISVPLLKPLMSASGAATAGGATIVESKQLLQPGGQVTTVMSAAQQSGGQQVHPHVHSHAHHNFTKLIKRGPKNSGTIVSFSGLQIKPANTKIVATKVVSKKMLQLQQHQQQIQQQQQLQQLQVTSGGGLAPPNINSVVIKPLDKNTLNCPPSFNIFKQQQHSQAAQSQSISAVGSGAGTPVTFTMASGNASDLATTSTVSVSAGTICINSPMMGTRPIISIQNKNISLVLSKTTMAQQKPKMITTTTLSSQAALQMHHALIQDSSADKAGSSANSGSATSGASMQLKLTTANTPTKLSVSLAPDVVKLEEVGSESKAKLLVKQEAVVKDSTGTPTSEERAEEIGTPEKRLNANATMTAINQVQNQSANQIQMATSTSTASNPSTPNPTVNATPMNNQRSAAEDNALLKQLLQNNSSSHSLNQISITSAHVGSASASAPLSARKVINVRAPSMGKVRSLEDQLARPVIPPVPTATQAAGSSSSSGSVATSTTTTTVASGGSSQQVATASATALPVSAVAITTPGVGGEAKLEQKSDQPAAIMQNQSQNQAPPPPPPPQQQQQQQLHQPQQLQPSPHQVKQTVQIVSKETSFISGPVAAKTLVTEATSKPAELLPPPPYEMATAPISNVTISISTKQAAPKELQMKPKAVAMSLPMEQGDESLPEQAEPPLHSEQGATAAGVAPHSGGPLVSAQWTNNHLEGGVATTKIPFKPGEPQKRKLPMHPQLDEKQIQQQAEIPISTSLPTTPTGQGTPDKVQLISAIATYVKKSGVPNEAQPIQNQSQGQVQMQAQMQATMQGHLSGQMSGQISGHAAGQIPAQMHLQVQHQLHMAVHPQQQQQQLHQNQPQNATIPLPVTGQGAVPIPVPTMESKAGDQRKRRKREVQKPRRTNLNAGQAGGALKDLTGPLPAGAMVQLAGMPPGTQYIQGAASGTGHVITSTGQGVTLGGVGASTGASSSPMLKKRVRKFSKVEEDHDAFTEKLLTHIRQMQPLQVLEPHLNRNFHFLIGSNETSGGGSPASMSSAASAGSSSAGGGKLKGGSRGWPLSRHLEGLEDCDGTVLGRYGRVNLPGIPSLYDSERFGGSRGLVGGSARTRSPSPAESPGAEKMLPMSSIQNDFYDQEFSTHMERNPRERLVRHIGAVKDCNLETVDLVESEGVAAWATLPRLTRYPGLILLNGNSRCHGRMSPVALPEDPLTMRFPVSPLLRSCGEELRKTQQMELGMGPLGNNNNNNYQQKNQNVILALPASASENIAGVLRDLANLLHLAPALTCKIIEDKIGNKLEDQFMNQDDEKHVDFKRPLSQVSHGHLRKILNGRRKLCRSCGNVVHATGLRVPRHSVPALEEQLPRLAQLMDMLPRKSVPPPFVYFCDRACFARFKWNGKDGQAEAASLLLQPAGGSAVKSSNGDSPGSFCASSTAPAEMVVKQEPEDEDEKTPSVPGNPTNIPAQRKCIVKCFSADCFTTDSAPSGLELDGTAGAGTGAGPVNNTVWETETSGLQLEDTRQCVFCNQRGDGQADGPSRLLNFDVDKWVHLNCALWSNGVYETVSGALMNFQTALQAGLSQACSACHQPGATIKCFKSRCNSLYHLPCAIREECVFYKNKSVHCSVHGHAHAGITMGAGAGATTGAGLGGSVADNELSSLVVHRRVFVDRDENRQVATVMHYSELSNLLRVGNMTFLNVGQLLPHQLEAFHTPHYIYPIGYKVSRYYWCVRRPNRRCRYICSIAEAGCKPEFRIQVQDAGDKEPEREFRGSSPSAVWQQILQPITRLRKVHKWLQLFPQHISGEDLFGLTEPAIVRILESLPGIETLTDYRFKYGRNPLLEFPLAINPSGAARTEPKQRQLLVWRKPHTQRTAGSCSTQRMANSAAIAGEVACPYSKQFVHSKSSQYKKMKQEWRNNVYLARSKIQGLGLYAARDIEKHTMIIEYIGEVIRTEVSEIREKQYESKNRGIYMFRLDEDRVVDATLSGGLARYINHSCNPNCVTEIVEVDRDVRIIIFAKRKIYRGEELSYDYKFDIEDESHKIPCACGAPNCRKWMN

SEQ ID NO: 7450 - DNA, 3966 bp, DROSOPHILA
ccccggccccttcgatttatagagacatattttctaggtgacaaacttattatgagccctggacagaggaggcccaaaaatacagatctcgaacgaagtgagacgctatcagcatcagataagcccaactaacgagcgccccgaagtgtcgagcagtcaatttacggacccaaaacaaagcgagccactagccacgaacaggttcaatcgggggaaaccaaagaccaccaggcgaaccgtagcacaggtatttggtgtgtggttcttggtgctagatgctgtgcaacctgctgacttccaagtacacataaaaacactcaggggaccgaggcgaatcgatccatcggcttcgaaatcgatggaagacaaatttattgctaattgcagagctcgctctctaataactcccacacatggagaatctcggctgaggccctccatcgagtctagcgattcccagctgactcacgatcggagtgtcggtttaatatgcatctccgcctcctcaactggcgctcgaattacgattgtggccagcttggattacctggtgcacaagatttggggctaacggtaccagccctctaaactgggcctaaataaccatgcgtttcatgaggcccataaacctggcaaacgtttcatttgattggtttgtgttgggttgggatggccccctacgaaacagtttagggcgcaattaagataggatttcaattccttaaacgatgcttaggctttggcgataaagtcacagttaaatggatcacttaaagtttttactcgatgtaaagagttttaatgtaaataaattcgatttaaaagttaatgctgtgactcacagttttgccttaacttagattccaaaagggcagtggtgtttttttattatgtggctactagaagtgatataaaaatctgaactcaagttaaagtatgttttgtgctctttggcaaaattcaaatataataatatagtattcttaactatgaatataaaatgcaacttattatatataaaatcctctacagaaatggctacagcttcaagacgcagcaacttctcacacagcaacccgatcattctcagcttacccagtttgtccagccccaaagtcagagtacgcattcggtgcatccgggtccaagtcctggtcaacagcaggcgggtggctccatgaccatgccgtcgtcgtcgacgggcaagggaaaacgggagtgggacatcaatgatgccattgtgccacatgtgccggaccaggagttcgacgagttcaacgagtggagcgacgggcatgtgaggcacatctattcgctgcacaacgaggaggccaagaagcacatttccggctgggccatgcgcaacacgaacaaccacaacgtgaacattctgaagaagagctgcctgggcgtcctggtctgctcccaacactgcaccctgcccaacggatccaagatcaacctgcgcccagccatttgcgacaaagcccggcggaagcaggagggcaaggcgtgtcccaacaaaagttgtcgtggcggtagactagagattaaaccgtgtcgcggtcactgcggctatccggtgacccacttctggcggcactccggcaatgccatcttttttcaggccaagggagtgcatgatcacctgcgtccggatccgaagaactccagtgtttccaagcgggcctttggacgtgtgccgctggctggaaagtcagccaacggatcagtcgccaagaagtcggtcattgcgggtctggtcaagcaggcgaaggtgagcttagatagacattcattcacccgggatgtatcatcttaaccattcttctctgacgacagcaacaacacagtctgattagcaaggttcttaagcgtcctgctgtcagcaatcctctggctcacaccgcattggatatatatcagtataatggtaggtatataaaacaagaatatttaaagatttcttttacaatttgtatcccccattagcctgtggcaagtgcgccggttatagccactgcacttgcagctacctggatgacagcaccacggcgaggagccatcagttgtcacaatcctcgaattacggcaccaattcttggccactaagtggatccgagtcatcggcaccctgcgagacggcagctaatgtgtttacggtcaaccaccagcacatcacctataactatcccatctaccatgcaactccagcggcggccaccgcggcacctagtaaatctcccagtttgccctacgcctgcagcatttcggaactggccgcataccagcaatcctccagcgggaacagctttgcgatgggtgttcccgtgcacggacacacacaatgccaggcagtagcctatgattccagcccgcaactggccactccggaaccggagttcatcaactactcgcagatcaagcatttgggtggtggcggtggtcaggaggagatcagctgcaaggccgaaccgggacccaccattaagtacaatgccaccgtggagacgcagccgtatgtggaggacaactacgattactactatagccccaaggcggagtacgaaatgcaacagcaccaccaccagcagcagcagagccaccaacagttcggtggaaatcagacagcgggacatcactactacgagagcagtagtggctataatggagtcagctatttcgacacaggaactactacggcaccaggaaatactgcaaccggaaatggcctggaagtcggatacggcggctactacgatcactacaccagctacgagcaacaaatggcggtagcaggtggatttgccactgccggaggatccactgcgccgacagtggccgcgccccctggccatccaccgcctccaccaccaccgcccacgctgacgtaccaccatcaccatcaccaccacttgcaccacccagcagcagctacaggcctagccccatcggtcacccattgaatagtacttaaccaatccggacaccggaggattactcatagtcgatagctaagcatagtaacatagtgtttaaaatagtggtgaaatcttaatttccatctgtacgtgtagtgttaaacggtttaccaattgtttttctcggcaaataaattatgaaaagtgttgatttgtaaaagtaaatgtatttaatttaagtgcgtaaatataatttcttattgcgcgaccaattcaaacatagctaattttcagcggtcatgatggtgcggttcttgaaatcagagatagatgtcgcgctgtaaaaaaattgttggtaagaaccatgtaaaatgtaatggtaaaaaccatgtaatgtagacaagcaggtgctcacttaaccataactgtagtaattttaggacgcatttaatgatttgtagtttaaaatcgatagatagtaagatatactttaatacgaatgatgttttataattggcggaaacatttaaagaaaaacaaattggctgccaagacccaaattttgtaccgcttacatggcttgcagtttttttttaaaaagcctcctaccggtaagaaactgaactactgcagagttgctttacgataaactcacaatgacacacagacacagacacacagacataaccagactaaagagaatagtactacaagttataatcgctatcttcagcaagaggatttcacatttaaagtaatcgcatagtggccagcaaaacctatcgcatagatgtgccaatcggtctatccattcgaaattcaccttcaccaaacgcgacatacacatatgcaaaaagagagcgtatagcaatgagaagcgtgagcgtgagtaaaaaatctataaaagcaactgcgacgtgctcattttggtaaaaaatttagctgtgctgcaaagagctgcccgagtggtaattaagtaacttttgtacatttctaccggttccgtctccacatctcccatccaacatggtgtaccaggtgaaag

SEQ ID NO: 7451 - DNA, 1842 bp, DROSOPHILA
atgcaacttattatatataaaatcctctacagaaatggctacagcttcaagacgcagcaacttctcacacagcaacccgatcattctcagcttacccagtttgtccagccccaaagtcagagtacgcattcggtgcatccgggtccaagtcctggtcaacagcaggcgggtggctccatgaccatgccgtcgtcgtcgacgggcaagggaaaacgggagtgggacatcaatgatgccattgtgccacatgtgccggaccaggagttcgacgagttcaacgagtggagcgacgggcatgtgaggcacatctattcgctgcacaacgaggaggccaagaagcacatttccggctgggccatgcgcaacacgaacaaccacaacgtgaacattctgaagaagagctgcctgggcgtcctggtctgctcccaacactgcaccctgcccaacggatccaagatcaacctgcgcccagccatttgcgacaaagcccggcggaagcaggagggcaaggcgtgtcccaacaaaagttgtcgtggcggtagactagagattaaaccgtgtcgcggtcactgcggctatccggtgacccacttctggcggcactccggcaatgccatcttttttcaggccaagggagtgcatgatcacctgcgtccggatccgaagaactccagtgtttccaagcgggcctttggacgtgtgccgctggctggaaagtcagccaacggatcagtcgccaagaagtcggtcattgcgggtctggtcaagcaggcgaagcaacaacacagtctgattagcaaggttcttaagcgtcctgctgtcagcaatcctctggctcacaccgcattggatatatatcagtataatgcctgtggcaagtgcgccggttatagccactgcacttgcagctacctggatgacagcaccacggcgaggagccatcagttgtcacaatcctcgaattacggcaccaattcttggccactaagtggatccgagtcatcggcaccctgcgagacggcagctaatgtgtttacggtcaaccaccagcacatcacctataactatcccatctaccatgcaactccagcggcggccaccgcggcacctagtaaatctcccagtttgccctacgcctgcagcatttcggaactggccgcataccagcaatcctccagcgggaacagctttgcgatgggtgttcccgtgcacggacacacacaatgccaggcagtagcctatgattccagcccgcaactggccactccggaaccggagttcatcaactactcgcagatcaagcatttgggtggtggcggtggtcaggaggagatcagctgcaaggccgaaccgggacccaccattaagtacaatgccaccgtggagacgcagccgtatgtggaggacaactacgattactactatagccccaaggcggagtacgaaatgcaacagcaccaccaccagcagcagcagagccaccaacagttcggtggaaatcagacagcgggacatcactactacgagagcagtagtggctataatggagtcagctatttcgacacaggaactactacggcaccaggaaatactgcaaccggaaatggcctggaagtcggatacggcggctactacgatcactacaccagctacgagcaacaaatggcggtagcaggtggatttgccactgccggaggatccactgcgccgacagtggccgcgccccctggccatccaccgcctccaccaccaccgcccacgctgacgtaccaccatcaccatcaccaccacttgcaccacccagcagcagctacaggcctagccccatcggtcacccattga

SEQ ID NO: 7452 - protein, 613 aa, DROSOPHILA
MQLIIYKILYRNGYSFKTQQLLTQQPDHSQLTQFVQPQSQSTHSVHPGPSPGQQQAGGSMTMPSSSTGKGKREWDINDAIVPHVPDQEFDEFNEWSDGHVRHIYSLHNEEAKKHISGWAMRNTNNHNVNILKKSCLGVLVCSQHCTLPNGSKINLRPAICDKARRKQEGKACPNKSCRGGRLEIKPCRGHCGYPVTHFWRHSGNAIFFQAKGVHDHLRPDPKNSSVSKRAFGRVPLAGKSANGSVAKKSVIAGLVKQAKQQHSLISKVLKRPAVSNPLAHTALDIYQYNACGKCAGYSHCTCSYLDDSTTARSHQLSQSSNYGTNSWPLSGSESSAPCETAANVFTVNHQHITYNYPIYHATPAAATAAPSKSPSLPYACSISELAAYQQSSSGNSFAMGVPVHGHTQCQAVAYDSSPQLATPEPEFINYSQIKHLGGGGGQEEISCKAEPGPTIKYNATVETQPYVEDNYDYYYSPKAEYEMQQHHHQQQQSHQQFGGNQTAGHHYYESSSGYNGVSYFDTGTTTAPGNTATGNGLEVGYGGYYDHYTSYEQQMAVAGGFATAGGSTAPTVAAPPGHPPPPPPPPTLTYHHHHHHHLHHPAAATGLAPSVTH

SEQ ID NO: 7453 - DNA, 3502 bp, DROSOPHILA
tttgtagatcatccgcctaagcgccaaaaaaagaaagtatcgaccaattataatgtcagatcagattggctgaaataccgattctctttgtgtgtgtttaatccaaatcctgtgctggaccacccgaggtagccagagatttttaccaaaccgggggcgttgccgtccagctgcaatatagcccacgggcagtgctcaaaaatggccaaattagatggatttggtggcaccaacagcggggaatcccagttggctgtgtcaccaaattaaaatctaattgaaaatctgctgcttagtaaaaataataaattcacaacataaaacactacgaaatgcttatgattcaatagggattattaaaatagcaatgaagaaatcttgagccattgaaaaacattcttgatttattttatttttattttttattgaattcaacatcgatttgacgctcgttttgtgtgtcagtatttggagtttcgggttattacacaatagcgggtgatcgtgagctctaacattaagtagtcgtaattataagtaagtaatatatatctatacatgggccatgatcgacatccgtcgacatgcttttatcttcaattgtaaaccgcagagttggcctgaaatcatataaaaaaaaaaacaactgtgtgtgtggatttgtgtacaactaggtaaaagataaaccctttcctttggaatcgcttgacgacagtggcccccgttgtggctcccaaaaaatacaatatgggtgtggacttatgtttgcgtgtagataaacagcagctgctcctttctcctggcccgggcggctagtgtccgagttttgcatgggcgaatcattagaaactagctcgtgctccagctaatcctactgctcctaatctacgtactcctgcttgataacaacgtaacgcactggcggcggcgatttctgctcatcacgctccggctccagctgctgccgacgccgccagtgctcatcacgttgtggccgcctctacttcatgtcccttcgacgcttgatgctgccatcgcaggtgggcagatggcgctgtaggaagccctcgaaaacgaacttgcggccgcaacgtacgcagctgaactcgcgcttctcctccacctgctgcttgtgctgccgcagtgcctccgcattagagtacttatcgcggcaggcgtcgcaggcatagcgtctcttcacctggccaacatcgaagacgacggtgaagttctgcgagcagaaggcgcactggaactccttgacgaccaccttcttgccgccgtgctgggcggccagggccaccgcttcggcctcgagcttgtcctggtgcttgtgcgactccatgtgggcggtaaatttgctctcctcgacgaacttgcgatagcagcgggtgcagcggaagggctgctcgcccgtgtgccgcatcatatgctccttgaggtaggcaaccgagttgaagaccttgctgcacactttgcacttgcgttcatcggtggagatctcgttcctctgccgcaggcaggcgcgcatatgaagcttcagggagccggcggcgctgtagcaattgccgcaattgggacagtagaaggtcttgttgcgaccatacggatcttgttcggcatggtcgatggtactctcgaacacaatagagcccacctcgtcatcttcaacctccaattcgccgccctcgtggtcgacggtgacaaactcatcgtcatgctctacctcctcgccatcctcgagctcttcatcctcctcgacctcctcgccatgaatattgggcacaatatgaaggatggtgtgtgtaccatcgccctgttcgatggtctcctcctcgacggtgctgttctcgaccagctcctgcagggtcaccgcgtgaccgttctcatcgataatcacctcctcggcattgaccagcgcctcgtggtcacgatcgctgagggtcaccaccgcagtttcggtgtcatcgtcgtcgccggtggtataggcatacgtatattgcgtctcctggccgtcatcttcttgaacgtgctcctcatcctcctcgggctcctcctcgggatcaacctcggtatcttgctcgataagcacgggcacgatctcctccttcaccatggaatacttcacgcgcttggcattcatatcgagttggctttgaataagttttgatcacttacgacctgttttggcaaaatctgaagatctgaagatttcacagtagcctttgattttcctactttaacaatatgattttttcccggcgacaaccctgctttgcctctgcctttgcctttgcttttgcttctccctctcgcactcggctgacgcgctgtctctttcgcacggctggaattaatattgaaatcaaattcgagcaccttatggcccagctggattcggtactcaatccccgcctgctttattgccaacttctttttggcggcctttcgctctgggttttttccacaatagtcaacactatgcgttttgcaattatttgccgtccgtcacgattctacttttgtggcaacttcggccaagatggtggacactggaagtggagctgcatgcggtctggcccgccgcgtcagcgattttttagtgcgtttctcgcatttggtatttcccgatgaccgccgcctatcggcactgtaatcggcgctgttatcggtagcttccgacaagctggcagcgccggccgcttggcgcgcattttgaacgctgatctcaacgtatttttgaatttaaaaaaatacaaaaaaattaaattctagatgtactttcttgtcaaagtacgtttttatttttattgggatgtattcgtatgtagaaaatataatggatgtgtatcaaaccgatcatttaatgcctgtgatatgtatctaagtgaaactactgctgggtgaaccccctttagccccatatcccactgtattttcaacgatttcaagacatcaagacgtgccctgtcgtgaggaagatgtcagggaaatgggcgagattattttcgccactgcatttgtcacgtcgccaagcaatttctgctttcggctgctcaatggtcattaaaaaatttgccagcgcctcagcgaatctaaaattagtgctgctatatgtggaattgcacttagagtttcttttgtttttcatggcatttctattagcggacgtgtcacttctttacgcccccctacccccacacctccaaaaacgaccttgaaccaattatcgccgattgacgagcgatcggcgctgtcggaaaagctcgtaactgacttagccgattgccaattgaagatcattcaacgaattcccatgaatggaaagtttttgcttcgttaaccctctaactactgtatttatcctacattgcattatttcgaaaagaatacaagacttttgaatacctttcgaatttgtatactaaaactgattataatatttaatatttaatattattgtgaaatcagatagaacaatcatctagatttagttcaaaga

SEQ ID NO: 7454 - DNA, 1502 bp, DROSOPHILA
gcaaataattgcaaaacgcatagtgttgactattgtggaaaaaacccagagcgaaaggccgccaaaaagaagttggcaataaagcaggcggggattgagtaccgaatccagctgggccataaggtgctcgaatttgatttcaatattaattccagccgtgcgaaagagacagcgcgtcagccgagtgcgagagggagaagcaaaagcaaaggcaaaggcagaggcaaagcagggttgtcgccgggaaaaaatcatattgttaaagtaggaaaatcaaaggctactgtgaaatcttcagatcttcagattttgccaaaacaggtcgtaagtgatcaaaacttattcaaagccaactcgatatgaatgccaagcgcgtgaagtattccatggtgaaggaggagatcgtgcccgtgcttatcgagcaagataccgaggttgatcccgaggaggagcccgaggaggatgaggagcacgttcaagaagatgacggccaggagacgcaatatacgtatgcctataccaccggcgacgacgatgacaccgaaactgcggtggtgaccctcagcgatcgtgaccacgaggcgctggtcaatgccgaggaggtgattatcgatgagaacggtcacgcggtgaccctgcaggagctggtcgagaacagcaccgtcgaggaggagaccatcgaacagggcgatggtacacacaccatccttcatattgtgcccaatattcatggcgaggaggtcgaggaggatgaagagctcgaggatggcgaggaggtagagcatgacgatgagtttgtcaccgtcgaccacgagggcggcgaattggaggttgaagatgacgaggtgggctctattgtgttcgagagtaccatcgaccatgccgaacaagatccgtatggtcgcaacaagaccttctactgtcccaattgcggcaattgctacagcgccgccggctccctgaagcttcatatgcgcgcctgcctgcggcagaggaacgagatctccaccgatgaacgcaagtgcaaagtgtgcagcaaggtcttcaactcggttgcctacctcaaggagcatatgatgcggcacacgggcgagcagcccttccgctgcacccgctgctatcgcaagttcgtcgaggagagcaaatttaccgcccacatggagtcgcacaagcaccaggacaagctcgaggccgaagcggtggccctggccgcccagcacggcggcaagaaggtggtcgtcaaggagttccagtgcgccttctgctcgcagaacttcaccgtcgtcttcgatgttggccaggtgaagagacgctatgcctgcgacgcctgccgcgataagtactctaatgcggaggcactgcggcagcacaagcagcaggtggaggagaagcgcgagttcagctgcgtacgttgcggccgcaagttcgttttcgagggcttcctacagcgccatctgcccacctgcgatggcagcatcaagcgtcgaagggacatgaagtag

SEQ ID NO: 7455 - protein, 380 aa, DROSOPHILA
MNAKRVKYSMVKEEIVPVLIEQDTEVDPEEEPEEDEEHVQEDDGQETQYTYAYTTGDDDDTETAVVTLSDRDHEALVNAEEVIIDENGHAVTLQELVENSTVEEETIEQGDGTHTILHIVPNIHGEEVEEDEELEDGEEVEHDDEFVTVDHEGGELEVEDDEVGSIVFESTIDHAEQDPYGRNKTFYCPNCGNCYSAAGSLKLHMRACLRQRNEISTDERKCKVCSKVFNSVAYLKEHMMRHTGEQPFRCTRCYRKFVEESKFTAHMESHKHQDKLEAEAVALAAQHGGKKVVVKEFQCAFCSQNFTVVFDVGQVKRRYACDACRDKYSNAEALRQHKQQVEEKREFSCVRCGRKFVFEGFLQRHLPTCDGSIKRRRDMK

SEQ ID NO: 7456 - DNA, 5764 bp, DROSOPHILA
atcgcatcgccttcattgaaattgtgccattctacaccggatgctggcgcagaaaagaggtaccaagctaatacctaatcagtgggctgcagtccagagcatggcacagcccgctggtaatgtcatgatcaccatccctacatcaatgcccatcccacacagagatttatttcctattggccaatttaccactggccgcctatttctttgcctcctaggtttgcgtgggttttcgctttccgaaacgggtttttttgtgttcgatttgcgcttattttggtcgcttttttgcccactttttgttgactctattgaatccattattcgctggcttttgtttgatattttcgggtatatttcttttggcatcgaacgatgacgttaccatcttactcatcttgtgtccgtctgtctgctttcgtcaccgagtcttgcatttcgctgggaaatagaggaatcgggaaagctatttagcattgacctccagcagccaagtgacctccaactgcacactgcgttccccgtgcggctgccaatttcataatccaccaagtttcattgctaatcgcaatcaaagccgttaaaggcactcggccacgtcgaaagttccacattgaaacagactcaatcccagccgcatataatttcatcgtttttctttttcgttgcgattccatggctggtttgtaatatcgcaaatcgtgaaattcggcgcctttgagaggttttgctcccggtgcacagaggaaaaggaaaatgctagagatcatttattgaaagactgacgctcatctttatcagttttcaagagatgctcgttcgatttatgtaatacgaaaaaatttccagctctagagatctacacaccagacacacctcctcatcgtagtgaagcaatttcgatttcttttttgattagcaccgaaattttccacaccattgagcccaatcacacgccctccttaaatatgcacttctaattggttcattaaatatttgcatgacagtaaagctagttcgcggaagctttaacatatctgattaccgaaattgtctactcatagcttgtgtaaactaatagaagagtgtttacctattcgtttgggccgacaggcctttcttttttgccttgttttctaaatatatcttcatttatcgcaaattgatggctgctcgcagctctaaacaatttttaattgggaacgaaattgaaatccaatcagcgaacgccaaaagcctcagtttactccactgcactccagtgcaatctggaaacgggattcttcaccgctcgccaattgatactccccagcgactaacaaaactgtcccctttttcctctctaggcgaacaaacatggtcagccatcggtttcgggctcttcgtcgggcggcggaggaggagcaggaggaccaggcggcggggagagagtgccccccatcggaggctatcagtggccggcggatcagactccaggtgtaatgggattgaagaaccacgggaacacttgctttatgaacgcggtgctgcaatgcctcagtcacacagacatactggccgagtactttgttttagatcagtacaaggtaaatatatttatttgccaaatatctccatccaatcctcaacctttctttacaggctgacctcaagcgacgcaacaagattaactcgcgaaagttcggcactaagggagagctcaccgagcagctggccaacgtgctgaaggcgctgtggacttgcaagaacgagagtgatcacagcaccagctttaaggcagtggtagatcggtacggaacgcagttccgcagctcgacgcaacacgatgcccaggagtttcttttttggttgcttgacaaggtgcacgaggacctcaacacagccagcaagcggcgctacaagagcctcaaggtatgcgaaattcaagttggcggcatacgctttttcggatagagcaactcatttttctttttcataatttctcgcagaactcgtacggccgttcggacgaggtgatcgccgccgagacgctggccaatcacatccggtgcaacaacagcttcgtccaggccgtgttccaggcccagtttcgctcatcgcttacctgcccgcgctgcgaaaagcagtcaaacacattcgacccctttcactgcatctccgtgcagctgccgcagctcacgcagcagacgatatttgtcactgtagtctacatgacgcggctcccacgtcaggtgcggatgggcctgcgagttccagccggatcgccaatagtagcgcttcgagagcagcttcaggcggacacgggtatcgagggatcgcgaatggtcctggtggacttaaacgccgaaggattcacccgcgttttttacgacacgcaacccgtagagacgctatctagcattgaaacaatttactgcatcgaggtgccggcggcaactcctgttgccaaggctgctactccttcagagacgggggataagtctgctccaacagcagtgactccatctcctgctgcagctcaatcgcaggcggacctgttgctcctagtggccaacgtataccgagcgaaggatggcgcggatataacccgctttggagcccccttcagcatgaaggcacctcgtgactgctcataccaggatctgcagaaacgaatgctccgcgaaatggcgccgctgctcaagccagaggtgttctcctatgccaccccactggccgagatgttccgtattcggctgcaagacccatccgcagaccctgatacctatttggagcaagtggagcacccgttgcttaccgaaatgatcgacatggcgctttccgtgctttcctccgaggcaggaccccagcatataaagctccttttggagtggagttcacccgaggcacactttatcagtaaacagcaggacacggaagaagccgtcgtggagcacgagagcgttgctcgtctaagtgccagcaagccgagcgacaccgctgcgctgactttggagcagtgcctggagcactataccaaggcagagactctgagtgccgaggatgcctggcgctgtccacactgccagcaataccttccagttgtgaagacgctgggtctgtggtcgctgcccgacatcctagtagtgcatttcaagcgcttccggcaacatcaatctaaaggtccgcaagcggctaagctgacaacaatggtcaagtttccgctgaccgccttcgacatgtcaccgcacttggcacgtggcgtgcatgaaagcgccagcagctcgctgggtatgggaacgggcattggacttggactcgggctgggctcgaatccctggaagaaagctcgttccgtcgactcgcggtcctccacacttaactcgcgctgtgacgcaaaggatacgcggtacgacctttacgcagtgtgctaccatcagggagatacattggaaacagggcattatacagctgcctgcaagaatccttacgaccgtcagtggtataagttcgacgaccagcgagtgagcaaggtgcctgaggacgacattgagcaggacataatcaataatgaggcatacatgctcttctaccagcgacgcagtgtagatgcaggcgagtgttccggttccagttcgaactccggagatcactgggtatcgcgaattgcgccagcctcatcatcgtccgcatcatcgacgtcaggaaaggagagggagccggttaagttggaggaaaacacagaatctcctgcggcagtagaagtaacggagaaggctcagtccaagccggtggacatagtttgccaggataaggcgaaaggtaaattttacctaagatatatgaagatatacattaatcttaaattatacactatttcaggtactgcagacggcccagacgctgatcaagaacagacaactgttccacatgatttacaaattgaggaactggcattcgcggatgcagatgtagacaccagtttaggagagaccatcaaggcggaggtaaatctagcggctaaggatgaacccaaaaaggtggaggtagaggaagccacgcctatatttgccatggatgaagacggttccgaagctagacaggagaagaaggaggaatgcgttaagaaggaagacgaactctccgaagccccagatgtgagcgaactaaccgccgagtccaagaccaatggccacgtgagctcttcgtccagctcttcctcctcggaaagctcgctatcgtcccgctcctcgccgcgatcattgagtacttcagtcacagctgcatctactctgcagagcaagttcaacggccacatgagcgccgctccagctcttttcaatggaaatggaaatacgtcacagctctcgtccagcttgcaactatcccggcatgtgctgcacaaccatcaatggcacggatctaggagcagcgtgtcagctgtagagaatgctacgcaacatcaacagcagcaggcggcggccagtctgagccttcgtcattcgttttccacaagttcaaattacacggagacactatcatccttgctacgcaaatcagcaaatacatgcagcaaggacacgctgctgtttatcgaccaacagagtcaccatcatacagccggactgatcgaagatgacgatgattcatacatgggcaggtccctttgggtatgtcgagatagttgtagaatacctggaggcattcttactaaatttatacgtcctgttacagatatcgcccgtaacgccacacaaactcatcactgtttcgcccaagaattagatgcgatattataatccatatggatgtatactttggtaaagaaacccgaaaatgaaagcgaagccgaaacaagaatatacaaaacgcactatagccataagcctaaggtttactttatatgatatttcttaaccggagctcccgagcgataagctcgggatgaagatgttatacaactttgtttaatttaagatacgtactcatatatacgatacttgcaatactgcataacgtttgaaagtttgataaaacttaaatatattgtataagcattagactatttattcaaagccaatgacgaggattagttttctttatatttcaccgaattgacgaagatttttataacctaacgactaccgatatttatttagccaaacaatgaagtacaattttatttgattgagtttttcgttcaaactataaatcttcttgtataattccctaacgatttttatgatgaagtgcttggcatgcctaagttaagctttttttacatgaaaccaagtttcggactaaaatctatgagcatagttataaatgtaaggacacgtattctctttaattacgattactttgaattgtacattaatctatctgattgtaacttttccacaaccaaaaaattctggcacaactgcatatgattctttcgattcgttgtcgggctacgttttgtgaatcgtttataatgcggatctatatacaaacatatatatttctttaaaaataatgtattctatatgtagacgaaagcattacaccaaaacattatattgataaaaaatgtttgaggactctaccacattgttttctggagagaaagaactttattacggtgtaaaatgttcattgtattcataaataaacgtgaagttgttgaatatgaagtatgatttggaagtgaactaataaaaattaaaaaaaaaacacttggctggggttaggaaggtctctttattgttgcataagcatcagttctcaaatattgttgaatcct

SEQ ID NO: 7457 - DNA, 3291 bp, DROSOPHILA
atgacagtaaagctagttcgcggaagctttaacatatctgattaccgaaattgtctactcatagcttgtgcgaacaaacatggtcagccatcggtttcgggctcttcgtcgggcggcggaggaggagcaggaggaccaggcggcggggagagagtgccccccatcggaggctatcagtggccggcggatcagactccaggtgtaatgggattgaagaaccacgggaacacttgctttatgaacgcggtgctgcaatgcctcagtcacacagacatactggccgagtactttgttttagatcagtacaaggctgacctcaagcgacgcaacaagattaactcgcgaaagttcggcactaagggagagctcaccgagcagctggccaacgtgctgaaggcgctgtggacttgcaagaacgagagtgatcacagcaccagctttaaggcagtggtagatcggtacggaacgcagttccgcagctcgacgcaacacgatgcccaggagtttcttttttggttgcttgacaaggtgcacgaggacctcaacacagccagcaagcggcgctacaagagcctcaagaactcgtacggccgttcggacgaggtgatcgccgccgagacgctggccaatcacatccggtgcaacaacagcttcgtccaggccgtgttccaggcccagtttcgctcatcgcttacctgcccgcgctgcgaaaagcagtcaaacacattcgacccctttcactgcatctccgtgcagctgccgcagctcacgcagcagacgatatttgtcactgtagtctacatgacgcggctcccacgtcaggtgcggatgggcctgcgagttccagccggatcgccaatagtagcgcttcgagagcagcttcaggcggacacgggtatcgagggatcgcgaatggtcctggtggacttaaacgccgaaggattcacccgcgttttttacgacacgcaacccgtagagacgctatctagcattgaaacaatttactgcatcgaggtgccggcggcaactcctgttgccaaggctgctactccttcagagacgggggataagtctgctccaacagcagtgactccatctcctgctgcagctcaatcgcaggcggacctgttgctcctagtggccaacgtataccgagcgaaggatggcgcggatataacccgctttggagcccccttcagcatgaaggcacctcgtgactgctcataccaggatctgcagaaacgaatgctccgcgaaatggcgccgctgctcaagccagaggtgttctcctatgccaccccactggccgagatgttccgtattcggctgcaagacccatccgcagaccctgatacctatttggagcaagtggagcacccgttgcttaccgaaatgatcgacatggcgctttccgtgctttcctccgaggcaggaccccagcatataaagctccttttggagtggagttcacccgaggcacactttatcagtaaacagcaggacacggaagaagccgtcgtggagcacgagagcgttgctcgtctaagtgccagcaagccgagcgacaccgctgcgctgactttggagcagtgcctggagcactataccaaggcagagactctgagtgccgaggatgcctggcgctgtccacactgccagcaataccttccagttgtgaagacgctgggtctgtggtcgctgcccgacatcctagtagtgcatttcaagcgcttccggcaacatcaatctaaaggtccgcaagcggctaagctgacaacaatggtcaagtttccgctgaccgccttcgacatgtcaccgcacttggcacgtggcgtgcatgaaagcgccagcagctcgctgggtatgggaacgggcattggacttggactcgggctgggctcgaatccctggaagaaagctcgttccgtcgactcgcggtcctccacacttaactcgcgctgtgacgcaaaggatacgcggtacgacctttacgcagtgtgctaccatcagggagatacattggaaacagggcattatacagctgcctgcaagaatccttacgaccgtcagtggtataagttcgacgaccagcgagtgagcaaggtgcctgaggacgacattgagcaggacataatcaataatgaggcatacatgctcttctaccagcgacgcagtgtagatgcaggcgagtgttccggttccagttcgaactccggagatcactgggtatcgcgaattgcgccagcctcatcatcgtccgcatcatcgacgtcaggaaaggagagggagccggttaagttggaggaaaacacagaatctcctgcggcagtagaagtaacggagaaggctcagtccaagccggtggacatagtttgccaggataaggcgaaaggtaaattttacctaagatatatgaagatatacattaatcttaaattatacactatttcaggtactgcagacggcccagacgctgatcaagaacagacaactgttccacatgatttacaaattgaggaactggcattcgcggatgcagatgtagacaccagtttaggagagaccatcaaggcggaggtaaatctagcggctaaggatgaacccaaaaaggtggaggtagaggaagccacgcctatatttgccatggatgaagacggttccgaagctagacaggagaagaaggaggaatgcgttaagaaggaagacgaactctccgaagccccagatgtgagcgaactaaccgccgagtccaagaccaatggccacgtgagctcttcgtccagctcttcctcctcggaaagctcgctatcgtcccgctcctcgccgcgatcattgagtacttcagtcacagctgcatctactctgcagagcaagttcaacggccacatgagcgccgctccagctcttttcaatggaaatggaaatacgtcacagctctcgtccagcttgcaactatcccggcatgtgctgcacaaccatcaatggcacggatctaggagcagcgtgtcagctgtagagaatgctacgcaacatcaacagcagcaggcggcggccagtctgagccttcgtcattcgttttccacaagttcaaattacacggagacactatcatccttgctacgcaaatcagcaaatacatgcagcaaggacacgctgctgtttatcgaccaacagagtcaccatcatacagccggactgatcgaagatgacgatgattcatacatgggcaggtccctttggatatcgcccgtaacgccacacaaactcatcactgtttcgcccaagaattag

SEQ ID NO: 7458 - protein, 1096 aa, DROSOPHILA
MTVKLVRGSFNISDYRNCLLIACANKHGQPSVSGSSSGGGGGAGGPGGGERVPPIGGYQWPADQTPGVMGLKNHGNTCFMNAVLQCLSHTDILAEYFVLDQYKADLKRRNKINSRKFGTKGELTEQLANVLKALWTCKNESDHSTSFKAVVDRYGTQFRSSTQHDAQEFLFWLLDKVHEDLNTASKRRYKSLKNSYGRSDEVIAAETLANHIRCNNSFVQAVFQAQFRSSLTCPRCEKQSNTFDPFHCISVQLPQLTQQTIFVTVVYMTRLPRQVRMGLRVPAGSPIVALREQLQADTGIEGSRMVLVDLNAEGFTRVFYDTQPVETLSSIETIYCIEVPAATPVAKAATPSETGDKSAPTAVTPSPAAAQSQADLLLLVANVYRAKDGADITRFGAPFSMKAPRDCSYQDLQKRMLREMAPLLKPEVFSYATPLAEMFRIRLQDPSADPDTYLEQVEHPLLTEMIDMALSVLSSEAGPQHIKLLLEWSSPEAHFISKQQDTEEAVVEHESVARLSASKPSDTAALTLEQCLEHYTKAETLSAEDAWRCPHCQQYLPVVKTLGLWSLPDILVVHFKRFRQHQSKGPQAAKLTTMVKFPLTAFDMSPHLARGVHESASSSLGMGTGIGLGLGLGSNPWKKARSVDSRSSTLNSRCDAKDTRYDLYAVCYHQGDTLETGHYTAACKNPYDRQWYKFDDQRVSKVPEDDIEQDIINNEAYMLFYQRRSVDAGECSGSSSNSGDHWVSRIAPASSSSASSTSGKEREPVKLEENTESPAAVEVTEKAQSKPVDIVCQDKAKGKFYLRYMKIYINLKLYTISGTADGPDADQEQTTVPHDLQIEELAFADADVDTSLGETIKAEVNLAAKDEPKKVEVEEATPIFAMDEDGSEARQEKKEECVKKEDELSEAPDVSELTAESKTNGHVSSSSSSSSSESSLSSRSSPRSLSTSVTAASTLQSKFNGHMSAAPALFNGNGNTSQLSSSLQLSRHVLHNHQWHGSRSSVSAVENATQHQQQQAAASLSLRHSFSTSSNYTETLSSLLRKSANTCSKDTLLFIDQQSHHHTAGLIEDDDDSYMGRSLWISPVTPHKLITVSPKN

SEQ ID NO: 7459 - DNA, 3672 bp, DROSOPHILA
ttacgcagctgttgaaaaactcgccactgatgagctgtgcaagatctgcatggatgcgccgattgagtgcgtttttctagagtgcggacacatggccacctgcacgagctgtggaaaagtgttgaacgagtgcccaatttgccgacaatatattgtacgagttgtaagattttttagagcgtaatgatacggctaatcttacggtaactggacatagtgtaatgatggaagccgatagccgccacaagctacatacagatacagatccagcccagctgtacaagttgtacagcagatcctgatgatgcgactacaacgtatatgtttccttaaatgacgcgagtgcaacaataatattaatttgattatttggttcttctctgtagtatgttgccagtatatatatatgcctatatatagtgtaaaacctgatatcgcttttaaagtgtattcatctatttcaaatgtgaaatacttttgctatttattttgtttgttcttgttgtttgtataaaaacgagaggttatctagatcaactaacattcctataaaccgcaaaaaaaaacattaaatctgttattaacagttgtgtgaaaaactcgtctagatgcgcatttaaacaataaatattttccaatatctagcgctctattagcccagccattcgaaatggggattttcctccaaacaaaggttgtctggatcataaattctaatcgaagtcgattaagattggtcactagttttgtgacgaatcgcctgtaactggggattttcccataccttgagcttatggtttttcgaaatctttgaaatactctttttgcccagaaccactatgaaggaacctagatcagatcaatcccgaagatactcccatgccaccatgccaaactagagcagttcaattacaacagtctttaatcacgttaaatagtaatctaggtgtggtgacaagagctgggaaacagcgcaatgactagaaggggaagagagacgagaggcgaaccgattggccagttcagattcgatggatgcgcaggtcgagcggtgactccacgtccatcttaacgaagaagtcctcgctgtggagatagctatgctgtctatcgcctagccaatagctgggcgagaattccgcatcctgtttgggttttagcgagtaatcgctgggctcattgttggagtcatcgtagtagcgggcggatgaggaggagctggtggactccacactgctggcagcgggaagacacgtgaacgctgattcgctgctggcctccaggagacagggtacgctgggcagagtgagcggctggctggcgatcaggtggatgctgtgcttgaaggtcttgacgtgctttcgcagcgaggacggatccgtgtagcgcttctggcagccggccactttgcacatgtacggcttctccatcgaatgggtgcgcgtgtgcttgaaacgatccgaggagttcgagtacgccttctggcagccctcgaagctgcacttgtagggtttctcgcccgagtgtgacctaatgtggatcttcaggttctccgcccgcgagaaggacttctcgcacaggtgacagcgatgtggcttctccttcgtgtgggtgcgggtatggacaagcatcttgtagcgggcattgaatcctcgctcgctgcgctgacatccccgccagcggcaatagtagagtccgtctgtcaggctggcgatcgcatgtcgctgggtcacgtgctgtgccagtgcatccaaggtgtcgaaaactctgcaaggatcaaagggatataagtggttagtacgaaaataacatgtactggattgatttcttatccaatattaatacacttgctgaccataaacaatacactgcatctctatcaatttgacccaaaatcacattattatcgctattggagggtttatcaaaaagtcgagtccaacagttcagcaaatgccaggctgcctccggggttttttttttatttctttcgaatgcgtaatcagtttcaatggtaaaacgcgggggaactgtgttttatatttttctagaactactcaatgtctttctctggcaactcaaaattcaaaagaaaatataatgctgagtttttttttcgtttttaaaaaacattacgaaagtgctgagacccctttaggaaatttctttgaaattttcacaataattctgtaatgcagttgacacttacctatcgcaatctgtccagttgcatacgaaatcgctggcggtgccgcactcgctgctgctgctgcaggacttgctgtcgtcggggaactccactggactgcggcagagctcgtcctgctggccacgagccttcatgatcacggactgggtgcgctgacgatatccgtatccggcgatgggacgcggcggtgtgatgggcggcgtgggaaacctgatgtgctgcatctgctgctggtgctgctggtgctgctgctggtggtgttggtggtgatccgccaaccagctgccggaatccgagtaggcggctatgtacggtggtgtgttatacggcgtaaagtagccgagaggcggctcgtagatgcctctgctgtgtgggccgctgttgaagattgacttttgtattatatccatgtttgttgtctgtggtgggtgctgatcgagaaaatttgttgctttcgctaaagcgcctgccgatcgaatgagccgctcgcctgcagaggttcgggtaatatgcgaaacttggacggcgataaggggtcgcccagacggacagggtatgcttatcagtttcgaaggctgcagacgggtccggcgggggcgtggcaggggcagggggagcagacggcggcagacggaaccaaaacagtggagcgccgaggagcaggtgcgtagcggtggagcggtggaaaaaaatccgctggggcaaatggatctggggcaaaagcacacactacgtgagtgaaactctgtgctggatggactgcgacgcagatgggtgactggggggcgaccagggtacggtctgggcccgcttatcaacgcacaagtggagagccagctagtcagccagccagccagtccacatatgtacacaggcacatgtgtgtgcccgatgatcgctctttggggggcaagtcttatcgcccggtgccgtctgcctgcctgcctgcctgacttgcacttcgtaccgcgtagcgaattccctgccgcaccccaccctgcgtaccgatccgagtcccactcccgatccgaatcgcaccccttcattggaacaggtacgtcaactcttggagccgtactagtgcactcagagaaaagcgaatggactaatacgtctgaagacgcatctagatcttttgcctgagaatggctagttctagaatctacaaagaggccactataagatcgccttgcataatttccataaatagatttattaataaaacaattaattgttttcctgacctaactatatattcgagcttgtgactaaaaagtaaatagttatagttttgagacaaagaatcaaaagtttaagcagacaatttgaatcgttatgtgattcctatactctgaagggaaatggataaaaactttcgtggaagccacttaatttcaattctgtaatatatttctcaatttctcaatatgttttattattacaaagttaaaattagactttaa

SEQ ID NO: 7460 - DNA, 1230 bp, DROSOPHILA
ctttagcgaaagcaacaaattttctcgatcagcacccaccacagacaacaaacatggatataatacaaaagtcaatcttcaacagcggcccacacagcagaggcatctacgagccgcctctcggctactttacgccgtataacacaccaccgtacatagccgcctactcggattccggcagctggttggcggatcaccaccaacaccaccagcagcagcaccagcagcaccagcagcagatgcagcacatcaggtttcccacgccgcccatcacaccgccgcgtcccatcgccggatacggatatcgtcagcgcacccagtccgtgatcatgaaggctcgtggccagcaggacgagctctgccgcagtccagtggagttccccgacgacagcaagtcctgcagcagcagcagcgagtgcggcaccgccagcgatttcgtatgcaactggacagattgcgatagagttttcgacaccttggatgcactggcacagcacgtgacccagcgacatgcgatcgccagcctgacagacggactctactattgccgctggcggggatgtcagcgcagcgagcgaggattcaatgcccgctacaagatgcttgtccatacccgcacccacacgaaggagaagccacatcgctgtcacctgtgcgagaagtccttctcgcgggcggagaacctgaagatccacattaggtcacactcgggcgagaaaccctacaagtgcagcttcgagggctgccagaaggcgtactcgaactcctcggatcgtttcaagcacacgcgcacccattcgatggagaagccgtacatgtgcaaagtggccggctgccagaagcgctacacggatccgtcctcgctgcgaaagcacgtcaagaccttcaagcacagcatccacctgatcgccagccagccgctcactctgcccagcgtaccctgtctcctggaggccagcagcgaatcagcgttcacgtgtcttcccgctgccagcagtgtggagtccaccagctcctcctcatccgcccgctactacgatgactccaacaatgagcccagcgattactcgctaaaacccaaacaggatgcggaattctcgcccagctattggctaggcgatagacagcatagctatctccacagcgaggacttcttcgttaagatggacgtggagtcaccgctcgacctgcgcatccatcgaatctgaactggccaatcggttcgcctct

SEQ ID NO: 7461 - protein, 384 aa, DROSOPHILA
MDIIQKSIFNSGPHSRGIYEPPLGYFTPYNTPPYIAAYSDSGSWLADHHQHHQQQHQQHQQQMQHIRFPTPPITPPRPIAGYGYRQRTQSVIMKARGQQDELCRSPVEFPDDSKSCSSSSECGTASDFVCNWTDCDRVFDTLDALAQHVTQRHAIASLTDGLYYCRWRGCQRSERGFNARYKMLVHTRTHTKEKPHRCHLCEKSFSRAENLKIHIRSHSGEKPYKCSFEGCQKAYSNSSDRFKHTRTHSMEKPYMCKVAGCQKRYTDPSSLRKHVKTFKHSIHLIASQPLTLPSVPCLLEASSESAFTCLPAASSVESTSSSSSARYYDDSNNEPSDYSLKPKQDAEFSPSYWLGDRQHSYLHSEDFFVKMDVESPLDLRIHRI

SEQ ID NO: 7462 - DNA, 4773 bp, DROSOPHILA
tgtccaatcgatcgatcgatcgattagcccgccgataggttaaagcactccgctcatggacgcaaacaaaaagagttgtgaatttatggaactgcacagaactgcgttgtgtttgtttgttcgccatgattactttcgcataacagatgcgccatgtttttccttgctgctgccaataattaaattgatgtattagcctgtggggacaaagcaagggaaattgatccaaaaatggctataataatatcaacgatattgtgttttgctttcattcaacgttttttttacttcgatatttattagtttagtttggtgtgtttataaaaaaaaactccttaaatctatataaatgaaaatgctcgtcagaaagatacttcttctatgaatgtgaatgaaatagttttgccatagaatttccaatcctcaaaggagatggatgcttttcacatgctttggaccatatataaattggctttgtggtcttccatttaattcccatgctaattatttggattaggactgtgcctagacaagcggggaaaagctgcccccaaagctaatggcgaattaagagtaagccactgaggctttgataaacttgcatttagccacagaaaaatcactggaagtgcattcccgttatttgccagagggtaactaaaaaagaaaccccaatcaaaccacataaaatacacgaagtttttctgctgttttggggcactgttttaattgataaaagcagaggcggcgaggtcagaggttttcacacgaagccaacgtgaaatcagagatggatatgctgtgtggccttatataagtataaatacatgcgaatatgcatatgtatatttcccctgcagcagcatcagcatctctcattccacccactaccattcgagcggaatttccgtgaattcgaaaaccaaatccaagttgaggccagctggcgtggagaattttcagcgagagctcagattgccaaaggcagtgtgcgaatgtgatgatgaactttatgtgcggcatgccactgaacgagcggctgtgcaactgcaacggcttgcgactagatttaacttctctaactctgctgatctataacctaacaccaccccctcttccctcttgcagacacatcccgaaggcgaaggcaacggccattgccgatacgcccgaattgaagcgcatcgcggagaacaccaaaatccagtccaacgtcaagtaccacgcggactttgagaaggccaagggcaaatttacacaggtcagtgcggaaaaagttaagataagcttaaagaacttatacttctgatggaagtttattgcctaattaggcttaatttacttgcgcgatggatagttctttgaaatattcaatattctgtttgacatgtttaactaaatataactaaagcgcggcccttgtgaagttcacttcagtacaagaacattgatatatccaacccaagtttgagataatgcttttgatatatgtaaagttccatccgtccatttggagtgtgcccttacctaaattgcttttgcattcgacaggtggccgatgacccggaaacgctgcgtatcaaacagaacacgaagcacatatcgaatgtggcatatcacggggatctggagaagaaggcggccatggagaagcagcgaggatccgccgaggtctccgacagcagcagtgagtactcgaccgaccttctccctatacccctccatctgtatctatcactatttccatctctgtgagaggactgtaactattgtatctttcctactcatcatcactggtaacgaagctttattgcttgcaaccgctagttctcttaataacggtcagttggtggtgggccgggcttactgtttttgaattaatttattcgaatttcaattgacttaatgtgtttataatagtctattgacgtcattcactcatgcatgcattcaaatggtcacgacaaaattacaaagccagcttacaaagaacttgtgtagcgattgttattgatttgtttgttaattgaattaaacatttaaatatacattgaatgtcactcaaaattaccacccctcaaaaaaaaaaatacggaattttagtataaattcctttttctttctttcctttctattattttatttaatttaccttattttgtatccactgtacttttactttgtggacatgcatgtggcatgtgtgtctgaatttgaacttctgcactgtccatctaactatgttgtatctatttccatcacatctgtcacattgtgtaattaatattgattataatgccgttttttttatggtttgttttctctccttttattttgttgtggactttgtttatcatttgttgccatttatcccacaccatcaacaaccaactgcaacaataaaatcaacaacattatttgtgtgctttctgaactaccgttaacctaacgttacacacaaaacgaacaccacacacacatccacactaacaacaacgactgtggacaatggtgcaactaattaatcgtcacctcgaaatcgataaatatcgaaaaaatcgaaaagatgaatcggaatacttctcagagcaattggcagctgaacaattctcgcaatatgcacccacagcctcacccataccgccagcagcgacaacactacaccagcaacaacaacagctgcaacaccaacagcagcagcagtaccagcaacatcagcagcaactgcagcagcagcaacaccaacaccaacactatctgcaacagcagcaacagactctgccaccgccacccatacaacaccagcaatacaacacagcggccataacgcccacataccaacaacttcaacagcaacagcaacagcaacagcaacagcgggcacagcagcagcaactgcacgatccctatgcacactaccaacaaccgcaggcgctgcgccagcaacagcaacaacaacaacagcagcaacaacagttgctgcaacagcaagccattaaacaagcctcacatctgtatcccacagcaacatcccagcagcaacagatgccgccaccacagtcgccggcgaatccgcagcagcaggcgctcaacagctacaacgagatgcgctcggccatactccagaactcgcatcatcccagcggcaattccgtggatcagtacgaccagccacagcagcagcaacatcagccgcaacagcagagcaccaaccccacgctggtggctgcccaacagcagcaatcccatcatagcctactgaacaacaatgccagcaacggcggcatttcgcacagccaccacagcaacatcaataataatggacacggctcacagaaccaaatgttgccgccacaaatgagacgctcggcggccagtgtcgtcgcctacgatggcaatagcaagcaacaagtggcagccggcccaggagctgcccaaaatcacctgcagcaattatacgcgtctcccaattacgccgctgtgactccatctgagaattcaataaacgttaagcagcacgccagcaatggccatatgccgaaccagcagcaacagcacgtggcaggcggcagcaatatcgggaagatagcggactacgatccactgacggatggaccaagggtggtgcccaatgccggacggtccagcaccactttggtctacagctccgagccacgtggcaatcaaggtggtaagttacggagcaggctagctggtagttcgaggtagtgatagtgcgcgctcagctcgatgttacacactcatcttgtccttgtccccggctagtagatatgtagcctaaacagaactaatgtccagaacttttatgtcctcacaggcaacagcgtttaccccaagcggattggttcggtttccgatattgatccggccaatggcatctacggatcgctcaccgccgccgagcaggctcaccagcagcagaagcaccagcagtactaccagcaggtacagatgatgcagcagcaggagcacccgccgcagcaacagcagatgcgccagcagccatcctactcctccctgcaggaaaaacaatcgcgccagagcacagcaatggtaagttttgttggctgtctattgtttattacaaagttatttttaactatatgtcccatattttagcgcgtctatcgggccatctatgactatgaggcgcaggacgtcgacgaggtcagcttccgcgagggcgacgtcatctttgaggtggagtcaatcgattccggctggatgaccggacgtgtggagcgtaccggcaagaccggcatgctgcccgccaactacgtggagcaggcggttatataatagggaatgttctactactgctgctgccgccagcagtttgtggtgatcctcgtctgcctgctctacatcctgctcgtgctcgccttcttcgtcaacgtttttatcgcggatcgcaacatgcacgcgaatctaatgatgaggaacggtcggcacggcggaggtggaggaatccctccgccagcaggcatgcatccgggtcaccacaatccgtacgacatgcatggctacaaccactacagcaactaccatccgcaagtggattccaagcagcagcaggagttggccaaaaagacgccgcagcagcaagccgagcaggacatttactactattttaatcatgtattcaggcggcgacggcgatgatgtggaggagtcacacgccccaaccaacagcccaaaatttaaatttttagtgcattaacttatactgcatccactacatacatagatata

SEQ ID NO: 7463 - DNA, 1788 bp, DROSOPHILA
atgatgaactttatgtgcggcatgccactgaacgagcggctacacatcccgaaggcgaaggcaacggccattgccgatacgcccgaattgaagcgcatcgcggagaacaccaaaatccagtccaacgtcaagtaccacgcggactttgagaaggccaagggcaaatttacacaggtggccgatgacccggaaacgctgcgtatcaaacagaacacgaagcacatatcgaatgtggcatatcacggggatctggagaagaaggcggccatggagaagcagcgaggatccgccgaggtctccgacagcagcacctcacccataccgccagcagcgacaacactacaccagcaacaacaacagctgcaacaccaacagcagcagcagtaccagcaacatcagcagcaactgcagcagcagcaacaccaacaccaacactatctgcaacagcagcaacagactctgccaccgccacccatacaacaccagcaatacaacacagcggccataacgcccacataccaacaacttcaacagcaacagcaacagcaacagcaacagcgggcacagcagcagcaactgcacgatccctatgcacactaccaacaaccgcaggcgctgcgccagcaacagcaacaacaacaacagcagcaacaacagttgctgcaacagcaagccattaaacaagcctcacatctgtatcccacagcaacatcccagcagcaacagatgccgccaccacagtcgccggcgaatccgcagcagcaggcgctcaacagctacaacgagatgcgctcggccatactccagaactcgcatcatcccagcggcaattccgtggatcagtacgaccagccacagcagcagcaacatcagccgcaacagcagagcaccaaccccacgctggtggctgcccaacagcagcaatcccatcatagcctactgaacaacaatgccagcaacggcggcatttcgcacagccaccacagcaacatcaataataatggacacggctcacagaaccaaatgttgccgccacaaatgagacgctcggcggccagtgtcgtcgcctacgatggcaatagcaagcaacaagtggcagccggcccaggagctgcccaaaatcacctgcagcaattatacgcgtctcccaattacgccgctgtgactccatctgagaattcaataaacgttaagcagcacgccagcaatggccatatgccgaaccagcagcaacagcacgtggcaggcggcagcaatatcgggaagatagcggactacgatccactgacggatggaccaagggtggtgcccaatgccggacggtccagcaccactttggtctacagctccgagccacgtggcaatcaaggtggcaacagcgtttaccccaagcggattggttcggtttccgatattgatccggccaatggcatctacggatcgctcaccgccgccgagcaggctcaccagcagcagaagcaccagcagtactaccagcaggtacagatgatgcagcagcaggagcacccgccgcagcaacagcagatgcgccagcagccatcctactcctccctgcaggaaaaacaatcgcgccagagcacagcaatgcgcgtctatcgggccatctatgactatgaggcgcaggacgtcgacgaggtcagcttccgcgagggcgacgtcatctttgaggtggagtcaatcgattccggctggatgaccggacgtgtggagcgtaccggcaagaccggcatgctgcccgccaactacgtggagcaggcggttatataa

SEQ ID NO: 7464 - protein, 594 aa, DROSOPHILA
MNFMCGMPLNERLHIPKAKATAIADTPELKRIAENTKIQSNVKYHADFEKAKGKFTQVADDPETLRIKQNTKHISNVAYHGDLEKKAAMEKQRGSAEVSDSSTSPIPPAATTLHQQQQQLQHQQQQQYQQHQQQLQQQQHQHQHYLQQQQQTLPPPPIQHQQYNTAAITPTYQQLQQQQQQQQQQRAQQQQLHDPYAHYQQPQALRQQQQQQQQQQQQLLQQQAIKQASHLYPTATSQQQQMPPPQSPANPQQQALNSYNEMRSAILQNSHHPSGNSVDQYDQPQQQQHQPQQQSTNPTLVAAQQQQSHHSLLNNNASNGGISHSHHSNINNNGHGSQNQMLPPQMRRSAASVVAYDGNSKQQVAAGPGAAQNHLQQLYASPNYAAVTPSENSINVKQHASNGHMPNQQQQHVAGGSNIGKIADYDPLTDGPRVVPNAGRSSTTLVYSSEPRGNQGGNSVYPKRIGSVSDIDPANGIYGSLTAAEQAHQQQKHQQYYQQVQMMQQQEHPPQQQQMRQQPSYSSLQEKQSRQSTAMRVYRAIYDYEAQDVDEVSFREGDVIFEVESIDSGWMTGRVERTGKTGMLPANYVEQAVI

SEQ ID NO: 7465 - DNA, 4147 bp, DROSOPHILA
atcgctttgaagcggctaattgaattccagattaaagtgtaaagcaaaatgggggggaataaaaaaaactgatttgtattgcaaattaaaatttaagtgaaaacgaatcaggcgcaaacacaaacagggacaatagattacaatatcctgcggcgcagacagcacgacattaaaaaggcacgaggagcagcgagagctggcgcggaatgggtatggacatggcaatggaggtggaagggacgcgccaggacgacacaggaccttcgtgcagctgctgctcctgctgatggcacatgcgcctgggagggctgcgtttcgggattgggactgggatgcgggctggactccagcgatggctgcctgccatcagcggcagaagcagcagcagcagcagcagctacagcagcagcagcagcagcagcagcaacggcaacggcagcagcagcaactacggcagcaacatcggcagcagcagcaacaccaacaatatcccaggcttgcgaccgtcaggccaacggtttccgcttgcttactgctggaacggaaaaagccaaggcacatatatccatgcacatccacaggcacattcggtcggagccacatccatgggatagtagataccgaacgctgagggccaatccgagagcagcaggtaggcgtggacgtatctaccatttccaaacaacttcaaccccgccacaggcagctgccgttggtcgggccgctcgccaccctcgtcgccctcctccgcacttctcggccggttcaaaaacgggtcgccctgccagcagttgcagtcagttattaacgagcgctactcccaacagcaacatcgctcagcggcagcagcagcagcagcaaaagcaaaagcaaaagcaacactaacaacagcaacacgagtcactcaaacgtggaagcgagacaggaatatcagcactccactcgcctcgtttcacttcgattctcaagcgtttgagtcggagagcggcgaacggccaacgaattcagtttgtgtcgagacgttgtcggtggcacgtcgcatccaaaagaacgctcagtcagctgggaaatatactgagaaaagatacattcgtagatacaagtgctaagccaaagtgaaccgtgcagttcgcgcaactaaacaattttaagccaaataaaactacacaaggccaacaaagacagtataatgtcttccacatcggcctcacccatcagcaacataaccgtggatgacgagctcaacttaagcagagaacaaggtgggttcaagttcaaaactggctcagaacaacttggcaaatgccgacggcaaagcgcattactctctagcactttttgactagtttcaaaaaatgttccattaatatttgaaagtagtctcacatagcattgcatttatatgaattgaaaactaaccgtgggcatttctattccttcctttttagactttgctgaagaggatttcatagtgatcaaggaggagcgcgagacaagtctctcccccatgctgacgcccccgcacacgcccaccgaggagccgctgaggagagtgcatccggcgataagcgaggaggcggtggccacccagctgcacatgcgacacatggcccactaccagcagcagcaacaacagcagcaacagcagcagcagcaccgcctgtggctgcagatgcagcagcagcagcaacaacatcaggctccacagcagtatccagtttatcccacagccagcgccgatcccgtggccgtgcaccagcagttgatgaaccactggatccgcaacgcagccatctaccagcagcaacagcagcagcagcaacatccgcaccatcatcaccaccacggccatccgcaccaccctcacccacatccgcatcatgtgcgtccctatcccgctggcctccatagtctgcatgccgcggtcatgggtcgccacttcggagccatgcccaccctgaaactgggtggtgccggtggagcgagtggtgtacccagcggcgcaactggcagcagtcggccaaagaagcagttcatctgcaagtactgcaaccggcagttcaccaagtcgtacaatctgctcatccatgagagaacccacacggacgagaggccttactcctgcgacatctgcggcaaagccttccggcgacaggatcatctgcgggaccaccggtacatccactccaaggacaagcccttcaagtgcagcgattgcggcaagggtttctgccagtcgcgcaccctggccgtgcacaaggtcacccatctggaggagggtccgcacaagtgtcccatctgccagcggagcttcaaccagcgggccaacctcaagagtcacctccagagccacagcgagcagagcaccaaggaggtggtggtgaccacctcaccagccacttcacattcggtgccaaaccaggcattgagttcgcctcaacctgagaatttggcacagcatctgcctgtcctggatctatcctcgtcatcctcgagctcagagaagcccaagcggatgctgggcttcaccatcgatgagatcatgagcagatagattgaaggaccagcgaaacccggtatccggtttcttttgagacattctaaaagagattcagagagctggacgtccgccaggcatgggaaatgcctggaatggaaaaccaagcgagtccagcccgcattctggccaaaggtgcaagtggaaaatcctcgccagcaactcgtaatcgcaacccagtgagcagaagagtcatcctccgtgcaatcggttctatgtagcagatcccaattgcgttaaacaaatgccaaagtcaaatagcagaggaaaactgatgaaaaatccaatgaaaagtattgctagcacaagcctcctacaaatcgattccaaaacacacacacacacacacaactgtaaactataaactttaataaatagcacataatttatattgtaatctaactattattgtatgtaccttatagtcgtagtagcccattcagttcgtagtgcttatggagtaaaccaaatgttatgttacaatagctcaatcaaacaaacctcaaacccgctttggttattgaaagactgttttaattattatatttaaatagtacttgaataaatcaatcgatcgattgtgtaatgttaaaccccgacgagtgtcatgattacttactgtttagacttaacaacttaattgtcgctatagcaattgtgactatgcacaacgatctcattgtcgtctatatgtatgtctgaaacattcgtattgatatgaagttatcacaaaaatacgtaaatataaacgcaaagtaattttcaactgaaatttaataagactttttatgaatacggtggattttgtgtttccaggtatttggcaatggcaatttcgccttgatttatcattacttctactggcaacttgataatctttatggtgtactaagttaaagttatctgaaaagatttaagcagcaattttttgattaccttctaccacctactgactgattcaagttccaagcggactgaatgattttgatctacttttaatcactttgaaatctttcttatccgctgactaaatcccacgccattccgatttgggaattttctcatgctgcgaatataactcagtagactgaactcgtaggaccatataagttgaaccatcaaacagcagctgtcaaaatttattaaccatccgaatataactcagtttttatgcagatctcgatttgcgcatttttaagcagctctattatttttcaggttgccgattaagtaagcagaagtctcgccaccaaaaatattcaaactgtcgcagaagttaatttatgaaatcgaatcgaattgaatttgatgtcagttttgctatgattttgtcatgaatcggtttcgatttcggtaacactatggttattgtttaactttgaggtgtggtccaaatatttatggcctgtgtttcagttttgggtttagttcagttttcattgtggcttctcttgaaaatcgggaacgtgccaaatgccttgcaaaaggtatgtttgatttcctttaatggtggttttcttttctagtttcttccattggcaattgcatttctcttagcacgcttcttactcagaactgtcaatttcagat

SEQ ID NO: 7466 - DNA, 1961 bp, DROSOPHILA
gaattcagtttgtgtcgagacgttgtcggtggcacgtcgcatccaaaagaacgctcagtcagctgggaaatatactgagaaaagatacattcgtagatacaagtgctaagccaaagtgaaccgtgcagttcgcgcaactaaacaattttaagccaaataaaactacacaaggccaacaaagacagtataatgtcttccacatcggcctcacccatcagcaacataaccgtggatgacgagctcaacttaagcagagaacaagactttgctgaagaggatttcatagtgatcaaggaggagcgcgagacaagtctctcccccatgctgacgcccccgcacacgcccaccgaggagccgctgaggagagtgcatccggcgataagcgaggaggcggtggccacccagctgcacatgcgacacatggcccactaccagcagcagcaacaacagcagcaacagcagcagcagcaccgcctgtggctgcagatgcagcagcagcagcaacaacatcaggctccacagcagtatccagtttatcccacagccagcgccgatcccgtggccgtgcaccagcagttgatgaaccactggatccgcaacgcagccatctaccagcagcaacagcagcagcagcaacatccgcaccatcatcaccaccacggccatccgcaccaccctcacccacatccgcatcatgtgcgtccctatcccgctggcctccatagtctgcatgccgcggtcatgggtcgccacttcggagccatgcccaccctgaaactgggtggtgccggtggagcgagtggtgtacccagcggcgcaactggcagcagtcggccaaagaagcagttcatctgcaagtactgcaaccggcagttcaccaagtcgtacaatctgctcatccatgagagaacccacacggacgagaggccttactcctgcgacatctgcggcaaagccttccggcgacaggatcatctgcgggaccaccggtacatccactccaaggacaagcccttcaagtgcagcgattgcggcaagggtttctgccagtcgcgcaccctggccgtgcacaaggtcacccatctggaggagggtccgcacaagtgtcccatctgccagcggagcttcaaccagcgggccaacctcaagagtcacctccagagccacagcgagcagagcaccaaggaggtggtggtgaccacctcaccagccacttcacattcggtgccaaaccaggcattgagttcgcctcaacctgagaatttggcacagcatctgcctgtcctggatctatcctcgtcatcctcgagctcagagaagcccaagcggatgctgggcttcaccatcgatgagatcatgagcagatagattgaaggaccagcgaaacccggtatccggtttcttttgagacattctaaaagagattcagagagctggacgtccgccaggcatgggaaatgcctggaatggaaaaccaagcgagtccagcccgcattctggccaaaggtgcaagtggaaaatcctcgccagcaactcgtaatcgcaacccagtgagcagaagagtcatcctccgtgcaatcggttctatgtagcagatcccaattgcgttaaacaaatgccaaagtcaaatagcagaggaaaactgatgaaaaatccaatgaaaagtattgctagcacaagcctcctacaaatcgattccaaaacacacacacacacacacaactgtaaactataaactttaataaatagcacataatttatattgtaatctaactattattgtatgtaccttatagtcgtagtagcccattcagttcgtagtgcttatggagtaaaccaaatgttatgttacaatagctcaatcaaacaaacctcaaacccgctttggttattgaaagactgttttaattattatatttaaatagtacttgaataaatcaatcgatcgattgtgtaatgtt

SEQ ID NO: 7467 - protein, 392 aa, DROSOPHILA
MSSTSASPISNITVDDELNLSREQDFAEEDFIVIKEERETSLSPMLTPPHTPTEEPLRRVHPAISEEAVATQLHMRHMAHYQQQQQQQQQQQQHRLWLQMQQQQQQHQAPQQYPVYPTASADPVAVHQQLMNHWIRNAAIYQQQQQQQQHPHHHHHHGHPHHPHPHPHHVRPYPAGLHSLHAAVMGRHFGAMPTLKLGGAGGASGVPSGATGSSRPKKQFICKYCNRQFTKSYNLLIHERTHTDERPYSCDICGKAFRRQDHLRDHRYIHSKDKPFKCSDCGKGFCQSRTLAVHKVTHLEEGPHKCPICQRSFNQRANLKSHLQSHSEQSTKEVVVTTSPATSHSVPNQALSSPQPENLAQHLPVLDLSSSSSSSEKPKRMLGFTIDEIMSR

SEQ ID NO: 7468 - DNA, 12622 bp, DROSOPHILA
ttgccacagaaactcctttgggctgtgtcgcaggcactgcaggagaagaaaattacgccgaagcacgagcaattccgtcagcatgcggcagaccttacgcgcattgtgaagcgcatcttccaggaattctacctgggacattcgtccagcaacagcgaaacactgctaaggtgagtaaggggtggatataatactcgtataggcactattggaacttccaccttccgcaggctggccaagaagtttgcctttagcgtgattgcggggaagaatgcggacgacgtttacctgcaggcgcgcagtcaggaatgcgaggccaagcggttgtcgagcacccgcctctcgggctacatcggtccggaggagtttgcccagcgtaaactgcttctctcgcaaacatcggtcgtaggatcagcagcaggttcggcgcgatccctgcacaacatcttcggcagcgagaactccatcgattccttcggtctgagtcaaatgagcctgcccacaaatgcctgctccgaaacgcaatcgagtatagtggatcgcatctcggaggatctcttctgcaaggaacgccaacccatccggcccaatgcctcgctccagaacagctcgtcgaagagtaacctaggcggactcgcgctgcgcgagaacatggactgcgaggctcgccgttcggcgcaaaagaactttaccggcaaggaccagcagaacatcagtccctacttcggaggcggcggaagtaacagctctgcgcgcaagttccaaatgccacccgtgggcaacagcaaccactccggaggcaaggccaagagacagatttcctttgactgctagaagagtagggccaataggataattgttgaaacgtcattatcataatatgatgcccataaatcctctccgatcccttgaaattctaggagcagaggcaaggagctgcccgacgtgtaaatgagttttagctctttagccttgtaagcaaaaagattaactcgtttttgtttccattattttttgtttgttttagcttaatttattaattcaactgtcaggtctctttaaaccctttcaaaccatttatatataatgacagacaatcgtataataataggtataagtaaaataatctgatatagatcttatagatcgcctcttcttcgactcgcaagactcccgacttttccttgagctcaaatgtagttcaaatgcaagttaaatttcttttagtaacggcatacatacatgatctatatgggatttattttatgcgactcaaatttgatgaatgcaatattttccactgaagtttagatgtattaagaacattttgtgcttaaaaattacaaattttacttaactaccgcacgagtactcaatgcaactgaaattaagctgaagcaagttctgtaacagtgtaaactgaaattagtataataaaagcgccccaatcaatagtaaccactgcggtgaatgtatcgcctaaccagcccaaaggacacgatgtgaaagatgacggccaccaccaccagactgaagcagtccagccaataggtgtagtcggcggtgcgataggatccctgctgcagcacctccactccggtcttgatgcacggatgatcctcgttgacggggcagtctggataaaatattattggataacatgcatcctgattatctacttggaggtaagctcaccgatattatcgatgtcgatccagaacttgtacatcagcgcctcgttggagtagaagaacaacgagaggtactttagtccaggcactgtgtccacattcatgtaggtgccgccaaagataaggaagatcagatcgaagggcgccgcgcactcggaggccatcttatccgactcgaagaggctggagaggaagaccccatagccaacagccgccaccgcggacaggctcatcaggaagcccatgctgaggtacaaaaggaagccgcgcgtgtagtatatggaggcatatatcaccgacaggaagacgtagcccttgaagaaggccacgggcacgaaggagagcaccagggccacgtagtaggcggacaggctgtaggtgccctcgcccacctcccgcctgatgatgggaagggcggcgggaaatatatacgtcacgccatagctgaacgtgaagatcatctgggagaactagataagtgactgaaggtggagaggagagaaatgcacgcacctcgttgctgagcatgaagatggatccaccgacgtcctgcaccgtccgttgcgtgagtcctccaatgccggagtacatgagggatagtgttacagcggtgatctgcaattagggattacaatactacctaaatttggcacagcgtttgagaacttaccatgaagaagccaaaggcgatgagcccactcctaatattccgcacatcctcggtcatgaagcgcaccatcaggaggtacacctgatatatccaccttattttcttgctgaaacataagagaagttttgaagagtcagtttttattcctcaaattaatcactttaaggagttacaagttctggacgtgcttcaggtaatccccgctgtagctccgcgccagcagccagctcccgctgtagagtccatccgtctcgtgctcgtacttcgcccggagcacagcccccgcgttctctttgccctccttgtccgccagggtcttcaggtagaagtccgcaggattgcagttcagcgggagttcgtagcccaggctaaaatgatcaggatgtagaatggagaaggaatctcgaaaggaaggagcccactcactctgtaaagaacttggctgcctgctcggtgcgtcccttgtaatgatgaactccaattaagaacacaagtccgttttaagttgaaggcagccgtcgggctgacatatatttattcaatttcttcttttgattttagagtaggcagaaatggttctgtcagctcaacgtctaccgagtctctctgattttacagttttttatatatttggacttaggctaatccgcgtagctgcgctgccgggtacgccagcagcggagcggcgttcttatgtatatcttatatatctaggcttatcgggagagcgagatatgtatgtacgtatgtaatatgtatttggtcggcgtgtgaatgctgaccatgcacttatactttttgccttcgagtgggtgatcatgttacatccgcccggcctaactgcgtgcataaacataaacataaacatagcaacaaagtgctgccataagttaatatgctattttatttaattgttcttaatattgcataggcacatactacatctccctcctttttgaaaaataacgtaacctagtgaagttattttgattattaaatgcaaattattttatttttatttttattttgtttgtgtttttgtttgaacaacaatagttgattttataatgcaaagataaaaatatacgtagtgtatggaaaatttgtataaatgattaaggaaaatataagtttaaattcaatcatgaatgaaatttctttaatctatctttatgaactatttgttttttgtttttattagtaagtagcgtaatattgttattatctcctatgctttctatcttatagggccccgtatatttaaagtctaatttatgacctacctcatttcttagtaaaactttatctcctacttctaattctatgtcttttatttttaagtcataattttctttatttttttctttgtgtgcttcaagaagttttcttgctcgagcatatgctacctctaacctatatttactctccttagcgtaatcatctatgttatatattggttctatgctatgtagtttattaaaatgttttggtaaattacttgttctaccgaaaactaattcatatggacaataattatgtaccatagattgggtcgtgttgaagcagtatacgaaatattgaagccatacgtcccaatcggttttgtccgtcgatatgtaggatcgtatatactcgtttaaagttctatgacttctttctactactccaactgtctggtggtgatgagctgttgatgttatattttttattttcaaatatttacacaggtcagtaattattgaattcttatactctgttcccatgtccgttatgaacgtcttcattggaccgtactttagaataaaagattcaaatatagcttctgcgactgtttttgcgcttttatttgctattggtatggcaactaagtacttggttaaatcacatatgagagtgactgcgtactcgttaccattttctgacttgggtagtggaccaattgtgtccacaaacaactctatcgaaagcatgttctggtgtttcagttatcggtcattggagtctttgtgtgctttgttgtttttgctttttggcatttttgacatttccttacggtactcttttatgtatttactcatatttttccagtaataatgtcttttgaccttggccaaggtttttgtaatgcctgtatgccctccttgtattggatcatcatgtaatgtagacaatatagcttctttttctttttcattatttatttgggtcaccgggttaagtagcgctacttttaaattctttaatattttattgcccatatttttaaatttatctattgaaacgtgttcaaagatttttttccacggtgccattttgatttggctgatatcatatataccggcctgcaattcaagcctttggagaaattgatctaaatcaagaattccattagtataaagatcaccaacatcatatcttgcaataattttctttccatgtttaaataaacatatcgagtcattcaattgcaatgtcactacttttcgtacctcgtcatttgttatgacttcgtataccgttgggctctgaagctatttctttggtttgcttttgcaaatccaattgttcttttcctgcgcaggatttttgtctactttgaaatcttgtagtgacttttaatatatttccagttatatcttttagctctttgatggttattcttgataacgcatctgctacatgattgtccttgccctttagatactctactgtaaaattatattcctctagttcaagccttattctagttaatttagagctggggttcaccatcgagaataaatatgtcaatggtctatgggtctgttttcacagtgaaatgttttccgtaaatgtatggtctgaaatgtattattgcccaatgaattgctgctaactcttggtctgttgtactcttattgctttcacctttcgtaaaagctctggatgcataagcaactggggagttggtggccattatggttttgagttaaaactgcgccacacgcttgcttgcttgcatctgttgttatgcaaaattctttgctgaagtctgggtactgcaagagtgttgggttaattagctgagattttaaatgtatgaatgctttttgacattcatctggccactcgaatggaacattctttttacataatcttgttatgtgccgcgaatagtcggcgaaatttttgataaaacgtctgtagtaattgcaaaatgctacaaaacgtctagcgctgtccgcatcatgtggaactgggtagttctgaatgacatcatattttttggcatccggcaaaattcctttgtctgtgcatttgtgtcccaaaaatgtgacttcatgcatgaaaaatgaacatttttcaggatgtaactttaggttgtattccctgcatttaccaaaaacttcagtgaggtttttaagcatatgtttttcggaacaacctatgactattaagtcatccatataaaggaatgcttgagacggttctattccggagaatgctatagtcatcattctttggaatgaattaggcgctatttttaagccaaatggcaatcgcgtgaaacgatatgagccattgctggttgagaaagatgttatatctctcgagccttcatccagttcgatttgatgaaaacctgacattaaatcaaggcaggagaaatattttgctcgacccaagttggtccaaaatatcatctattctcggtagtggaaatttgtcagctaaaagtttcttattaatttggcgatagtctattactaatctccatttctttttatcagaattcgggcttgactttttgggtactaatagcaaagggctattgtactgtgaaactgatggttcaactattttatcttttattaatttctgaacttgggcttgtatttcttccacttgactatgaggacttctataatttttcgtgtatactggctcatcatcttttaatctcaactgttggttataaaaattattaactggtataggttctgattctaatgcaaatatatctatatattcgctgcatatattttctaattgtgatttaaacaattcggggaaatttttctttaattgagataagacagttttatttctgtgttcactatttgcctgaactacattgtagttcgaaagtggctcatattttagagtgtccatattgactaattggtcggaatcggttgtatttaaaattcggacaaatgtattacttgatgttgcgattggatttgcaacataaataccagtttgaatttcctggtttggaattaaaatgttatcatcttttgatgatactattaatcttcggacaacttgggatcttgctggtaataaccgttgtgttaataccagagctgtatgctatgggaatatatattggaaatttcaaattgtttggtctaattataaaccaatcttcttcttgggtttaaatcgatttggcaattatatttttttatgaaatctattccgattattccatcacacggtattggaaagtttttatctactaaatgaaaatcgtgtgggataacgtatttacctgtctgtatctcaataaaagtctgtcctcgagactgaattttctgttggcctatgcccttgaatgtttattttattggttatttgaatattagaaaatttgtcagagttctctttgagaatagagatatctgcacctgtatcaagtagaaaaactagttttacgcctgttttggcatgaatgaatgtagaaaatatgttgagattataattgatggtgtatactctacgatcttcttctactgagtacctaaaggctgttgcgagtttccctgttcttggattactcgtacattggcattgtttctgttgtagttgttctgactgttgttacggcctctgtttccattataacggcctctgttatagccattataacggttattatttccattatagcggttttgataaccgttattctggtaaccgttattttggtaaccgttattttggtaaccgttatggtagttgcctctaatactattgttattaaagcctctaccgcggttactacctctattggcatttccgtatcctctattgggtctgttacctctaaagtacatcactttattgatgtcaccggtaactcttgtactcgttcttatgtatgcgcttatcgctgcatccatagtggtgcaagtccctgcttccagtactgttttgatactttcgtgctcagcacgatgtatcatggtttcaattgcctctttggtgcttagaccagtggcatgttctagaggtataccctcatcgatataggaagcttctaaaagttttctcaggctatcaacttcagcggtaaattgcgttgcagttttacctctctgctgaactgttgctagctttgctttgacattactggatgtctcaccgacaactactttctgcaatttgtttataattgctggaattgtcgtttcattgtcaactgagttcaaaattgtgccaactatttttgacttaatgacctcaactgcaatgtcttcaaatggtcccttagctaggtctaccaatttgattgccttaatgaatctttgtaaatggatcttttgcccatcaaattctggcactgtgcaggcgacttccctaatgtaagacctaatggcagctgcttcttctgccatggttaagttattttcggagtcgggctgcgttatttgttttatcgtcgttcttcagccattaattttgctggtatagttagatcgggaagatcttcctctttaatgtcttccttgactatagtcctatcttcctcgtcagagttagtgctgtcttcattcaaatttattcttaggggggtgtttactatgggtggaatttctatctggagactgaatttattttttataaatattaatttttctcttaatgtcaccagtaggttcaaagccttagcacactgtttgcgttccaaattctttctattttgttggatcaactctctgatttcattataactatttaccaagacttgggcattcctattgattggtacagcttgggttgatctgttttgcgttaagcacttataggattttctgaaattttcattttgatcttttatctgatcaacaagcttttcccagtccatgctgtggtatactcataacttcaaatttattcatttgtatatattttttttttaatgtagataaattcaatattacggttttatatttttttttttatttattattttttttttcatataatttttctcatattttcattcataattgactttattaaagatcttccttaaatattatctataccgttagcagtgctacggtatcgtttcttaagacacttgttatgcagtttgtatatttttattaatgcattggataccataattaatgcaattacaattagtattatggttatccagaacaagtctgcattttggacttctactttatttattacattggctggagagtccacagttttagtgtctattagacccattttgggtatactaattttatattttggagaatagaatagaaaatttcctttggatatacttttattttcaggtttacttatttcatttgtctctatagacatttatgtttggaattatctatttataaaatctttcaatgttcgcaagagtaaaaaaaaattgtattttacattgttgcctgcctgattctagctatggcttcacgggccatattgggttaacagggcataatagtatatgctccgttttacaatatttcttacaatttttcttatctatatatattttatatttactttatatttatatatatttattattatattctgctgttgatgatgctcatcaggtgtcagctgggcgtcgccgggggtggcacgctgacactccctcgctgctgtctatttcttcgccgctgaagacgtcgatggtcgctcacaagtccccaggcagtggggactccagattccttcgcagccaggggggcaggacttctttggttttgttaatgctggtgctggtgctggacatgcctggtattttggaacttcattaattgtgggtatatttttaatattatctgagtgagttttctcgagcttatgggtctttaattcttgctgatattgcaacaagtggtctagctctgcatgtagctttagagctttcgaccaaaccggtggcgtttgctgaccgtatattagccaccttacgtgggctatacgtttattcagcttagttttcaaaccgccacggtgtttgcccatactcaatagaactctactcactcagatttttccttggtttttgcagttccatttaattagtccagtcttcttccagtccagtgttcctttgttcctttgttttcaccagctttggtcaattcgtccagcgttggacgactgtcacggtcgccatgtaatgatgaactccaattaagaacacaagtccgttttaagttgaaggcagccgtcgggctgacatatatttattcaatttcttcttttgattttagagtaggcagaaatggttctgtcagctcaacgtctaccgagtctctctgattttacagttttttatatatttggacttaggctaatccgcgtagctgcgctgccgggtacgccagcagcggagcggcgttcttatgtatatcttatatatctaggcttatcgggagagcgagatatgtatgtacgtatgtaatatgtatttggtcggcgtgtgaatgctgaccatgcacttatactttttgccttcgagtgggtgatcatgttacatccgccctggcctaactgcgtgcataaacataaacataaacatagcaacaaagtgctgccataagttaatatgctattttatttaattgttcttaatattgcataggcacatactacaccctggtagacgatcctgccgccatccatgaggatgatgtgggtgaagagctcgaagatgtccgacgtcggctgatggatggagcagatggccgccttcttgtgggtgccgttggggctgttgcttaggactcccagggctgggagctcccgcatcgtctgcagcagactctcgtgggactcggccacgacctccatctcgatggacttgctgccactgccactggcgctgctctcgccactcggcgtctcaaacgagtcctcgccgtagacctggttcaaggaatgtttggcaatccgtcgcctggtgcacaagtgcctgagtgttttgatcaccgaataggcgctgaagctgtccaggcccgtggtgggttcatcgcagaacaggaatatgggatcggtgatcagctcctcggccaagctgagtcgctttcgctcgccacccgacagctgctggatgcgggtgtgggcggcgtcgcgcaggcccactgccaggaggagatccgccaccctctggcgcttctccgccttggtggtgcgccggtgcatcttgaaatgggactggaatagaggactcaaggtaatcaagctttacttaagggatctagcggaccaaccataaagtacagatgctcgtaggccgtaaacgtcttcacgttgatctcgaactgcggcagaaagctggagatgcgcgtcatctgatgccgctccatggccatgccgttcaaaaccacatccccggtcaggttaccacgcagtcgttgcgaaatcgccgccagcagcgtggtcttgcccgctccggatccgcccagtatggcgatgaggtcgccggtcttcatgtgcccgctggctgcaaacaatagcgaaccgggccagaccgcaaatcaatcccattcccagagacacctaccacctccacatccggagcattgactcaccgtcttggaggatccgcagctcgcgcttcttgcggcactcgttccagaaactgtagttgctctgctcctgggcgggcacatagtagttcagctgcttccactcgaggcacagcgatggaccgccctggcccgacgagccgccggattcttgcatttcgagctatgtcagttcgatgggttcagtcacctcaccggcgaactcttataattctggctatgtgatgtgccgacttatcgcctccggagcaggcttatcttatctgaggttccgccgcctacaatgtatttgcatatctgctcgggatctttcgggggaaaccttaaatctgtccgtctgtctgtctgtctgggcaaacgcaatcgcggtcacacgccgtcgactgttcgcgtggaagactgagcggcaactgggcaacgccgatggcggcgacatggttttctacccccaacgggcatccagcaacccacctccggccccatccatcccatcccacaagtaacattaaacttttgaccgcatttggtttgccagctaattgtcgctcatcaattcacgtagtcgaacggaggcagttcagcggtggcggccaaagagaggcgctcgttgaagtcatgcagtcgggcatgggcatgggcattggcatggtggtgatggttggcctccctcatgtggtcgtctcttcgccagcagcgccgcagtcgacccaacatcaggcgtaacagggtgaacacgtccagcagcaagttgttgacgagtacatggaccatctccaccaggcccatcacactgacgcccacgaagagggccaggactcctccaaaggatactgaggagcacaattgtctataggacataaatatatagaaagtctgaagcggactcacccactaagtcctcgaagctgtagaccacatcccgtcgcatgcgcaccttaggtgggatcagatcccagcggaagctggaggtggcggtctcgctgctggccacctcctcgttgttcttcacgccccacgagctcttcttcaccgtctgcatggtgtactcgatctcggtgcaggtggacgggcacttgcagatgtgcagcgcccagatgggccatttgaagtccagcaggcactcgaatccggctggattgcagctgggcccatccacgtacgggtagaagaagggcacacagttgcacatctcgagggccatcacagcgcgacatctggccaggcacagggacttactgtagatctgtggaataaatggaataaatggatacctgaaagtttctaataggtgtgatgaagtggagcatcccagcacgtgcttagataacatcacattcctccagcgaatccagggaagctgctgtgaaatatgggttccttgcactgataccacttatcagctgctgttccat

SEQ ID NO: 7469 - DNA, 2732 bp, DROSOPHILA
agttgccgctcagtcttccacgcgaacagtcgacggcgtgtgaccgcgattgcgtttgcccagacagacagacagacggacagatttaaggtttcccccgaaagatcccgagcagatatgcaaatacattgtaggcggcggaacctcagataagataagcctgctccggaggcgataagtcggcacatcacatagccagaattataagagttcgccggtgaggtgactgaacccatcgaactgacatagctcgaaatgcaagaatccggcggctcgtcgggccagggcggtccatcgctgtgcctcgagtggaagcagctgaactactatgtgcccgcccaggagcagagcaactacagtttctggaacgagtgccgcaagaagcgcgagctgcggatcctccaagacgccagcgggcacatgaagaccggcgacctcatcgccatactgggcggatccggagcgggcaagaccacgctgctggcggcgatttcgcaacgactgcgtggtaacctgaccggggatgtggttttgaacggcatggccatggagcggcatcagatgacgcgcatctccagctttctgccgcagttcgagatcaacgtgaagacgtttacggcctacgagcatctgtactttatgtcccatttcaagatgcaccggcgcaccaccaaggcggagaagcgccagagggtggcggatctcctcctggcagtgggcctgcgcgacgccgcccacacccgcatccagcagctgtcgggtggcgagcgaaagcgactcagcttggccgaggagctgatcaccgatcccatattcctgttctgcgatgaacccaccacgggcctggacagcttcagcgcctattcggtgatcaaaacactcaggcacttgtgcaccaggcgacggattgccaaacattccttgaaccaggtctacggcgaggactcgtttgagacgccgagtggcgagagcagcgccagtggcagtggcagcaagtccatcgagatggaggtcgtggccgagtcccacgagagtctgctgcagacgatgcgggagctcccagccctgggagtcctaagcaacagccccaacggcacccacaagaaggcggccatctgctccatccatcagccgacgtcggacatcttcgagctcttcacccacatcatcctcatggatggcggcaggatcgtctaccaggggacgcaccgagcaggcagccaagttctttacagacctgggctacgaactcccgctgaactgcaatcctgcggacttctacctgaagaccctggcggacaaggagggcaaagagaacgcgggggctgtgctccgggcgaagtacgagcacgagacggatggactctacagcgggagctggctgctggcgcggagctacagcggggattacctgaagcacgtccagaacttcaagaaaataaggtggatatatcaggtgtacctcctgatggtgcgcttcatgaccgaggatgtgcggaatattaggagtgggctcatcgcctttggcttcttcatgatcaccgctgtaacactatccctcatgtactccggcattggaggactcacgcaacggacggtgcaggacgtcggtggatccatcttcatgctcagcaacgagatgatcttcacgttcagctatggcgtgacgtatatatttcccgccgcccttcccatcatcaggcgggaggtgggcgagggcacctacagcctgtccgcctactacgtggccctggtgctctccttcgtgcccgtggccttcttcaagggctacgtcttcctgtcggtgatatatgcctccatatactacacgcgcggcttccttttgtacctcagcatgggcttcctgatgagcctgtccgcggtggcggctgttggctatggggtcttcctctccagcctcttcgagtcggataagatggcctccgagtgcgcggcgcccttcgatctgatcttccttatctttggcggcacctacatgaatgtggacacagtgcctggactaaagtacctctcgttgttcttctactccaacgaggcgctgatgtacaagttctggatcgacatcgataatatcgactgccccgtcaacgaggatcatccgtgcatcaagaccggagtggaggtgctgcagcagggatcctatcgcaccgccgactacacctattggctggactgcttcagtctggtggtggtggccgtcatctttcacatcgtgtcctttgggctggttaggcgatacattcaccgcagtggttactattgattggggcgcttttattatactaatttcagtttacactgttacagaacttgcttcagcttaatttcagttgcattgagtactcgtgcggtagttaagtaaaatttgtaatttttaagcacaaaatgttcttaatacatctaaacttcagtggaaaatattgcattcatcaaatttgagtcgcataaaataaatcccatatagatcatgtatgtatgccgttactaaaagaaatttaacttgcatttgaactacatttgagctcaaggaaaagtcgggagtcttgcgagtcgaagaagaggcgatctataagatctatatcagattattttacttatacctattattatacgattgtctgtcattatatataaatggtttgaaagggtttaaagagacctgacagttgaattaataaattaagctaaaacaaacaaaaaataatggaaac

SEQ ID NO: 7470 - protein, 416 aa, DROSOPHILA
MQESGGSSGQGGPSLCLEWKQLNYYVPAQEQSNYSFWNECRKKRELRILQDASGHMKTGDLIAILGGSGAGKTTLLAAISQRLRGNLTGDVVLNGMAMERHQMTRISSFLPQFEINVKTFTAYEHLYFMSHFKMHRRTTKAEKRQRVADLLLAVGLRDAAHTRIQQLSGGERKRLSLAEELITDPIFLFCDEPTTGLDSFSAYSVIKTLRHLCTRRRIAKHSLNQVYGEDSFETPSGESSASGSGSKSIEMEVVAESHESLLQTMRELPALGVLSNSPNGTHKKAAICSIHQPTSDIFELFTHIILMDGGRIVYQGTHRAGSQVLYRPGLRTPAELQSCGLLPEDPGGQGGQRERGGCAPGEVRARDGWTLQRELAAGAELQRGLPEARPELQENKVDISGVPPDGALHDRGCAEY

SEQ ID NO: 7471 - DNA, 9327 bp, DROSOPHILA
ctacacatctccaactccctcaatatcagcgtcgtcatatcgatatccatccaatccaatcccatctcatcctaatccaatccgatcgattctctctctctctctatctctctctttctgcctcttccctcgtcaattacaatctacagcttctgcattttacgtccatcgtcctccggctacaaaaggttgaactccagctcctcccgctcctcctgctccagttgcttacttctggaccattttgaccagcagatcggtggagaatgacttggggcgctcgatgggcaggccgagggcgcgatcccagacgagggaggccagcacgccgagggcacgggaaacgccgaacaacacggtgtagtagttcatctccttcatgccgtagtactgcagcagcacaccggaatgggcatctacattgggccaggggttcttcaccttgccggtctcggtcagaattggtggcaccaccttgtagatcttcgacaccagctggaacgtctcgtcctcgggcaggtgcttcagcgcgaactcacgctggcaggtgtagcggggatcggtcttgcggagcacggcgtgtccgtagccgggaaccacctggaaaatgtgcaagtagttttggtaaatacaaatctctgttgtttttttttacataatcaggattaaattatataatatgaaaatcatattcatggagaaatgaacctacctgtccggacttgagggtcttccagatgtactccttgagctgctcctccgacgggttgttgccggcctccttctgcagcttgcgcagccacacgagcacctcctggttggccaggccgtgcaggggaccagccagaccgttcaggccggcggcaaaggagaggtagggatcgctgagggcggagcccaccaagtgaacggtgtgggcagacacgttgccaccctcgtggtcactgtggatggtcagatagagacgcatcagctcggtgaagggggcgttgtcgtagccgagcatcttcacaaagttcgccgaccaatccaggctggagtcaatcgaacgggagcccttgccgccgcgataggtgttgcagtagatggtggccgccaccactgggagcttggcgatcaggtccatgctgtcctcgtagacgtactcccagtacttgctcttgtgcacaccatccgagtatgccttggcgaatttgctgtcgtgattcagcgcagtgacggcggcagcaaactgcgacatcgggtgcagggtggtgggcatgttgttcaacatggtgaccacgtgctggggcagggcggcgcgctcggcccattcgcgggacagctgctgcacctgggacttggtgggcacctcgccggtcaacagcagccagaagagaccctcgggcaggggctcagtgccgccatcggcggctggcagaaccttttggcactcgggaatggagaggccgcggaagcggataccctcgtcagcatccagcaccgaggtctcggtgaccagggccttgatgccgcgcatgccgccgtacatcatgtcgatggtcgtctcgcccatcttggtggcgccatgctgcttgcggaagttctttacgcgctcctgctcctggggcaccttggcggccagcacgtcgcgcaggctcttgccatcggcggcgatcatgcgaacataggctcccacatttggcagtttctggaagagagcatatgtagttttagtaattatgttaagcaattaaacaagaagtgctagaaataaacaaaggcaacataagacacccaaaaaaataaacaattgattatgattcaaacaaaagaaaagcatagacttccagtactgataataagttcgggttccaccattaatcgaagataattgcaagttatcgtttattgtctatcaatttatcgacgacaatcgtcagagctttccaggaattgaatgaaatcgaaatattaaccggcttacatagagattatgtagaaatgcaatttaagccccccgtcgggaacataaaaagtcgagccaattctcgaaagcctgacaagctaacaagcacttccgatcaatgttatcgattgcaaatcgaccgtttcgtcattgtcattgaactacgctttcaagtacaaggcgaaaggcacattcatgtgcacttacattccatatattgagtaattccccgtcagtctgtgtgctcgtctgagctcagctgataaagctgcattgcccagccattggctcggttatgtcagcatttgaacattttgcatttttagtgactcagacacgtcagattcgctgggttggacgaactgcgagtgtggcacaaacaaatgtttgccggcatttaattgaattcaacttaaccgccggttcaatgaaccgcccacaacacacctgattcaattccaggtttacatattttttttgtttgcatttatttaaattacatatgcaaaagaatcgctttgagatcatatatatatgtacacatataggaaggaagtgatcttcaattgttaatttgaccctactttctttcaataattgaaataaaagtttaagatcataaggaaatttaaaagaaaaaaaaaaatttaagtaacaacttaactaaaatatttaactgaagggaataacatctcaactcgtagaaaaatgtgtatttttttttttaataaatggaacattcctaatgtggaaaagctcttaaactggaacaccccagtgatctttagccacgcgttggcatttgtcaaataaaacgaagcgaaatggaatggaaaatgcgattccgagccgcgagtccgatttcaattccgattccgctcgtcgggcgcaaagtgcggatttgtatttgattgacgggcgttgtggagcacacaccccccccccctctccgctccaccgcaccactatgtacatatatccccaccactctggcatgattttctttatttttcttgctgcgcggccagtgggtcaacaaattcaattaaccaagtgaacttgtggcgccgccgcctgcaaaattgaattgcatgattcgcggaccaatttaacgggtgagccgccaagcgatgaccggtttttcattcacgttcattgataaaaagccttttggctaaaaaacgacgtgcatattaattaccgataatagccgagcagcatatcaaaatacaaaacaggctttccgttgttggtaaccgcaaatcctttggtttttcttaccacaaaacgatacactgagcgaaaaggtactcagaactcaaataacaagaaatacaattcccatttcacatcattcttgtttttcttctgtatagtgggaaatcggaaccccaagatatcaaacatcgttttgtagccaatgcggcaaaccgcaagtgaaatgctcatgtttctaatgctaattgagctgtcaaacgcgaaaatggtttgcataacaaaaaaataaataaataataatataacaaaaaaacaatgaccacgcaccactgtactacagctgctatctaatcgctatgctccgcaattatttcacttttccggagtgatgagcgggagggggcactagaggtggtgggagggggggggggcagtttttttttttggcagagtggacacttgaagcgagcctcaggctccaggcgagaatatgtacgtacatacgactggcgggcccattatctgggccagaggcgtgcgttcatctgctgataagcccaagcccccgacaatgggcgagcatgtgtacaagtagtagtagtataagtagtagtatatgtatgtagtagttagttgtatatgtagtattagatgttccgaatagatttcaaggtctcacgcgccggcaattatcgcatgtctaactgtgggcagcgtttgccatgtcatcaaggaagcgttctggctatggttctggactcgcgtgttgtgacggcgccggcagacttgcttcacttctttcacctcgatcgaatgatccgatccatcgggttacgcaatgtatatacatatacatatatatatatatataagtgcgaaaacgaaacagaaaccttgagaaagccgggaaagcctcgagcgccgagcgtcgagcagcgagcagagttgtcatcgaggtgagccgccgttgaccccgcggcgatggaatcaagtgttctcacacaacagactacagtgaagctgcatcggaagtaaaactttaaatgctccataccataatatgcaattaaacccatgcgagttatgcaactgacagaatgcacgatgaaacgaagtctgtacttcaatcgcttggcatttgaatggtgatcatggaaacggttgcatcccactatggatgatgaatggtggtgggtatcggtcggggtatggggcaatgggcaatgggaaccttgggccgccttgcatcgcgtggcgttttcaattcgactttaatgatatctgctattagagagcgaccgcttgtcggttgtctaataattgcagtcaccgagttaatcgtcttaattaagtttagagcgctgcgtttgccattctccactatagttagtagtagttgtagtggtagtagtgccattttattgtctctgccgccgaaagtaaacggacatcatcacacaatcgcatcgcattgaaagtaccgcgtgacgtaatcccgtcactcaactaaattcaactcaagtcaactggagaatcgttgtttcgtttcggattggatcggatcggatcagttgaacaaacttcagatgcctgtctgttgttgccgggtcgcaattttcttccctcagtcatttaaatgctgtaaaatacaaagtctgactaagcaaagatcataatggggacttttgcgagaaattgcggaattaagcagattccaatttacatattacagattccggttgccaggttcttaagatctttgcgtttctgctgtaaacgtaacgatgttcggcaaatggaaaaaagtttggtaattagttactatttaaaatacaaaattttgctttatgtgcagccctgttcgaacttttatgaccatcaatcatacggatacatttgtatcttgtatctacaaagcgaacaatttgcgcattgcgaaatcgcccaaatcgtacatagtagtatgtatacaaatatttggccgtctttttatcataatcaaaataaaaactgattgagttaacaccttattcgcattcgcattcgcattcccagttggtttgcgtgggggctttgcgtgtccgctttatcagcgatatggcgacgtctaccgatcatgtgcttcagcggcaaatttgtcacgcttatcagttcgctccgaaaacgacgggggtgttagttataaagggggcttatacaatgtaccatatagtatatatgctataaggagatatggacaacagactgggcggggcgcattgtggaaaggctaaaagctatctgaaatgctgcacgcattactgatttagacaattttacttgcaaatcatacaggaagatataaatgtatatatatatatatacagtattacagatttctatttgcaatgcatttagtattgttcggcaatgcattctcccaacaaggtgacatttttactgagttgcataagcctgcgattaaacatattgttgtaatatacacaaatgtacatatgtacgtcgattgtttgtgaattagtattataagaggaggttagtcagcataaagttcatgtcatggtacatatgtaaatttggatcataaagcctttatggatgggagaaacccttagctgataacagcaaaaaaaaaaaacataacgctgttgatacgaagtgttgatatacgatgggattcattaattatttattattctgatggcaaggagggggggttttttttcgccggattttagccatgaacatctgaagtttggtcaaatagtgatgatttggttccattatctctcgtatctcgggaccctcgaactttccatgacgtttaagaaggcggcgtgttatcacgcgcataactagaattctggattggcattaatccaggtggaaaaaatggtccacttgagctttgcccgctggtcataaaatccctatttagattcgctaatcaaaaatgcgcaccggtcgtaaaagctaatgtacaaattgtgtataaattatgcatttgctcttatgcaatcgcttgatcatctgtttactttttccgctctctaacggcactcttcttactttccactctctctttcgcttactctctaattctctgtctctcccctcttggtttgttttggaaaaacaaaaggaaaaaggcttgtgggcgttacgtaagagttgtcacgatttgtgacgtattagcggagaggcgttaaaaaatttcgcgtgttgccatttcgtcaaactacgtcaaacgcaaataaaacagcgcttttttgctttggcctaaacacttggcagaaatatgtgggttattggccaatttgctgcatataaaatatgtagatatattgcatgtaattgttggaagtggaaaacaaacaaattaaaccttttctactgtaacatttacaagaattatttatagacaaaataagcaaaaacctaaaagcagagaaaagaaaaacaaaattaaataaaacgcgtcagcaccaacatttttttggcactcggccagcggcggcagaacaggaagaagaagatttggggagtgtgcataacatttggggaatctacacggcgagaaataattgcagcatacattaataattaatttaataattatcgcagactgcacaaataacaaaattgggtcaaaattacacttgtaattactgtttcccttgattttaattttaaatgaagttatatgtatttgattgttcatatatgcattatacattattataattctgttattattaaaggacactttcaaacgtttgtttgttattaaagttgccgcattgaccttaatttccttttttgcctgtgtacttattaccccacgcaggtcaaagagaaagcaaatcacccccgaaaaaaatcaaaaggaggctcgtcctgcaagcccttttttgtgtgtatgtgtgcacgccgtgggtgtacatttgtacgtacgtgtgtgtgtgtgtgctattgatttttctcattacaaaatcgcaagtactattctttttgtcatttttctcgttcttggcattatgcaatccgctcacatgcaaatgtgcattgccggtgggtggtaagtgggcgtgctgctgctcctccttttgctttaaggtcattcggcggacacttctcttttgcaaaagagagatggtgtgtcttccttctatcgcttttggcaacaacaaaagcacagcataagcatagtgacacgcatgagaaacgaaacgggaacgaatgaaaggggaaaatggtattctctgtttttttctctgctctctcttgctcgaccaactctctctgccttacgctctttttcttcacttcgctctgcgccgtggcatttgtttttgttgttgtaaatttacaagaataagacccaaaaaaaatcaagccggacttgtggaaatttaccaaaaaaaaatttaaagcgggcggcccaaaaagagacaaagttcgttaaacccacaaagaatatagagatttttatttataggcattccgatgttgccaaaaaaaaaaagaaatgggcgaatttcatttggcgattatgtaatgtattagaagacacacatacacacaggcacacacatacgtacgtacatgcatacacgttagcacttatcattcgccaacaacaatgaagagaataaagttcttaatcgcaagcacatgtctggaaattctttttttttcaattccagcgtgacgtgtgttgaagaagaagaagaggatgggaaaagaggagtaggatcagatgagggatgggttgaggaagagcgaaagggaggggagaggacgaaggttttaacaacagaagcgacacactttacggttagctaactggaaggaggtggatagagatcccaggaaagcatgggaattcgatacactggtcgaaaagcaaaggggtaattcgaaaagttaaaatgaagaactcacctgtgcctcggacaatttccgtgcggaaatgcgatagagcgacatggcaatgcgattacgtacggctgcgagtagaagaaaaacactttcgccttggctagaaaaaaacacacacacagaaaaaaatttgctttcctttttctggaagtgaagtgttcttttcgtgggtctctcgtctagcagctgcgcggcaactgaatggcgccaatcgcattttctgcgggaaggggcggcacgagcgcaaagaacacccgctaattcccacgcaacggcgttttccgctctcccccagaaaggtcacacttaaggtgggctgcctgctctggtacttgaaaaaaaacgcccacgcaacttatttaattgaaatagatgttatatgctttggatgcatttttgctctactaagatccatataaattgacatttgctcgagtgcagactagttttcaattccaattttaaaaaagtctattagctatcccagtcgacaccccccatttccatgcattttaaaccgctccctgacattgtctgtttgctatagagtataaatactgtcgtgtgagggaaatatctttttattgcgggaaaatcaaacaccgacttttgtaaaaaataatcatatttcaactgaagttttataataaagctttgccgaaaaaggccacagatcaataaaaagttcgatattcacgaagacgtttatcatcataactttgttaaaacttgtcgtacagtttacaatttagtagttttaattacttagttttagtagtttttttacttttagtagcgaattcgcagtgctaggattcctaccactttttgaaggatttagggaaattaatttttgggtcaattttttttttgtaaggggtaacatcatcaaaatttgcaaaaattggccaaaaaatagaattcctattttttgatacagttcgacagggaatttaaatacgagctcgacgaggtattgcattccgtattcagacaattatttttaaagttatggcaaaaaaaaactgattcttttatgacggaaaatcgaaaaaaattatttttgcaaaaattacaaaattatagatgggcattttaatcataacttgactaaaagtgatcacaaagcgaaaagaataactgttttgagcagctaattgcgaaggctaaccatcccaatcactttttgaccgatttggaaaaactaattttttggtaat

SEQ ID NO: 7472 - DNA, 1632 bp, DROSOPHILA
aaaatgcgattggcgccattcagttgccgcgcagctgctagacgagagacccacgaaaagaacacttcacttccagaaaaaggaaagcaaatttttttctgtgtgtgtgtttttttctagccaaggcgaaagtgtttttcttctactcgcagccgtacgtaatcgcattgccatgtcgctctatcgcatttccgcacggaaattgtccgaggcacagaaactgccaaatgtgggagcctatgttcgcatgatcgccgccgatggcaagagcctgcgcgacgtgctggccgccaaggtgccccaggagcaggagcgcgtaaagaacttccgcaagcagcatggcgccaccaagatgggcgagacgaccatcgacatgatgtacggcggcatgcgcggcatcaaggccctggtcaccgagacctcggtgctggatgctgacgagggtatccgcttccgcggcctctccattcccgagtgccaaaaggttctgccagccgccgatggcggcactgagcccctgcccgagggtctcttctggctgctgttgaccggcgaggtgcccaccaagtcccaggtgcagcagctgtcccgcgaatgggccgagcgcgccgccctgccccagcacgtggtcaccatgttgaacaacatgcccaccaccctgcacccgatgtcgcagtttgctgccgccgtcactgcgctgaatcacgacagcaaattcgccaaggcatactcggatggtgtgcacaagagcaagtactgggagtacgtctacgaggacagcatggacctgatcgccaagctcccagtggtggcggccaccatctactgcaacacctatcgcggcggcaagggctcccgttcgattgactccagcctggattggtcggcgaactttgtgaagatgctcggctacgacaacgcccccttcaccgagctgatgcgtctctatctgaccatccacagtgaccacgagggtggcaacgtgtctgcccacaccgttcacttggtgggctccgccctcagcgatccctacctctcctttgccgccggcctgaacggtctggctggtcccctgcacggcctggccaaccaggaggtgctcgtgtggctgcgcaagctgcagaaggaggccggcaacaacccgtcggaggagcagctcaaggagtacatctggaagaccctcaagtccggacaggtggttcccggctacggacacgccgtgctccgcaagaccgatccccgctacacctgccagcgtgagttcgcgctgaagcacctgcccgaggacgagacgttccagctggtgtcgaagatctacaaggtggtgccaccaattctgaccgagaccggcaaggtgaagaacccctggcccaatgtagatgcccattccggtgtgctgctgcagtactacggcatgaaggagatgaactactacaccgtgttgttcggcgtttcccgtgccctcggcgtgctggcctccctcgtctgggatcgcgccctcggcctgcccatcgagcgccccaagtcattctccaccgatctgctggtcaaaatggtccagaagtaagcaactggagcaggaggagcgggaggagctggagttcaaccttttgtagccggaggacgatggac

SEQ ID NO: 7473 - protein, 464 aa, DROSOPHILA
MSLYRISARKLSEAQKLPNVGAYVRMIAADGKSLRDVLAAKVPQEQERVKNFRKQHGATKMGETTIDMMYGGMRGIKALVTETSVLDADEGIRFRGLSIPECQKVLPAADGGTEPLPEGLFWLLLTGEVPTKSQVQQLSREWAERAALPQHVVTMLNNMPTTLHPMSQFAAAVTALNHDSKFAKAYSDGVHKSKYWEYVYEDSMDLIAKLPVVAATIYCNTYRGGKGSRSIDSSLDWSANFVKMLGYDNAPFTELMRLYLTIHSDHEGGNVSAHTVHLVGSALSDPYLSFAAGLNGLAGPLHGLANQEVLVWLRKLQKEAGNNPSEEQLKEYIWKTLKSGQVVPGYGHAVLRKTDPRYTCQREFALKHLPEDETFQLVSKIYKVVPPILTETGKVKNPWPNVDAHSGVLLQYYGMKEMNYYTVLFGVSRALGVLASLVWDRALGLPIERPKSFSTDLLVKMVQK

SEQ ID NO: 7474 - DNA, 14141 bp, DROSOPHILA
acaatcgagaacaaaatggtaaacgagcccacgacgaaacgcgattgacgcaataaacaaagttttcgtagctctagatcgtaagataaacaaattaatgaaacgcaacaaaacgatcgcgaaatcgagacaaaaggcaacaccaaataaattgtaaacaaaaccaaagtcgttgtaatgttgaagcaaatctatatgtaaatcaatctgcaagcgctaactaaacgtaacaaacataaaaattaaacacagccacaaaatattattatgaaattaaattgaaaccttaagatgcatagctgttcgaaacattataccgataacaatattgaagatatattctacatttttatgtgtctgcatatttgaaagaaaaatatatataattgaataaaccatatttcaaataacctttcggaaaattaccatgtgtttttagaatgagtgactactacccacatatttgtttcaatatccacatatttggcaagaaggtacgaaatgaacaattccaataaaactcgatcacgacattatattcacttccattaatcactttacagttttatttacttcagcagtaggaaaaaaaggtttcgtaaaactaaaaaaaaaattaaactccgaccactgatttgatctataaaagttggacagcgttttcggaaccttgcaataaaggcaaaaattcttcagacgttactcattacgacctaagtttatcaataaattaaaggtttagttggattcaattcagtttcacttaggaattacttcaggcttaagttttaattctaactacgtaaatataatcccagattacctctagttcaaatgattttttcatgttctttgcatagggtgttgtgaaatgattaacaacgttcaaataaatacgttagtgattatgagtaattgtgaacttctatacaaagtgatgaattgatgactgggatggcagtctatgctctatcatacatgtggcgtcctgtcatttgagctacgatattacccctcttgctatgtttagattacgtacaaaaggattgaaagtccgcttcaagtgaatcaaattcagcttgggtggcagacccggttggacccggtccacaggtaggcaaaggtccatgcaaaggtcgtgggagatcagcatggtcaaatagaagctcaggatactgcccgctcctatcctcagactctggtagactgctgaagactgttgatccaacggcggtggcgccagcggtcctataacctccccgtccttttcgtcgcacagagtcatggactctactattgccacaatcttggggtctgatcggggtgcttaaactagctgcagcttcggcgccgaaggagggtcatattccttgctttcgtcatgtgcgggaaaaacaactacatcacctaattatggatttctcgcatagattctggatgggatgggcctcgcaacagagtcagtgattccaggcaccggttgctctctggggagttccctttgtagattaggtgcatgtagctgatgattagggtgtacgtgctgtgagaagtggtgagtcggaacgtgattcactttgttctgtctgatcacattcgctcacgaagtaaatgtcgttacatttaggtgaaacgcgggaaactaaagaaagcggtcttttgaaaccttgactttgttgcgtgtttttaatcctttacatcgcctggcgggacctccttaatggactccaccttggccacaattttgagagctggacccagcttcatgcccatggcgttaaccaaatggttttctttgagcagcagcagcgcttggccgtcgatctcctgctgtataaagtcgtccacgtagtcctggcaaccaggcagttctcggatgaaattgctaacttcttccacactccaactgctgatgggagggcgatcggatccatttatattcgaggatggtattgctaggaccggcgcaaccactccagctgaaaccactggcagtgacacagtgggagctattgcaattggcaagggcaatgtcaggggcaacgaaagtggtgaagatgtcgacatagccgccagcactggcatcgaaatcggtgggacctccggcgtagccgcttgaattggcaaagcgtccgatactgtctggtatgattctgtctgcatcttctcctcagccatggcttcatccagtctgtccaccaatgccattgcgtccaccccaactataccacctgtccccaggccgttcgtctctcctgatccaactccaccgatgccgttctttgcctgcctcgagcatcctggcgaacagtagcgcttccgtttcagctttgctttgtgctccatctttccacactgctcgcaagcaaccatatccgagcctggagctgatgctattccacttagcttgatgtcctcctgcatggttgcctttttctctgcgcgaaggaatgacacgttaagattgcgaaaaagcattggtaccagaagtttatactcacttggcggctcatcgctgacgtctttgtctgcatatcgctgtctggtgacgggaaatggctcgttggcctcctggatgatgaagccatcgatgacgtgagttaagacgttcggcttaatcatcgccttggggagatccttcgatccattacttgatactcgacgtggtggttgtggttgtgctggtgcaacttgtggtaaaggtgccagaactggtagtggttgtgctagcggttgagacagccgtgctggctgtcgttctggctactccaatcccattggtgatcgttgtcgtggttgatgttgatgttgcggacgttaaactgccgcaggttgtcagcttcggctcttctttcccactgacactgttgggaatggtgctactcggtggctgcactgctgcattgctttgcttgctggtgggagtggtagcgccctttgacggcgtggaagacctatctgaggcatctccattggacagggcttcgcctgtggaactactggcctctacggatgcgctaacagtggcaggagtagatgatttgggggtagtgcaggtgtcctttcctgatacaggagtcttgggcgaatcaatgggcaccagggttgcggtgggcccttttgaaggtgtctctttggtgggcgtggctggaaagcctgctcctccaccgctactagcactgcttagtgtgaccagctgtccagacgatggagtgacagcggtgctagaaacactaacgggtggggcagtggataggtgacccacggtggcattcatcatcgaggtcatggccagaatgggatttgttgtaggtgagggcgtggtgggtgtaagtgaaggtagtcccagttgctgctgctgctgctgctgttgagaccctccggcaatagtggcgctgattagctgctgatgttgatggatctgagtaccttgcgtctgagcctgctgcatactggccaccgtactgctggtgaccagaggagtgctgctctggctggtaattgtgaccacactgcttgtggggagcgtagaggaactgcaagtaatcggtttggttgtctgaaagatggcgccagacaccgagagagcttcttgtagggcactggatgttattccggcaatatcttccgccgtcatcgatggtgaaaccgaaaacggcacgctgctaagctgcaactgtccagactgctgttgcggttgctgctgctgctgttgagaagtcgctccagttgactgttgcaccacaatctgctggataatattctgctgctgctctcgctgctgttgttgctgttgcgcttgagcctgcacttgggcttgaacttgtgcctgcgcctgttgctgtagctgctgctgtatcagttggttgtgaagttgctgctgctgctgttgctggtgggacgtgatgaattgatttggcgccacctgaaggatttgctgagtggcattcgcgagagcctgttgatgctgcgcctgggcttgggcaacttgctgctgttgctccctctgctgttgctgagcctgcgcgactgcctgttgttgttgcgccaccgcttgctgttgctgggcgttaacctgctgctgctgagagacctgttgctgctgttgttgctgggcctgaacagccgcttgctgctgctgcatttgaatggcagcaatttgctgttgcaacatttgttgttgaaggatgtgctgtttctgaaacagttgtagctgctgttgctgcttgtcgactcctgccgcagtggctgcatgaagggtctgtccattctgcagggtgatcggagtgcccgttgtgctcatcacaaccattctggaaagatgcaaaaataagtactgtgacaaggcagataataaacaaacaatactcacttgttgcccgccgcattaaccacctgctggagattcgtcgcctgttgctgctgctgcacggtggtcaggtggcctactaccttattttgtcctgcgacttgaccgatttcggttttcaatgtggctaaagcggggcgcaccggctgctgcttgttgcgcattttggccttcagcaggctctggttctgggcagtctgtgtggatacggaactggccggacgcacttgagttccattgtggggcatgacaggggctcctggtcgctgcagagcggctgcagtgagttgctgctgctgttgctgcaactgggcagtagccaccgctagttgctgctgctgcgtctggttggtagtgccaacctgctgctgctgctgttgctgcttgggagcaagtgcatccagttgagtgcgtgccttagtgggcgtctgcgtcacgttgcattgaataatctctgtaggaagatagttgactttagtacctatccgatgcaatatacatgacaatattcttacggttttgctgggtctgcaaagtctgcgtcgccggttgctgttgaatgaacatgccttgggttccgtctggctggtttcgcaggatgatctgattggagccgaagggttgcaggcccgccgcattctgccagaaccaagggatctgcatttgttgcgcttggccagcgttcaaaagttgggcagtctgaacagactgtccacccacaccgactggcaaagtcgactgtgaaacctgcacgcactgctgagtggtttgggtggtctgctgctgctgttgctgaacctgctgcacctgctgggtctgtgttgacccagtagatccaggacccgtcgccgcctgcaccgtgctgctggtggtggtcaccttctgaaccactttctgggccagcttgccctgcgcatccactcccaccttggccagagcggcagtcagctgttgctgttgctgctgctggttgagctgctgttgctgctggttaagctgttgctgctgctgttgggtaagttgctgttgttgagctgcggcggccattgattgcagaaggttttgctgctgctgtggcgagtgggagatgacattcaccggcgagatgagcaccgtctgaggcgactgattgtggttcgaaggaatgcaggtcgcgtaatttccgccagcgaatcccgcttggccaccgatcatttgcttggcgttttgagtcgtggtggtaagcatctgggggccgttgccttggaatggcttgccggcggtgatcacctggattggctgctgaccgaggcctcctggatgcaacagatttcccgacacaatcatttggggatacaggaaactggtggagggttgcattagctgcaccgtccttccctgtgtccaatccccgccaactcctccagtggccgctgccaattgcatcggcgacatggtgctgatggctgtggagtgctgctgttgctggctttgctgcgagttggccggactagctgctcctccggctccggccgaggctgctcctccaccgttggcttccgacagctgctgctgcagctgcaactgctgctgaacttccataatgttggttgcatgctttagttcagttccactgccactggtcgtgtgcgtgggaaactcttgcttcacctgaatggcgtagggattgtttgcatataactgctgcagctgctcgggggagatctgcagcggcacattggtggcggccgccacctgttgagctggactctgtgacttctccagtttgcggccggttgtctttgagtcgggtgcgcttggcgatctgctgctgagcggtagtagtgggtggcgccgtctgattgatggcgttccgactgacccacgtgctgccttagagctgggcgattgggatggactcttggcaaagtcctcgtcgaagctgatgcctgccttctgggcgagtgtttccaggcaccttagtggccgctgggggtccacgcgagtggtggagttgacctttacagatgtggtggcttccggggaaggtggtggtgtacgtattgttgttgctgattcactttcggtgtccccactgctggaaagagaaagaggaaacgcacacagactatcagtaaattgctttaaacacaaacaaacacggacacacttggcgcggctccgaatccgtggggcatgcttcatattcatgtttaaatttatatttatattcttattcatattctcttagcgcttgacgaacaaaccgcacaacaacaaactgcgactgcatgttactcccgccaaagactctctctcttgctctccaacgcgaaaagggggacgaggaacagaaaaagaaagaagggggtgcgacagggacgcactaccattgagaaagacaaagacgggatcgatctgggtccaaaaacgccaaagaaaacgaaaacgaaaacaaagtcgggacgaaaatgtgagaagggaacgagagatacactttgttttggatgatcgttcactcacgaggtaatttacttacagtggatactgtttaggtgagacgtggtaagcttaaacaccaacatattatatgggaaattacaaatgattgcagctacaactttgtacaacactagccccaccgtgtattcagtactttttacggaacaggtaaataaatattttaatttgttcatgattcgtgacccactaaaagtgcactgtttttcatatgtgcatgcacaccaacacctaaagcaggtcacttgtcagcgttgcctgtgcccgaaacatctatttatagtaggattgctctctgctgcatattccccttctccatcacctcctcccatctactacgcagagaggaagttcgagtgggtgtaagggagaccacttttatttacggatggcccttgggcgatggttataagccatcatggtgatatccaaggggacaggttcaaagacctaagctgggcgctcaaaatgctgtcgccagttgtccaggagtaagaaatggccgcggctcagaggagcggaaggagcaaccggcgccaccaataatagttaggagtttcagttacatttggtgtgtatcgggggtggattttggcttccatttccatcggcaggctaagagcggaacggatttggaaggggggtaataaacctaggcacagcagcatcttcaacttgcaaccgaaagactggtttctttctaccgcgccacgatatgtgcatgtgtgtgtgtgcatgtgcgtgtggcggcatacaataatgccatcattatttgatttttcccttagccaaaaattgagttgcaagaggcagaaacagaggaagaggagaaggagaaaacgaagaggcagggagcaatgacaacaatgcggcgcaaacaacaggcaaagagcatgcgccgacgacagcgtctcatcagaaaaaatatgttttaccgttttcatttttgctttccttgctgtactgtattattgtatatttggaggcacctgtacatgcctaacattcaaaacgacgcaactttagacgccgcacagcattaattgttttcactaatcacttatagtcagcaccgatttgcattgatcgccaaaaataaatatataaataaatactacgaaacggtggtagggtgtgtgtgcgtcgcgtcggcgctttttttttcccccgttcaatacacatgcggtatgcgacacatcgacaccacaccaacacgaacgcaaagagagcagagcgcaagaaccgcacgccgccaagttaagtttcaaactgaaccgcgcgctacagcgacaactctacttttgctcggatcggaaacaaaatgagcgcatgtgtgctgaatgtgtgtgtgtgtgtgttggtgtgcagctggatccgcttctctcctctcagataccgttgcgactaataacttttctctataccgaaatgcacgggtgcgagtgcgacgccactaggagtggccctggtcagatagcgcgtgcgagcgggatgccgtgcgttcgcttggggttggaatgaaacggcagcagttgacaaagcaaaaccaaaacgagtaaaaaaaacaggaatcaagactacagctggcgggcatgtgtatgcgtgctcaaccaccccgactgtgcgcccccttccactgtgaaaacaaaataaaatacccgagaccgaatccagttttctgtgtctgtacactcgaatgtctaccgcccgactcaaattcgattgctgctatacttcatcttctttttttcgttccttcacaaccaccactacttggcaacctctagcgcctttctcccttgctcttactttatacaacttactttattattggttgtgcttgtcggaaacagacgaacgaagcgtttgcgaagggaaggggtagcgtatgcgcagagacagagtgatatgttcccacagtggcactcgatctattgttattggaatgcattattgttgtactttggcaaccaaaggcacactggagcaatcttatagagcagcaacgtaaaacttaggatttacatagctgtgtagaacagaaatatctttgtatgtacataactgtcgacttgggttatgccagtaaaacaaaaaagtaatggtgtaaaataattattattattattaaataattattattatattaaataattattattatattattaggaacatagatataagatttagagtttcacttacatattaatatatttattaattaatttttcaaatgtttcacatatttaccgttcatgacccaaggtgcctgtctttggcatttcatttttcattttgttccagcccgtgtgtgtgtgcgtgcatcatttgtggtatgggtgcgttggttggactcggtcttctcactcttcccaccccttccaacaacaacgtcgctgaggcccacaagtgttcatcattccgattagtattgcttttttgctcggctcgttttttctcgttttcttttctttttgcagccgccatattatttttatgcttattaagtgcttttgctttctctctctctctcactctctattttgcttagttggttatttccctctttcgccttttcaccaaacgtgtaatcttccttgaacatttgtatttacaaacatacatacatacataaatacatatgtagctgcaaagtttccagggatgcagaaacgctagggattttattgccgagaggcgatctggattcggggtctcccacacgaagggcgttattctaccatgcaactgttatatctaaatttaggttaataagaaatcaaaatgcaaaagaaaaaagggaacagaaatgattgcgttttgcgtatcacgatctaatgcaatttttgaatatattgttagccgaagttaaaagttagtgctggaaaagttccaaaacaacgttaagatatgttttaaatttgtagaaactgacaactaacaaaaccttgccatacatttaattgtactttcttacatctcagtagtagttcttatctgaaataaatttcttcaatatatctacttaataagatgcataattaaatacaaccatgatctcagcgccccaatttaagaatcaattggattacgagaagcatcgttaccgagcttgaccgctaaacactataatagggtttgtgaaggagcaagtcagaacgaagatgaaactagttggattgcactctaaatatgtttttttcttatttggtataagattgtcgagacaatgtttgtatagatcagtgtggtaattattttcttaatgctacattgtcacttattaaagtttaacattctgagactgcaatagattgttacgtttcatacctgtggtacgaatgacgtaactctactaatgattatactattattcggtgaaaaatataatcttgttatcccatttcatagatataccagcgaaagagcgagaaaaattgtaagtaatgcttgtaaatactaccaaagatacatacatgtgttgagcggatttaacgttctccattttgatttgcctatagccacgacgacgtcgacaacaacgactattcataggtgagtccaccgatctaagcgtgaagtcgccgctctgccagcgtcgctgctcagccaataacaaaatgccgacgggaaaaatggactcgattttagtttttggctaagggagtgcccgctaaaagacagggatagctatacggcgcttaatcgcactctctctctctgcgacattgtcgtgctcgagggcggggcttagcccggtggtgaaattgtagtataacagttttgcgttgaacgaagcccacgtttgtacgtatacgtattttgcgcacagtgaaattaagtcaattcttctgctgagctgcaaaagaatgattaaagtcttcggtagatgattcggtagacagacaatcttctatgtatttataatttgaactgccatagtttgttatattttcatattctgaattaaaagctctgctctctggtttcttagtcattgtaagtcagaagtatttccatcttacatttgataaagctaggtatgcattttatacacttttcccacctatatttgatcaaatggtcgaatcaaagtaaactaatcacatcaattattgtaattggtcaagtgacttaaaaaaactcagaaaattctttttcacatttattaaacactattcagtgccattttaatttcttcagcaattgcaaaaaaaaaatcttgaaaaaaaagcttaggtctaggcattcaaatattatttagtaaaaagttcaaattcacatttagatatcaattattattcataggcttaaaattcttagttgttagaacaatcatagtgctacatttgattcctaagattaaaatacttgtacaaactatccatgacgttgggagttattaatatgctacttagactataaacttatgcttatttataaaatgtactttattcatttacttggctggcaattaattcatagcttttccttagtttaagtaattccattcgtttttgactgttgactgttagtttaatttataaatgaatatgcttataagtgatcttgggagtatgtacaaagtcaatgggtttaagacctgatggcctgatgctaataatattttgcaaatggattcgcgtccttttcgcctgcccgattgaatcagaatcacctggcacgacagacttggttgaaccaggtccactgctcggttaggagatcatctttttcggcttttcgtgctctagctgccctactgcgctcctggatccttggcctcgccaggtggcgggacctccttaatggactccaccttggccacaattttaagagctggacccagcttcatgcccatagcgttcaccaaatgcttctccttgagcaacagaagcgcttggccgtcgatctcctgctgtataaagtcgtccacgtagtcctgacaaccaggcagttctcgaatgaagttgctgacatcgtccacactccagctgctgattggcggacgatctgttccattcacttccgaagacttgggcgccgcgccagaagtgactacagacagtggtgcaagagttggaagtgcaactgacaatggcgatcctagaggcattgcaagaggcgagggcgcagaaatcgccgcttggactggcagtgacattggaggtacttctgttgaggctcccaaaataggaaacgattctgaaagctttggggtggcctctgtctgcatcttctcctcagccatggcttcatccagcctgtccaccaatgccatggcgtccaccccaactataccacctgtccccaggccgttcgtctctcctgatccaactccaccgatgccgttctttgcctgcctcgagcatcctggcgaacagtagcgcttccgtttcagctttgctttgtgctccatctttccacactgctcgcaagcaaccatatccgagcctggagctgatgctattccacttagcttgatgtcctcctgcatggttgcctttttctctgcgcgaaggaatgacacgttaagattgcgaaaaagcattggtaccagaagtttatactcacttggcggctcatcgctgacgtctttgtctgcatatcgctgtctggtgacgggaaatggctcgttggcctcctggatgatgaagccatcgatgacgtgagttaagacgttcggcttaatcatcgccttggggagatccttcgatccattactgatactcgacgtggtggttgtggttgtgctggtgcaacttgtgataaaggtgccagaactggtagtggttgtgctagcggttgagacagccgtgctggctgtcgttctggctactccaatcccattggtgatcgttgtcgtggttgaagttgatgttgcggacgttaaactgccgcaggttgccagcttcggctcttctttcccactgacactgttgggagtggtgctactcggtggctgcactgctgcattgctttgcttgctggtgggagtggtagcgccctttgacggcgtggaagacctatctgaggcatctccattggacagggcttcgcctgtggaactactggcctctacggatgcgctgacagtggcaggagtagatgatttgggggtagtgcaggtgtcctttcctgatacaggagtcttgggcgaaccaatgggcaccagggttgcggtgggccctttcgaaggtgtctctttggtgggcgtggctggtatgctacctcctccaccgctactagccgtgcttaagagaaccagctgacccggcgacgaagtaacagcggtgcttgtcacagaaacagttacaggcggagcagtggaaaggtgacccactgtagcattcatcatcgaggtcatggccaaaattggatttgtggtgggtgtaagtgatggcggtccctgtggctgttgttgagtccctccggcaattgtggcgctgattagctgctgatgttggtggacctgagcagattgcgtctgagcctgctgtatactggccaccgtactgctggtgaccaaaggagtgctgctctggttggtaattgtgaccacactgcttgtgggggaggaggaactgcaagtacccggcttagctgtctgaaagatggcgccagaggcggagagggctgcctgcagagcactagaggtagctattccggctggcgtcgttgacgaagaaactgagaagggcacgctacttagctgtagttgcccggattggtggtgctgttgctgctgggaagtctgttgagaagtcgctccagactgttgcaccacaatctgctggataatattctgctgctgctctcgctgctgttgttgctgttgcgcttgagcctgcacttgggcttgaacttgtgcctgcgcctgttgctgtagctgctgctgtatcagttggttgtgaagttgctgctgctgctgttgctggtgggacgtgatgaattgatttggcgccacctgaaggatttgctgagtggcattcgcgagagcctgttgatgctgcgcctgggcttgggcaacttgctgctgttgctccctctgctgttgctgagcctgcgcgactgcctgttgttgttgcgccaccgcttgctgttgctgggcggttaacctgctgctgctgagagacctgttgctgctgttgttgctgggcctgaacagccgcttgctgctgctgcatttgaatggcagcaatctgctgttgcaacatttgttgttgttgcaggatttgctgtttctgaaacagttgtagctgctgttgct

SEQ ID NO: 7475 - DNA, 4928 bp, DROSOPHILA
agcaacagcagctacaactgtttcagaaacagcaaatcctgcaacaacaacaaatgttgcaacagcagattgctgccattcaaatgcagcagcagcaagcggctgttcaggcccagcaacaacagcagcaacaggtctctcagcagcagcaggttaaccgcccagcaacagcaagcggtggcgcaacaacaacaggcagtcgcgcaggctcagcaacagcagagggagcaacagcagcaagttgcccaagcccaggcgcagcatcaacaggctctcgcgaatgccactcagcaaatccttcaggccacccactactaccgctcagcagcagatcgccaagcgcacccgactcaaagacaaccggccgcaaactggagaagtcacagagtccagctcaacaggtggcggccgccaccaatgtgccgctgcagatctcccccgagcagctgcagcagttatatgcaaacaatccctacgccattcaggtgaagcaagagtttcccacgcacacgaccagtggcagtggaactgaactaaagcatgcaaccaacattatggaagttcagcagcagttgcagctgcagcagcagctgtcggaagccaacggtggaggagcagcctcggccggagccggaggagcagctagtccggccaactcgcagcaaagccagcaacagcagcactccacagccatcagcaccatgtcgccgatgcaattggcagcggccactggaggagttggcggggattggacacagggaaggacggtgcagctaatgcaaccctccaccagtttcctgtatccccaaatgattgtgtcgggaaatctgttgcatccaggaggcctcggtcagcagccaatccaggtgatcaccgccggcaagccattccaaggcaacggcccccagatgcttaccaccacgactcaaaacgccaagcaaatgatcggtggccaagcgggattcgctggcggaaattacgcgacctgcattccttcgaaccacaatcagtcgcctcagacggtgctcatctcgccggtgaatgtcatctcccactcgccacagcagcagcaaaaccttctgcaatcaatggccgccgcagctcaacaacagcaacttacccaacagcagcagcaacagcttaaccagcagcaacagcagctcaaccagcagcagcaacagcaacagctgactgccgctctggccaaggtgggagtggatgcgcagggcaagctggcccagaaagtggttcagaaggtgaccaccaccagcagcacggtgcaggcggcgacgggtcctggatctactgggtcaacacagacccagcaggtgcagcaggttcagcaacagcagcagcagaccacccaaaccactcagcagtgcgtgcaggtttcacagtcgactttgccagtcggtgtgggtggacagtctgttcagactgcccaacttttgaacgctggccaagcgcaacaaatgcagatcccttggttctggcagaatgcggcgggcctgcaacccttcggctccaatcagatcatcctgcgaaaccagccagacggaacccaaggcatgttcattcaacagcaaccggcgacgcagactttgcagacccagcaaaaccagattattcaatgcaacgtgacgcagacgcccactaaggcacgcactcaactggatgcacttgctcccaagcagcaacagcagcagcagcaggttggcactaccaaccagacgcagcagcagcaactagcggtggctactgcccagttgcagcaacagcagcagcaactcactgcagccgctctgcagcgaccaggagcccctgtcatgccccacaatggaactcaagtgcgtccggccagttccgtatccacacagactgcccagaaccagagcctgctgaaggccaaaatgcgcaacaagcagcagccggtgcgccccgctttagccacattgaaaaccgaaatcggtcaagtcgcaggacaaaataaggtagtaggccacctgaccaccgtgcagcagcagcaacaggcgacgaatctccagcaggtggttaatgcggcgggcaacaaaatggttgtgatgagcacaacgggcactccgatcaccctgcagaatggacagacccttcatgcagccactgcggcaggagtcgacaagcagcaacagcagctacaactgtttcagaaacagcacatccttcaacaacaaatgttgcaacagcaaattgctgccattcaaatgcagcagcagcaagcggctgttcaggcccagcaacaacagcagcaacaggtctctcagcagcagcaggttaacgcccagcaacagcaagcggtggcgcaacaacaacaggcagtcgcgcaggctcagcaacagcagagggagcaacagcagcaagttgcccaagcccaggcgcagcatcaacaggctctcgcgaatgccactcagcaaatccttcaggtggcgccaaatcaattcatcacgtcccaccagcaacagcagcagcagcaacttcacaaccaactgatacagcagcagctacagcaacaggcgcaggcacaagttcaagcccaagtgcaggctcaagcgcaacagcaacaacagcagcgagagcagcagcagaatattatccagcagattgtggtgcaacagtcaactggagcgacttctcaacagcagcagcagcaaccgcaacagcagtctggacagttgcagcttagcagcgtgccgttttcggtttcaccatcgatgacggcggaagatattgccggaataacatccagtgccctacaagaagctctctcggtgtctggcgccatctttcagacaaccaaaccgattacttgcagttcctctacgctccccacaagcagtgtggtcacaattaccagccagagcagcactcctctggtcaccagcagtacggtggccagtatgcagcaggctcagacgcaaggtactcagatccatcaacatcagcagctaatcagcgccactattgccggagggtctcaacagcagcagcagcagcagcaactgggactaccttcacttacacccaccacgccctcacctacaacaaatcccattctggccatgacctcgatgatgaatgccaccgtgggtcacctatccactgccccacccgttagtgtttctagcaccgctgtcactccatcgtctggacagctggtcacactaagcagtgctagtagcggtggaggagcaggctttccagccacgcccaccaaagagacaccttcaaaagggcccaccgcaaccctggtgcccattgattcgcccaagactcctgtatcaggaaaggacacctgcactacccccaaatcatctactcctgccactgttagcgcatccgtagaggccagtagttccacaggcgaagccctgtccaatggagatgcctcagataggtcttccacgccgtcaaagggcgctaccactcccaccagcaagcaaagcaatgcagcagtgcagccaccgagtagcaccattcccaacagtgtcagtgggaaagaagagccgaagctgacaacctgcggcagtttaacgtccgcaacatcaacatcaaccacgacaacgatcaccaatgggattggagtagccagaacgacagccagcacggctgtctcaaccgctagcacaaccactaccagttctggcacctttaccacaagttgcaccagcacaaccacaaccaccacgtcgagtatcaataatggatcgaaggatctccccaaggcgatgattaagccgaacgtcttaactcacgtcatcgatggcttcatcatccaggaggccaacgagccatttcccgtcaccagacagcgatatgcagacaaagacgtcagcgatgagccgccaaagaaaaaggcaaccatgcaggaggacatcaagctaagtggaatagcatcagctccaggctcggatatggttgcttgcgagcagtgtggaaagatggagcacaaagcaaagctgaaacggaagcgctactgttcgccaggatgctcgaggcaggcaaagaacggcatcggtggagttggatcaggagagacgaacggcctggggacaggtggtatagttggggtggacgcaatggcattggtggacagactggatgaagccatggctgaggagaagatgcagacagaatcataccagacagtatcggacgctttgccaattcaagcggctacgccggaggtcccaccgatttcgatgccagtgctggcggctatgtcgacatcttcaccactttcgttgcccctgacattgcccttgccaattgcaatagctcccactgtgtcactgccagtggtttcagctggagtggttgcgccggtcctagcaataccatcctcgaatataaatggatccgatcgccctcccatcagcagttggagtgtggaagaagttagcaatttcatccgagaactgcctggttgccaggactacgtggacgactttatacagcaggagatcgacggccaagcgctgctgctgctcaaagaaaaccatttggttaacgccatgggcatgaagctgggtccagctctcaaaattgtggccaaggtggagtccattaaggaggtcccgccaggcgatattgtggcaatagtagagtccatgactctgtgcgacgaaaaggacggggaggttataggaccgctggcgccaccgccgttggatcaacagtcttcagcagtctaccagagtctgaggataggagcgggcagtatcctgagcttctatttgaccatgctgatctcccacgacctttgcatggacctttgcctacctgtggaccgggtccaaccgggtctgccacccaagctgaatttgattcacttgaagcggactttcaatccttttgtacgtaatctaaacatagcaagaggggtaatatcgtag

SEQ ID NO: 7476 - protein, 1624 aa, DROSOPHILA
MLQQQIAAIQMQQQQAAVQAQQQQQQQVSQQQQVNRPATASGGATTTGSRAGSATAEGATAASCPSPGAASTGSRECHSANPSGHPLLPLSSRSPSAPDSKTTGRKLEKSQSPAQQVAAATNVPLQISPEQLQQLYANNPYAIQVKQEFPTHTTSGSGTELKHATNIMEVQQQLQLQQQLSEANGGGAASAGAGGAASPANSQQSQQQQHSTAISTMSPMQLAAATGGVGGDWTQGRTVQLMQPSTSFLYPQMIVSGNLLHPGGLGQQPIQVITAGKPFQGNGPQMLTTTTQNAKQMIGGQAGFAGGNYATCIPSNHNQSPQTVLISPVNVISHSPQQQQNLLQSMAAAAQQQQLTQQQQQQLNQQQQQLNQQQQQQQLTAALAKVGVDAQGKLAQKVVQKVTTTSSTVQAATGPGSTGSTQTQQVQQVQQQQQQTTQTTQQCVQVSQSTLPVGVGGQSVQTAQLLNAGQAQQMQIPWFWQNAAGLQPFGSNQIILRNQPDGTQGMFIQQQPATQTLQTQQNQIIQCNVTQTPTKARTQLDALAPKQQQQQQQVGTTNQTQQQQLAVATAQLQQQQQQLTAAALQRPGAPVMPHNGTQVRPASSVSTQTAQNQSLLKAKMRNKQQPVRPALATLKTEIGQVAGQNKVVGHLTTVQQQQQATNLQQVVNAAGNKMVVMSTTGTPITLQNGQTLHAATAAGVDKQQQQLQLFQKQHILQQQMLQQQIAAIQMQQQQAAVQAQQQQQQQVSQQQQVNAQQQQAVAQQQQAVAQAQQQQREQQQQVAQAQAQHQQALANATQQILQVAPNQFITSHQQQQQQQLHNQLIQQQLQQQAQAQVQAQVQAQAQQQQQQREQQQNIIQQIVVQQSTGATSQQQQQQPQQQSGQLQLSSVPFSVSPSMTAEDIAGITSSALQEALSVSGAIFQTTKPITCSSSTLPTSSVVTITSQSSTPLVTSSTVASMQQAQTQGTQIHQHQQLISATIAGGSQQQQQQQQLGLPSLTPTTPSPTTNPILAMTSMMNATVGHLSTAPPVSVSSTAVTPSSGQLVTLSSASSGGGAGFPATPTKETPSKGPTATLVPIDSPKTPVSGKDTCTTPKSSTPATVSASVEASSSTGEALSNGDASDRSSTPSKGATTPTSKQSNAAVQPPSSTIPNSVSGKEEPKLTTCGSLTSATSTSTTTTITNGIGVARTTASTAVSTASTTTTSSGTFTTSCTSTTTTTTSSINNGSKDLPKAMIKPNVLTHVIDGFIIQEANEPFPVTRQRYADKDVSDEPPKKKATMQEDIKLSGIASAPGSDMVACEQCGKMEHKAKLKRKRYCSPGCSRQAKNGIGGVGSGETNGLGTGGIVGVDAMALVDRLDEAMAEEKMQTESYQTVSDALPIQAATPEVPPISMPVLAAMSTSSPLSLPLTLPLPIAIAPTVSLPVVSAGVVAPVLAIPSSNINGSDRPPISSWSVEEVSNFIRELPGCQDYVDDFIQQEIDGQALLLLKENHLVNAMGMKLGPALKIVAKVESIKEVPPGDIVAIVESMTLCDEKDGEVIGPLAPPPLDQQSSAVYQSLRIGAGSILSFYLTMLISHDLCMDLCLPVDRVQPGLPPKLNLIHLKRTFNPFVRNLNIARGVIS

SEQ ID NO: 7477 - DNA, 5300 bp, DROSOPHILA
ttcggtggaaatcagacagcgggacatcactactacgagagcagtagtggctataatggagtcagctatttcgacacaggaactactacggcaccaggaaatactgcaaccggaaatggcctggaagtcggatacggcggctactacgatcactacaccagctacgagcaacaaatggcggtagcaggtggatttgccactgccggaggatccactgcgccgacagtggccgcgccccctggccatccaccgcctccaccaccaccgcccacgctgacgtaccaccatcaccatcaccaccacttgcaccacccagcagcagctacaggcctagccccatcggtcacccattgaatagtacttaaccaatccggacaccggaggattactcatagtcgatagctaagcatagtaacatagtgtttaaaatagtggtgaaatcttaatttccatctgtacgtgtagtgttaaacggtttaccaattgtttttctcggcaaataaattatgaaaagtgttgatttgtaaaagtaaatgtatttaatttaagtgcgtaaatataatttcttattgcgcgaccaattcaaacatagctaattttcagcggtcatgatggtgcggttcttgaaatcagagatagatgtcgcgctgtaaaaaaattgttggtaagaaccatgtaaaatgtaatggtaaaaaccatgtaatgtagacaagcaggtgctcacttaaccataactgtagtaattttaggacgcatttaatgatttgtagtttaaaatcgatagatagtaagatatactttaatacgaatgatgttttataattggcggaaacatttaaagaaaaacaaattggctgccaagacccaaattttgtaccgcttacatggcttgcagtttttttttaaaaagcctcctaccggtaagaaactgaactactgcagagttgctttacgataaactcacaatgacacacagacacagacacacagacataaccagactaaagagaatagtactacaagttataatcgctatcttcagcaagaggatttcacatttaaagtaatcgcatagtggccagcaaaacctatcgcatagatgtgccaatcggtctatccattcgaaattcaccttcaccaaacgcgacatacacatatgcaaaaagagagcgtatagcaatgagaagcgtgagcgtgagtaaaaaatctataaaagcaactgcgacgtgctcattttggtaaaaaatttagctgtgctgcaaagagctgcccgagtggtaattaagtaacttttgtacatttctaccggttccgtctccacatctcccatccaacatggtgtaccaggtgaaagataaggtgagtcacttcaaccggatctatggacgcatcacatccgtcatctattgggtaactcgatagcgctaccctttgacccctcagttccagttacacgtttattttttcgctccggactttgaaaatatggcattggaagcggcattccaattagccacttactttgaatgattggattcgctacgctttttgccatacgctctcccgcgaatagaaggaactcacgttcggtctagacgagcgagaaagcggagagcaaacgagaaagttccgaatagcagcacagcgaaatgataatgatatcatcccgtggaccgcaaaacgggtctcaacggaaaccgaattttgaaattgaaatattccggaccgagctaatcggaaatagtgcgaacaagatatacgtactatagaaaccacatatgtacggatgtgtgtgcgactggcatgaatttgcaattcattatcgtggtcgaggcctggttttttggttagaaatatttcgaatagttgctatagcacagggtgtgctctccacacataagttgcgcgccatgcaagttgatccaaagccaagaaaacaaaagacgcgagtgcgcggggtgaagaaccggttccatttcatgaatacaaagttacgtcaggaaatattgggaagtaaatacgtgaaagcatgccttcttattttatttctcaatattagtttatttatatttgtatacacacttaaacactatcaaacattgactctcgcggtctagttctatacagcaaaccacacaacaataagctcaaaaatcaaaaaatgcttatcgaaggcataaggaatccacgaaaacatcaaaacatttatgcatactgaattagacaatataacaaagtagtttaactactgattttagttttttatgtttactcagatattgtcttaaaaaatgagtcagcaatacatgttgacaaattgaattgtagccaacagtcatcgagtaccatcaccatcttgagattaatcattccatgacgtatgtgtctgcaatagaaatgatctaagcctgattaaaatatgtaatagggatgatcaagtggttttgtgctagcaaaaatagcgtgtataaagttaaatttcttgggcatatacttatgcaaattcctccaaaccggttgcccattccaattgaaatcgtcaatttcattagagctctgtgcttgcatgtgctgttctgcgattggcatcgctagcaattaattaaaggtcattgggaaaacgtgtcacgggcagagaaatgggtggaagaaaggggatggaactgcccacgaccgccacacctttcggcatacatacatataatttggaaattctttaaatattgatttgctttgctgcccaatgggtgcaatacagaaactgaaatgaaattgacccgatttcacaagtttatgaagcacacacacatatttaacccgtcaatcggcgattattggggctgattacagcttggcaactttggggatgtctgacaacgttgtgtttgcagggaacaggcttatcgggcgagatagtagcggggcctccccaacgcaatatgtatatttacaatagcaccggatcaatgctccacaatcggaaatcataaagtttgaaaacatgaccaccacctgctaaagggaaaattactgaaacatctctagggagtgggaaattattagcgctaatgtatgatgatattactcagagatagtactaatttacattttcatttgcaggccgatctcgatggacagctgaccaaggcatccggcaagctggtggtgctggatttcttcgccacttggtgcggaccctgcaagatgatctcgcccaaactggttgagctttccacgcagttcgccgacaacgtcgtcgtcctgaaggtaaatctaaaaatgtgctcagctttattttatttgcttaacactttttatggaaatccttactaaatgcccttctcctacaggtcgatgtggacgaatgcgaagacattgcaatggaatacaacatctccagcatgcccaccttcgtgttcctcaagaacggcgtcaaggtcgaagagttcgccggagccaacgccaagcgtctggaggatgtcatcaaggccaatatctaagtgggcagcgcatagacgtctggccgtccccctgatccacctatgagttttcttcataacatttagttaattaattaattccataagtgcagggttttgctccattccgcctgctccgccttgtccttgaatcccttagagctgcagtgcagttcgcaaggtgaaggtcagcagtggcagcagttggaacagcaacaaacgtgagaaactaagtggcttttaaacgtaaaatttgctttgttaacaaaatcaataaatcacacaaagattgttcatttttgtatgaaaaacattagaaaacgcagttgtagccagttgtccaagagaatacgctaaacaataaatgtattacacactcgccgtttgtaaccgattaaattgttttgcaaaattctgaaggggaacctggggtgaggtcggatctaggaatgacacataaagttgtgaaatgaaagccaagtcaaatatcagtagccaacaagcagacaaatgtcgttacggttaagtaataacgattaaaaccgggtaactaccgattagataagatacggcaacaaatttgtatactccaaaggcatatcaagtgcgtgatcaaaatggccatttcataattaaaatccaccagattaaagctaattttaaaatttccattttgagaaggctctttttatctgtcaaaaaatatatttttacatatgtatattgacaacgaaattcaaaaacaaattatatatttccttgaatccgtgattgaactatagaatatcactaggcattattaaaaaatttaataaataaatgaacttatttgaaaatgaaaataaggtaaaaggtacctttcttgcgatcaataatatcaaaagatttaaatttgtccaaattatgtttgacagcatatcgaaagttgccaagttgattcttgccataaagttaaagaacgaaagtaaatgggagacaatataaaaacaaagtgattaattaagaaactatttttaattaattcaacatttattttaaacatttgaaaataagccgttaggcttggacgaacaatcgatacttggcttagtggggacaaaaaccgaatgcaacactgcgccagctgtgttggtggtgggagcgaaaattgcccgatttttcagtagtgtttttttttcagtagtgtcagactctcggtgacaacaacacgtcgggaaattgcatcgctgtggaaaacaataaaatagagcgtgagagtgagagacagtcgcgcgggtgtcggtcagaaataagcaatattttctgtgatttttgagtgtgacgtcctgttttgagtgcttccgcctcgtaattcgcggcattgctgcggccaaaagttcgccattggatggttttttatagcaaccagcgcgcacggaaataaatcggagcacggggagcacccaaagtgcagagatgtcgaggcaatttgcataattttcgggtggtcggtcgcagctagaaagttgtataataagattgcgaaaaccaggaggtacgcccggctcaccacaaatggacggggaatgttgtggcagctccaccgcgtccaccaacaccacaaccatcgccaccaccaccaccccagctgaaagcgcctacaccatcgtatcccaaaatatttcaataaatgtctagtgccaggctactcgagtcgcagacatccgacgaggataacgaggacatcgagcggcggcctcaccagagccattcacgcagctgcagcaacaacaccacccccacccatccaccacatcccatggtcaggaaggggggtgtggc

SEQ ID NO: 7478 - DNA, 1399 bp, DROSOPHILA
actaaagagaatagtactacaagttataatcgctatcttcagcaagaggatttcacatttaaagtaatcgcatagtggccagcaaaacctatcgcatagatgtgccaatcggtctatccattcgaaattcaccttcaccaaacgcgacatacacatatgcaaaaagagagcgtatagcaatgagaagcgtgagcctgtgctgcaaagagctgcccgagtggtaattaagtaacttttgtacatttctaccggttccgtctccacatctcccatccaacatggtgtaccaggtgaaagataaggccgatctcgatggacagctgaccaaggcatccggcaagctggtggtgctggatttcttcgccacttggtgcggaccctgcaagatgatctcgcccaaactggttgagctttccacgcagttcgccgacaacgtcgtcgtcctgaaggtcgatgtggacgaatgcgaagacattgcaatggaatacaacatctccagcatgcccaccttcgtgttcctcaagaacggcgtcaaggtcgaagagttcgccggagccaacgccaagcgtctggaggatgtcatcaaggccaatatctaagtgggcagcgcatagacgtctggccgtccccctgatccacctatgagttttcttcataacatttagttaattaattaattccataagtgcagggttttgctccattccgcctgctccgccttgtccttgaatcccttagagctgcagtgcagttcgcaaggtgaaggtcagcagtggcagcagttggaacagcaacaaacgtgagaaactaagtggcttttaaacgtaaaatttgctttgttaacaaaatcaataaatcacacaaagattgttcatttttgtatgaaaaacattagaaaacgcagttgtagccagttgtccaagagaatacgctaaacaataaatgtattacacactcgccgtttgtaaccgattaaattgttttgcaaaattctgaaggggaacctggggtgaggtcggatctaggaatgacacataaagttgtgaaatgaaagccaagtcaaatatcagtagccaacaagcagacaaatgtcgttacggttaagtaataacgattaaaaccgggtaactaccgattagataagatacggcaacaaatttgtatactccaaaggcatatcaagtgcgtgatcaaaatggccatttcataattaaaatccaccagattaaagctaattttaaaatttccattttgagaaggctctttttatctgtcaaaaaatatatttttacatatgtatattgacaacgaaattcaaaaacaaattatatatttccttgaatccgtgattgaactatagaatatcactaggcattattaaaaaatttaataaataaat

SEQ ID NO: 7479 - protein, 106 aa, DROSOPHILA
MVYQVKDKADLDGQLTKASGKLVVLDFFATWCGPCKMISPKLVELSTQFADNVVVLKVDVDECEDIAMEYNISSMPTFVFLKNGVKVEEFAGANAKRLEDVIKANI

SEQ ID NO: 7480 - DNA, 3352 bp, DROSOPHILA
acaaccaacatgctgtggttctccaaataatagtcaagatagttaagagggttcgagtttacgattagctttattttaagattcagttcgcgatctgctagcggttccgttatgtgtccgttcgagactgggcctcttctcccgccccgctgcttttatatccgcttcccccgttgacccctcaccctgagtgcgaccaacggcacttgttccgaatgcacacatacacaaacatgttcctagacaggccccgagtcgcctgctgacggggcccgaaaacacgagagccgagcgctggtgagtcctgacgaagatcgcaagaagagggttcgtaacttacacgaacatgttactagacaggccccgagtcgcctgctgacggggcccgaaaacacgagagccgagcgctggtgagtcctgacgaagagcgcaagaagagggttcttaactttaataatcggctgataaaaatggataatcgttaagcctaaactccaaaatgtaaatactattctttgtaaatgctatacaattatttttgaagtcttttattaattagggatatgtctgtaaaacaatatgtatatcagtcactatctcaacttctgattcatatgttaactttaaacacctcctttaaaaaaaagacttgatgtcggtcggtattcagctaaacatattggccataacactgcacgtgtcattaataaaaggataggtaaacattgccactggaacttgaatcacttgaatgattcaggactgcgtatcccagtccaagccgcttcacccacttgcatagttttataccaaccgcgtacttacaatctgtggatcagctttcggcattggaagagaacgtgcgccaattgtccgatcgccactggcagcgtgtgtccaggtggcgcaacttgatctctgcgtagatcttttcgaaatgaggagccgccttgcgagcactttcggccaggatctcaaaccagatggcctcactgagttcggtgctggtgtggcacatagagatgcgcgtgcatccgaggatacgttctcggaactgacgcaccagttcgccgaggcaggaatggaaagcggtggctttgttgctactcacctccggcaggaggaaggtgtttaagcaccgtgcatcgcctcttccccggtatatgggcagccccgtcggcccgtataagtaggccaactttttgtccagtcgttcccgctgctgtatctcaaagtctattcgatgggcacgcgcgcggacgaatactacctgcggcatgtgatcccgtacatagcctttgcaatgaagcgtcggtctcaggcgaagggcagcgtttatcagacgcaattgttccaaggccaagccatcgatgactaaaattaatatatggcatacactcaacagttgcgccatggtgcccagggagtaaagatcctggtgatccgagtccttgcctacaggcattaacggtggtgtgtccagcagtatgtgacgttcccgggtgataaaaaactgcagggtttccgtgcgaggacgcaaaatgctcttctgcccattgttcggcttcaacttgtgacgcgtggcaaagatgcattcatccgcctctggagagaatagatgttgatagtagtcgtagtccagggaccgctctgcggccagaagattgagcagcgtgctttttccggaactctgaccacccaggaccccgattacggtgaagtccgtattggttttgtggaagagcttgcgggcattggcattaaaaataccattggccacgattaggggtgtgggacggttcatgcgtggcggctgcagctcctggagagcattcggtgctccggccgaggtgccagctgttccggcaccaccactgcagctccccttgtccctgctagttggtaccgagctaaccaatgcggcgcaaacggagctggatggcacggcggacaattgcccgcttccctggacaagagcacctccggccaaaggcatctggcatctgtctgcaggccgcacctcacccgtacgattgacgatcatcgttttgagggccggcggtgtatcggggtaacaactgggacttggctccgcctccctgtccctctccagcttcctatccttgtcccgctctctgtcccaggtctcttgctcccgatcgcgatccttctttagcagaatttttggctgcatcatgcgggcggcgtcctcgcgccgggcgatggtcacgggtgccaggaggccggagcaggcttcatcccgctttttgttacggaaacgacgacggggatcagccattcggaagccggttatttggggtttatatttgactaaatttaaatcggtttgaacacgttcgtgggtgtcaacgctaatacattgtttcgcagcactggtatgtacataaccatcgcagatgtcgtggaaatatagctaaaaagcgaaaaatacgaaattaaggacaacatttttaatttcagacgcaacaatcggctggcccaacaaataacggtacacaagattatccacttttttttatcacaattgcactggacttatagccaaatatttttaatcatgagaagtgaaaggcaagcacatatctaaatctagctcgaaaccagatggatgctcatcttgcacactgtcaccagtgttggtaaccgagtgcattgtgagcggaacgttccgacacctactttgtttatttattgttattaattaggaagcatgcccctcgtggtgattacgggcctgccagccagcggaaagagcacacgtgcccgccagctacgggatcatttcgtggagcgcggcaggaaggtgcatctaatcagcgaaaacgaggcagtgcccaaggcgggttttggaaagaattcccatacaggtgattcgcagaaggagaaggtggtacgtagcgatcttaagtcggaagcctcgcgtcaccttaaccaggaggatctggtcatcttggacgccgggaactacatcaaaggtgagctctcaccaaggttcagctaaggttcgtaaaccacaaccaaaatttcttccaggctaccgctacgaattgtactgcatgtccaaggtgtcaaggaccacccagtgcactgtgtttacctgcataccccaggaggaggcgtggacctttaatagccaaagaacggcgccggatgaactgcctggcgacagtgaaagagttcagccggtggacaactcggatgttccctacaccagagagacttttgatgctctgtgccagcgctacgaggagccgcagagcaacaaccgttgggacagtccgctggtggtagtcttgcccaaggacacgctcgacatggaggccatctacaa

SEQ ID NO: 7481 - DNA, 1517 bp, DROSOPHILA
ttcaaaccgatttaaatttagtcaaatataaaccccaaataaccggcttccgaatggctgatccccgtcgtcgtttccgtaacaaaaagcgggatgaagcctgctccggcctcctggcacccgtgaccatcgcccggcgcgaggacgccgcccgcatgatgcagccaaaaattctgctaaagaaggatcgcgatcgggagcaagagacctgggacagagagcgggacaaggataggaagctggagagggacagggaggcggagccaagtcccagttgttaccccgatacaccgccggccctcaaaacgatgatcgtcaatcgtacgggtgaggtgcggcctgcagacagatgccagatgcctttggccggaggtgctcttgtccagggaagcgggcaattgtccgccgtgccatccagctccgtttgcgccgcattggttagctcggtaccaactagcagggacaaggggagctgcagtggtggtgccggaacagctggcacctcggccggagcaccgaatgctctccaggagctgcagccgccacgcatgaaccgtcccacacccctaatcgtggccaatggtatttttaatgccaatgcccgcaagctcttccacaaaaccaatacggacttcaccgtaatcggggtcctgggtggtcagagttccggaaaaagcacgctgctcaatcttctggccgcagagcggtccctggactacgactactatcaacatctattctctccagaggcggatgaatgcatctttgccacgcgtcacaagttgaagccgaacaatgggcagaagagcattttgcgtcctcgcacggaaaccctgcagttttttatcacccgggaacgtcacatactgctggacacaccaccgttaatgcctgtaggcaaggactcggatcaccaggatctttactccctgggcaccatggcgcaactgttgagtgtatgccatatattaattttagtcatcgatggcttggccttggaacaattgcgtctgataaacgctgcccttcgcctgagaccgacgcttcattgcaaaggctatgtacgggatcacatgccgcaggtagtattcgtccgcgcgcgtgcccatcgaatagactttgagatacagcagcgggaacgactggacaaaaagttggcctacttatacgggccgacggggctgcccatataccggggaagaggcgatgcacggtgcttaaacaccttcctcctgccggaggtgagtagcaacaaagccaccgctttccattcctgcctcggcgaactggtgcgtcagttccgagaacgtatcctcggatgcacgcgcatctctatgtgccacaccagcaccgaactcagtgaggccatctggtttgagatcctggccgaaagtgctcgcaaggcggctcctcatttcgaaaagatctacgcagagatcaagttgcgccacctggacacacgctgccagtggcgatcggacaattggcgcacgttctcttccaatgccgaaagctga

SEQ ID NO: 7482 - protein, 487 aa, DROSOPHILA
MADPRRRFRNKKRDEACSGLLAPVTIARREDAARMMQPKILLKKDRDREQETWDRERDKDRKLERDREAEPSPSCYPDTPPALKTMIVNRTGEVRPADRCQMPLAGGALVQGSGQLSAVPSSSVCAALVSSVPTSRDKGSCSGGAGTAGTSAGAPNALQELQPPRMNRPTPLIVANGIFNANARKLFHKTNTDFTVIGVLGGQSSGKSTLLNLLAAERSLDYDYYQHLFSPEADECIFATRHKLKPNNGQKSILRPRTETLQFFITRERHILLDTPPLMPVGKDSDHQDLYSLGTMAQLLSVCHILILVIDGLALEQLRLINAALRLRPTLHCKGYVRDHMPQVVFVRARAHRIDFEIQQRERLDKKLAYLYGPTGLPIYRGRGDARCLNTFLLPEVSSNKATAFHSCLGELVRQFRERILGCTRISMCHTSTELSEAIWFEILAESARKAAPHFEKIYAEIKLRHLDTRCQWRSDNWRTFSSNAES

SEQ ID NO: 7483 - DNA, 6689 bp, DROSOPHILA
cgatccgcccactgttccggcatcgtggctaataatcatatacgcttgtggagagcagagcggagtgcagccttcgactgactgatccgtttcatttgaccacccatgaactcaacgccttaaactcaaaacgtgcgcaacgagcaccccaagcatagcaaacactcagaacagcaaacacaagccacacacaccacacacacacctgtaacttgtaattttcgtctctttttttgtatggcaaaaacacatatctaattcttaagagcacagttaaaaaaaaactttgttattagtttccggcaagtccaaagagaggggaacacgtgaattgatttctttaagttgtatatccaagtattgtatttactgataacggatgctaatggaagcaagaagtatatagagattcactttgttattttgtattccaaacctacatatttatttctgtgaacaaacacaaaaatcatatactttgtacattttgtattagtaatgctttgaaggaaataagaataactaagaataacccaattgtgtgatcccgatcaaaacgatatgattaaaacaaaaaagacaattcgaaatgcgttgtccggtaatcagtgggaaaaaccaggtgtcccttattccgctcccaaaatgtccatcatccgtctctgtcgttttcgcgacacggctccgatattcaaagttccactgaaataatttcgattatgagtttcttacataaatatcatttatttcgtttcgttttcgttcatgaatcattctcattctcatgctttgcaacatctcaacaattgtgttttcatatatattggtttgctttgccccaacatttattctagcgtcccaactcaaaaacaaatatgtataagtactagactttctattaggggcgaaaaagaggtaaataagtgagtgactttcgcattctggggtcggtcatcatcatgtggcattcataattcctcgcaacttgcttttccatggcacctggccatgctcacagtgttttggatacttctctatttgtatatatatatacgcgtgcgtttccgggtcaacaattacaaaaaaaagaaaactaaataatcacactagcagagtagtgcatgttaggaattaaaagaattctcaacaacaacaacgatttgtttaaacgatagagaataaagaggttccaatcgattggctcatatcatgcattttcttacaaaaaaaataaaataaaagaggagagaaaaactgagagttgagcagcaaatacgtggtgcattaatgttgttgtagtcgtttgggtgtttgtcttcgcctgatttctatgatcatccacattctggttagtgttttgccccacggtcagccaacccactactgttccactactgcggcgatatatagttgtgctcgaagatgtccagctcgttctgtatgtagttggccttgttgcgaagcagcttcaattgcttctggttcgcctccaggatgttcagctgcgagtccagcgtcttgagctcatcattcatgtccgtggtggcggtatcaaccgtgcggcacaaacgggcaaaggtgctcgacaattccctgttgagatgtgacagagaatattcgataagtgatcagcgattcagacgctaagggatcaatactcactgctgcacttggtggctgcagttggccgaggtgaggtcgacaatcatcttgagcttcttggtggcatggcgcacgtactgcgacttgaacgttcgctccttggctgaatttgtccacgagaggcgctcgtacaggtagatgcagccgtagagggcacccacgcccaccaggacacgccagccgatagttttcagcatctgcaagtggtttgatttcatcacatagctatgcactatcacctgcttggtcgttggtaaggacaagaggtgttatgataatttaaccgttaacacttacgacaccggctacgacgagaccaccaacggtgccctgcgatccaatggaggacaccgcgaagcgtgagatcaacgacagctgctcgggcgtaatgccagccacaacgggagcgggcagcaggcacacaggagtggcttccacgggcgtcgtggtcggcgtcgatacgctgtgctgtgaacgagattcgatggcagagatatagtaaaggtggtgcaacacaactatactgtagaaactcactccaatactgctctgtcgattgaccagcgccggctggcccttcttgctgcgctcgcgcaccttgccggtgaagcgctggatcatcgccgcaatgccccagctgaacttaaactccagatcctcctggaagtcggcgcagaggttctggcaattcagtgagtagagcatctcgaagggctgcgtgcgcaccaccatcttggtgctggtggccaggagctgctcgttgggcaccagggcgtgcatgcgatcggtcatctccgtctgggcggactcgacgttcatggccagggccatggataggcgggcgcgcagattgctgcccaggccgctctccacatgggcattcaattcctttttgtagatgttcagcaccaaacgctccggatggaagggcatattgaactcgtcaatgagtacgcccaggcgccagatctcctcgttcagcgcctttgacaccttctcctccacctcctcgaccatgttgtggatcttcatcttcatttcccgcgtaacctgcatcatctgcgtctctgtgccctggatgcgttcggtgagcaggttcttctggtcctgcttcagattgcggaatatggtgatccgctcgtaaatgttgtccaacattgatttcatgtcacccgaaacactcttgccgcgcgaactgtgctgctggaactttgttttcacagcactctgcgagatgcactcctcgaacttgcgctcgaagtcctggaactcgaagtagcgtatctgaaagccctcggcaatggcacccatgtgcggcggattgcccttggcctcctcgatgcgcgcctgcagcgtttccctggcggaaacgaagaataccctttcggccgcctccttctcgttgctcacctttagctccttggtgaggaagtcgatgcagcgttccgtgtgctgagacttaacctatcaattgatgaaataagcgtcttagaaagtgcatagatcaatcaatcagggcaactaagtaagctgctttgggaagagtcaacaaggaggtgttcatcggttcaattcgataaagagaccaaagcagagtggattgggtttttgtgggaccaagcaagcgggtctagctcattcattaccttagccaattcctggcgttgattacagtggatagttggttggttgtttgatagattgattggttggttgggtaataaacaaaaacaaaagacacacatcaacatagagagacaacaggcatacgaagaggtccaagaaattacttatgagatgtggcagtgcaaaactgctggcaaacgaacatatgtacacatatgtggcatatggttcgcctgccatgtaatggtaatgcagggtctgacagagattgtggactaactaaaggggccgcctagaagatcataccgattcctggcactcgggctcgttggccgacgcatcccagcgattgttcaggatgaagatgttcggcttgcttagcttctgcgagacggtgtgaaagaactgcttctccgcacgcgtcatcgttgactcggcattcaggaccagcacaaagacatcggcgttcaggcaatggttatcgatccagtcgtccaaattggccgacacatccacaccaggtgagtccacaaagacgacatcgtcgcgcagcaggctgcagcgttccctcggccaaaagatgcgcaccaaactgctctcgcagagcttctcctggcacaaggcattcgccagttgtttgatgttctgcaaacaagggtcactaggtcattaggcgaaacacatttcccagaggagagctgagtagcccacttaccaccacatttagcttctcctcggagccctctgtcataagatacgcctcgccgccattgctgccctccacttggcagaagcaattcgtggtgtgcccaatgccgctgggcaggatcttctcgcgcaacatggcattaatcaccgagctcttgccgttggaggtgcgtccaaagaaggccaccttcatgtgatcccgctgcagtacttcgcgaatggccgccaccttgtacacatagctttcgaacagctcccgttccgccttgtccacgatctccgcttccgcgtgcagggctgaaagagcaacgaacattggtttaactgggtatttcgccaaaggcaatagatgttagataagaatcaaaatttcaccatttcccttgtaaaacgatgaactgaatcataatcgttcttatcgaataccatgcaacatagaggttcaaggattggcttctgttgggtattttaaaaatataatacataactcaccgttgataaaggtggtcgtctcatggacatactcctcgatctcgccgtagatatcgttgatcttctttttggcgcgcacaaagatctggagcggtgatttgtcgttggattgatagagccgcgattccggtagcagattggcggccattgtggagccggattgttgcagcgatgagttgaaccgggatagcggggaaccgggtccggatttgtccaccgtgtccgtggaggaggcgtgacggtcgtcgtcggcggggcccgtttgcccggtcaccatcgagatggtgcggttcaagtaggccgccatttcgggatccggtttatggttgattcggtttagcagatggttttttggtagaagaagagaattgcgatacaaaacaaaaggtatgcagcccaggggatttggttgttcagacttccaacttctgcaacttcgccgccaacccgaaactcaaaacttaactatctctgtttattgtgtgttatattgcttttgggggtatttgctcaaaaatcaacgtcataaaactgaaacgaaattaaatgaaaaattatgacacgaaagaaaaaacaaaacgattgaatacagtgcgcaccagataagctcaacttgagtggtttaagtgttaaacaaaatgtgcgctacaaaatcaagcatgtgtttgctaagtatatcttagagagaacataaactattgatttgttgttcgctatgtcgagagtgcactgtatttggcgaaaaggaaaataccgcaacgcaaattgcacgcacacacacacacgtggtccaattgcgctgcaaacaaatataggcgaaaaaagtataataatctaatgtttttggtttttcttttttctgacaatttacatctgtgtgcgtaaatcgagttgataaagtttaatctgccctctcgctctatcaactaacctgattaatgccactctcgctcatatttgtatttgttttattttatatttgtatttattttcctctccggttgttcgattcttttaattgctgcccctcagctgatgcgttttcaaatggcaaattgtggaaagcgtggttcgaacttccaataaccgtacattgccgactagaatccagttgcagagaagcaatttcacgaaatttagttaatattattaattttttttaaatgcacatgatgtaacgttaaggtgaccaactcatgttgttcgctgacatccggcgttagtgcatttttatgccttcccatgtctagtatatttttatgccagtcgaaagcttaatatggtattttttcaattcgctgccatatttaattgaaattaatttttttcaattactaccacctagcttatttttatttttattgtctaatttaaattttgtctaatttaaaaatagaatttaccctgacaatgattttcactgattggaaatggtcacactagccagtttccagttagccagaatgtaacggcgcctttcccgctccaattggaatccgcgtgtaattttgtgtctcgtgttaattgtattatttcccccgcttttcggatttccgcataaaaagcgatgagtctacaggacgagagttttccgacggacgagctgtttgaccagctgaacaatttgagtagcagtggcgccaggaatacctggttcgcggagcaccataagcccgcagtcttcgagcgggatacagcgccatttttggagatctgctacgcggatccagactttgatgcggatggggatgtggccaacaagagcgccaagacatgcgtaagcgatcccgtgggtcgtgatcaggaggatgaggacgactatgatgaggatgtcgatggtaagaagtgttcgctctctctctacacttgcttaactacaatgggagaaatattcccatcaaacatatctcatatatgtataattttggtacttccatgtctcgatgtataatgggtacttcattcaatgggcacagtcaattagctagtgctaacatgtatcctttcttattcaaccaggcgatgatcataaactgggttgcgagaaggctccattgggcagcgggcgctccagcaaggcggtctcttaccaggacatccattcggcctacacgaagcgccgcttccagcacgtgaccagcaaggtgggccagtacatagcggagatccaggcgcaggaccaaaagagacgcaatgtgaag

SEQ ID NO: 7484 - DNA, 3387 bp, DROSOPHILA
aacatgagttggtcaccttaacgttacatcatgtgcatttaaaaaaaattaataatattaactaaatttcgtgaaattgcttctctgcaactggattctagtcggcaatgtacggttattggaagttcgaaccacgctttccacaatttgccatttgaaaacgcatcagctgaggggcagcaattaaaagaatcgaacaaccggagaggaaaataaatacaaatataaaataaaacaaatacaaatatgagcgagagtggcattaatcagttttatgacgttgatttttgagcaaatacccccaaaagcaatataacacacaataaacagagatagttaagttttgagtttcgggttggcggcgaagttgcagaagttggaagtctgaacaaccaaatcccctgggctgcataccttttgttttgtatcgcaattctcttcttctaccaaaaaaccatctgctaaaccgaatcaaccataaaccggatcccgaaatggcggcctacttgaaccgcaccatctcgatggtgaccgggcaaacgggccccgccgacgacgaccgtcacgcctcctccacggacacggtggacaaatccggacccggttccccgctatcccggttcaactcatcgctgcaacaatccggctccacaatggccgccaatctgctaccggaatcgcggctctatcaatccaacgacaaatcaccgctccagatctttgtgcgcgccaaaaagaagatcaacgatatctacggcgagatcgaggagtatgtccatgagacgaccacctttatcaacgccctgcacgcggaagcggagatcgtggacaaggcggaacgggagctgttcgaaagctatgtgtacaaggtggcggccattcgcgaagtactgcagcgggatcacatgaaggtggccttctttggacgcacctccaacggcaagagctcggtgattaatgccatgttgcgcgagaagatcctgcccagcggcattgggcacaccacgaattgcttctgccaagtggagggcagcaatggcggcgaggcgtatcttatgacagagggctccgaggagaagctaaatgtggtgaacatcaaacaactggcgaatgccttgtgccaggagaagctctgcgagagcagtttggtgcgcatcttttggccgagggaacgctgcagcctgctgcgcgacgatgtcgtctttgtggactcacctggtgtggatgtgtcggccaatttggacgactggatcgataaccattgcctgaacgccgatgtctttgtgctggtcctgaatgccgagtcaacgatgacgcgtgcggagaagcagttctttcacaccgtctcgcagaagctaagcaagccgaacatcttcatcctgaacaatcgctgggatgcgtcggccaacgagcccgagtgccaggaatcggttaagtctcagcacacggaacgctgcatcgacttcctcaccaaggagctaaaggtgagcaacgagaaggaggcggccgaaagggtattcttcgtttccgccagggaaacgctgcaggcgcgcatcgaggaggccaagggcaatccgccgcacatgggtgccattgccgagggctttcagatacgctacttcgagttccaggacttcgagcgcaagttcgaggagtgcatctcgcagagtgctgtgaaaacaaagttccagcagcacagttcgcgcggcaagagtgtttcgggtgacatgaaatcaatgttggacaacatttacgagcggatcaccatattccgcaatctgaagcaggaccagaagaacctgctcaccgaacgcatccagggcacagagacgcagatgatgcaggttacgcgggaaatgaagatgaagatccacaacatggtcgaggaggtggaggagaaggtgtcaaaggcgctgaacgaggagatctggcgcctgggcgtactcattgacgagttcaatatgcccttccatccggagcgtttggtgctgaacatctacaaaaaggaattgaatgcccatgtggagagcggcctgggcagcaatctgcgcgcccgcctatccatggccctggccatgaacgtcgagtccgcccagacggagatgaccgatcgcatgcacgccctggtgcccaacgagcagctcctggccaccagcaccaagatggtggtgcgcacgcagcccttcgagatgctctactcactgaattgccagaacctctgcgccgacttccaggaggatctggagtttaagttcagctggggcattgcggcgatgatccagcgcttcaccggcaaggtgcgcgagcgcagcaagaagggccagccggcgctggtcaatcgacagagcagtattggagtgagtttctacagtatagttgtgttgcaccacctttactatatctctgccatcgaatctcgttcacagcacagcgtatcgacgccgaccacgacgcccgtggaagccactcctgtgtgcctgctgcccgctcccgttgtggctggcattacgcccgagcagctgtcgttgatctcacgcttcgcggtgtcctccattggatcgcagggcaccgttggtggtctcgtcgtagccggtgtcatgctgaaaactatcggctggcgtgtcctggtgggcgtgggtgccctctacggctgcatctacctgtacgagcgcctctcgtggacaaattcagccaaggagcgaacgttcaagtcgcagtacgtgcgccatgccaccaagaagctcaagatgattgtcgacctcacctcggccaactgcagccaccaagtgcagcaggaattgtcgagcacctttgcccgtttgtgccgcacggttgataccgccaccacggacatgaatgatgagctcaagacgctggactcgcagctgaacatcctggaggcgaaccagaagcaattgaagctgcttcgcaacaaggccaactacatacagaacgagctggacatcttcgagcacaactatatatcgccgcagtagtggaacagtagtgggttggctgaccgtggggcaaaacactaaccagaatgtggatgatcatagaaatcaggcgaagacaaacacccaaacgactacaacaacattaatgcaccacgtatttgctgctcaactctcagtttttctctcctcttttattttattttttttgtaagaaaatgcatgatatgagccaatcgattggaacctctttattctctatcgtttaaacaaatcgttgttgttgttgagaattcttttaattcctaacatgcactactctgctagtgtgattatttagttttcttttttttgtaattgttgacccggaaacgcacgcgtatatatatatacaaatagagaagtatccaaaacactgtgagcatggccaggt

SEQ ID NO: 7485 - protein, 833 aa, DROSOPHILA
MAAYLNRTISMVTGQTGPADDDRHASSTDTVDKSGPGSPLSRFNSSLQQSGSTMAANLLPESRLYQSNDKSPLQIFVRAKKKINDIYGEIEEYVHETTTFINALHAEAEIVDKAERELFESYVYKVAAIREVLQRDHMKVAFFGRTSNGKSSVINAMLREKILPSGIGHTTNCFCQVEGSNGGEAYLMTEGSEEKLNVVNIKQLANALCQEKLCESSLVRIFWPRERCSLLRDDVVFVDSPGVDVSANLDDWIDNHCLNADVFVLVLNAESTMTRAEKQFFHTVSQKLSKPNIFILNNRWDASANEPECQESVKSQHTERCIDFLTKELKVSNEKEAAERVFFVSARETLQARIEEAKGNPPHMGAIAEGFQIRYFEFQDFERKFEECISQSAVKTKFQQHSSRGKSVSGDMKSMLDNIYERITIFRNLKQDQKNLLTERIQGTETQMMQVTREMKMKIHNMVEEVEEKVSKALNEEIWRLGVLIDEFNMPFHPERLVLNIYKKELNAHVESGLGSNLRARLSMALAMNVESAQTEMTDRMHALVPNEQLLATSTKMVVRTQPFEMLYSLNCQNLCADFQEDLEFKFSWGIAAMIQRFTGKVRERSKKGQPALVNRQSSIGVSFYSIVVLHHLYYISAIESRSQHSVSTPTTTPVEATPVCLLPAPVVAGITPEQLSLISRFAVSSIGSQGTVGGLVVAGVMLKTIGWRVLVGVGALYGCIYLYERLSWTNSAKERTFKSQYVRHATKKLKMIVDLTSANCSHQVQQELSSTFARLCRTVDTATTDMNDELKTLDSQLNILEANQKQLKLLRNKANYIQNELDIFEHNYISPQ

SEQ ID NO: 7486 - DNA, 5742 bp, DROSOPHILA
gcttccggctgagtgcacccacacagatacagataggagccagcgtcaactcatttgccactccctaatggcaaatcaatgggctgacatgcgccacagcccacgtcccagtgttccaacgttccaggaagtccagctgcccacgactacgacttctactatgggtatggctatataggagagccgcaaactgaaccatccggctgatgacacttgaatgagtttcggcgtcttttgtcgctggcatctcacgctaaattgcacatattatttatacataaggactcaactgaccataagttatgtatattagctaatcgttaaggttgcttccgctgctttatgaacttgccagccatctgacgaccacatttacccattcgatttggccttccgatgggccatcaattgctcccgcttccggagtgagtgagttttggattatggtttcagttttttgcttgggcagcgtgggtggcgtgtattgattttatatcaattagtctgtcatacgattcgaatgttcgcatactggtattttattttagaaaagccactccttgctaaatctcttaatatattagattacatttttgtttgtgcattcccaggtcgagagtccaaacaaatcatttcataattaaactcctcctgaaacagctctccatgaagttagaaattactaacgaatttggcgggaatactagtagctccccaaaatccaaaacgcacgttcatccaagagcccccaagtggcgcacaagggttgataaaaatagcaggtcacgcttctggggggcaaacttaatgcgaaggcattaggagccggtggagccaatacaattgtaacccttggcattgttatgggggcattaaattccaattacacgttaagatgccgcgttaatggccaagttaatgcacttgcactgccgttggcccgttgattcgccactgggggggcgttgatttcgcccccgaaatgacaaagcagccgaaatacattattacatttacatttattataggcatgcagtataaaatgctttgtacatgaattggtgtttgtgttaatgtcttgtgggtgagtgtttcgtgagtgttttgtgagtgtttcgtgagtgctgctccctgtgtgttgtgggttaatcttatgattggtaagtcagatgggcttagagcgaaacgagtgtataaagtcataatatgcacgcggcaattgctgtacacagctgtcattaagaactaagattatgatgaagcggttgtcgcagcgccttgtcagtggatcgaggggatcctggatctagcctaatcagtgatctaatacatagcttcaagccaagtttgcatcttgcgtttgcggcggctgcttttggtctttgcgttttcggagttgggttgcttgattgcttaaacgatgctggctggcccttgagcccatattcgaactgcagtctggttctgttaaaatcacattggttctttcacagatgtggatcctggggatctgatagatcttagtagcaacaccagctgggcctctccacctcgccgagggcgatgtgctcgatgctccacggcgccgtttccagccgccccacgccattggtcttcacgtcctcgccctccaccgccaagccaatgtccacgtagggcagacggaacgctgcatttccggagctcctggccagggcggccaccgtgtgactgaaggcagtgttggtgttggtgtaggccagcgaatcagtcgactggaaggagcgcagcgacggactcttgccctcgtctgccaggcgaaccagtccctgggcagtggatatgaacacttgctccagtccctgatccgtttcggtggaggtttcgaagtaggtggccccaatggaggtggcgaacacgaaggcctcctcccgggagaccgctcgctgcgcctgcatgtccatcttgttacccaccagcgtcagtatcatcgggtcctggacattgcggtgcagctcctgaatccacgacttgatctccgtgaatgtcttgtactgcgttagatcgaacaccagaatggcggcgttggcattcctgtagtacatgggcgccaccgcccgataccgctcctggccagctgtatcccagatctacgaggagagagagagagtgagtaagcactggttagagttcgtacgccacttgaatttaattgagtcattgcccgcttattctgcaattgccgttttattgtcgcgttttcccacagcaataacaatcatattggatgtgaaatccctgctttgggtcttttcaaggggctcctctttatgcgaatcataagcattttggggcaacgacatgttcattggcgaaactaaatcgaagcacacaaaagcttaccaaagaaacaaagagccccgcaagcgaatctaacaagcggaatacgaaaactatatcctattatgtattcatacttattgtgcgccggcgactgcttctgctggtcaactggggtcaaccgggggaaaaacaaatctgacctgtttctttcaacattctgagcaagcacttcgtccaagaaaaagtattgctttgctgaaacgctatgtgattggattaaagagcttgaattctattctactaaaaagtttcaaactttctcagtttaaagcctatccacctagctgcctgtgcatccatgttagagaaaaaacagtttggcgttgagagtaaacgtatggccattgtagtggccattgttatatggctgcgcataaaatcgggatcaccgaagagtaaatacggcagccagggccaagtgggtggtaaccctttggcaatgggcgaagctggtgctgctgctgctcctgctactactgccgctcccgtttagcttatcaataaactataaaaaaaaaggaacgagctaacaaaaaagagaataacacaaagtgcagcggacgcacaaattgcaaacaaaaaaggacaaataaagtgaccaaaacagtgggcggcggagacggcggacgagaagtacccgcggcgcagccagtggcagaataaacccagattagcgttccggcagcccagccggcaaataggattagtgggcgcgtggggcagtggcaaattcctttggctttgcctttggcttcggcttttttacgaggcaattccatttgcgttcgccccaaaagagttggtcgcactgatacatattctggctgctgtatacgcacttgcaatttaattttgacctcgtccaggatgatgttgcacgtgaagaaggacacggctatcgtgggtacctcgctttccttgcggtgcagcgtgttctttatgtagcggatgaccaaacgtgttttgcccacacctgcaagacaagaacacaaattatgcaattaatcgagagatacagcattgtctttctgtgtacccgtgagccctatttcgcttcaagcataatgccgtgcagcttatcagtgaacgtggaatggcgcacgcattaattgaccgctgattaatcacgcaaattgagccgaataaacaaaacaaaaactggagacgcactagcccgcaaaaggtggtaaacagcgataaggaatcgcctaccgaccacgagattctttgttcggcgcccacttttttgtggctcagagaagcccctctgtgtttgatcagacggggaatctccgcgtggagctgcagtatgtgcatgcactgaatcatccggcgattatgggaagaacgtatattccgaggaaagtaccgccttttttttatcaatgcgtccctttgtttggcgaaaaagcagagcaaatactgcacccgctgtgcatataagcccccttagttgaccttgggccaaacttaaatacatatactcattgcgaattcgtcagccgattacgctgcaaaaaatgtccactttgttgtgtagaagagggtagacggtggaggcttcccccttgatatgtttttggagtacaaatgtagaaatgaacaattttaagtttcggagttgtgcactacggaagccatcaaatttggcccattaacacagatttcttatcgtaaatccaaatcccaagggcaacgtcatcttgatgtgatgacatcgtgtgtggttaaattcatcggctagttcagcctaatcccaaccagacacgctgtctttgccagactctcttctgcatctacctaaatccagattgcagcatgcagcctgcagattcccaattggggccagtggagttcaaggctacggcttatcggctcaccccggttgttaatcttatcactgggcaattgatggaattactgtcattatgcggatcattgagacttctgaatggagtccgccgaatggccattgaaatcggaaacgggtggaaacgtgtgtgcttacctcgcgagcccagaacaagcactttgccctcgattccgcgcatctcgccgagattagcggctcaatcgcatcgctttccgtggactttagtgacgttttttttttttgtaaaatggatgagatgatgtgttgttggctcagtggttgttgctgctgttgttgttgttgcttgcagagccagtggttgggaagcgcgtaattggccctttggcggcctgctgcgtctgatttcttgggcacaactgaatttatcggagtcggtgggggttttcaaagcgggcgctgcgattaaaagcgcgcagtcagcagtaaagataaaagatttaataaatttgaaggcttgttgttattgtgttatgttatgcgcgaacagctgtttaccagggctgacacgaggtgcgatagttgctgctggcagcgatagctggtcttgcagagtagaatttcgcaaggaaataactttgtttcacaagtaaatatattcgtaaaaaatatatttatgtgttagtttgattggttagcaaggattccaatcaggaatatgactactagaaaaatcacgaccccgattaccgcttggaagatgccacccgatagcaaaactatcgcccatcactaattgcatttcccagacgcgttagtaccaccgccaaaagcaggcagatgttcatacaggcgattttaacaacagtgttttatagataaattaacaaattaaaggtattttaaggagctagacaacatgcattaggagctacaagctcgcgggcacaactggatactagcgataggcgtgcagcgtgcgactcgagcgcgttaaatgtccgcaaaagtcagacttctacgcgcgtttttcgcttgggtaacttagttttccccgacctgggaaaagtgccacatttccaaaaggtaaatgcactgccaagaagattaatgcggctaagataagaaaatcgtcagtgactccccgtgcttactttcacttttctctgccccgtcaatctagccattcgtcaggctccacaaactggagcagcctgtacaaaatgccgcgtgcctaaaataacttcgggctatagaagaagctataactacaacgagaaatctatttttattcgaagaatggccactattggaaacaagataaacaacagctacgaatcggagccttctacaggaagcggggtaagactaattggtgtccttgcggttgcgagcttgctgaaactttgtgttttatagtcttcgctcagtgaaaacaatgagagccacatatctgacgaggatcacatgaacttaccgtatctgatgaaaccgaaagcactgagcagccagcccatcaaggaaacccc

SEQ ID NO: 7487 - DNA, 1615 bp, DROSOPHILA
caataacaacaagccttcaaatttattaaatcttttatctttactgctgactgcgcgcttttaatcgcagcgcccgctttgaaaacccccaccgactccgataaattcagttgtgcccaagaaatcagacgcagcaggccgccaaagggccaattacgcgcttcccaaccactggctctgcaagcaacaacaacaacagcagcaacaaccactgagccaacaacacatcatctcatccattttacaaaaaaaaaaaacgtcactaaagtccacggaaagcgatgcgattgagccgctaatctcggcgagatgcgcggaatcgagggcaaagtgcttgttctgggctcgcgaggtgtgggcaaaacacgtttggtcatccgctacataaagaacacgctgcaccgcaaggaaagcgaggtacccacgatagccgtgtccttcttcacgtgcaacatcatcctggacgaggtcaaaattaaattgcaaatctgggatacagctggccaggagcggtatcgggcggtggcgcccatgtactacaggaatgccaacgccgccattctggtgttcgatctaacgcagtacaagacattcacggagatcaagtcgtggattcaggagctgcaccgcaatgtccaggacccgatgatactgacgctggtgggtaacaagatggacatgcaggcgcagcgagcggtctcccgggaggaggccttcgtgttcgccacctccattggggccacctacttcgaaacctccaccgaaacggatcagggactggagcaagtgttcatatccactgcccagggactggttcgcctggcagacgagggcaagagtccgtcgctgcgctccttccagtcgactgattcgctggcctacaccaacaccaacactgccttcagtcacacggtggccgccctggccaggagctccggaaatgcagcgttccgtctgccctacgtggacattggcttggcggtggagggcgaggacgtgaagaccaatggcgtggggcggctggaaacggcgccgtggagcatcgagcacatcgccctcggcgaggtggagaggcccagctggtgttgctactaagatctatcagatccccaggatccacatctgtgaaagaaccaatgtgattttaacagaaccagactgcagttcgaatatgggctcaagggccagccagcatcgtttaagcaatcaagcaacccaactccgaaaacgcaaagaccaaaagcagccgccgcaaacgcaagatgcaaacttggcttgaagctatgtattagatcactgattaggctagatccaggatcccctcgatccactgacaaggcgctgcgacaaccgcttcatcataatcttagttcttaatgacagctgtgtacagcaattgccgcgtgcatattatgactttatacactcgtttcgctctaagcccatctgacttaccaatcataagattaacccacaacacacagggagcagcactcacgaaacactcacaaaacactcacgaaacactcacccacaagacattaacacaaacaccaattcatgtacaaagcattttatactgcatgcctataataaatgtaaatgtaataatgta

SEQ ID NO: 7488 - protein, 261 aa, DROSOPHILA
MRGIEGKVLVLGSRGVGKTRLVIRYIKNTLHRKESEVPTIAVSFFTCNIILDEVKIKLQIWDTAGQERYRAVAPMYYRNANAAILVFDLTQYKTFTEIKSWIQELHRNVQDPMILTLVGNKMDMQAQRAVSREEAFVFATSIGATYFETSTETDQGLEQVFISTAQGLVRLADEGKSPSLRSFQSTDSLAYTNTNTAFSHTVAALARSSGNAAFRLPYVDIGLAVEGEDVKTNGVGRLETAPWSIEHIALGEVERPSWCCY

SEQ ID NO: 7489 - DNA, 3003 bp, DROSOPHILA
aagcctctcttgtaccacggacaatccttcaccttgctctgcgggtcgatgtgcaaaaagggacactctttgttgtggcaggcgttgaacctcgagtagaagtagcactcgggcatcttggtcatgtcgtactcgtgcaggaactcgcactggtcgcccttcttgcacagtcctctcagccagtgcttgcacacgatcgtccggtccccgcgaatgtgtcggaagggacaggcgctccctttgtcgcactcctgtccgttcctggtgatgaagttgcagaccgccgcaatggacttgtccatgccgtagaacggcagcgggatggcacccacctgctcgatgaggtcccgctccgccttgaactgcagcccacttacgttggccaaaaggatgtccatctctgacggattcgcggatgctcggatagatgaggaaaaactccgaaatctggtaaacaatgcagtttccttcttctttttttgcgcgtgtttgttgtttcagtgcgaatagtgctgacacgcaaccggcgttatcgatatcgatagttcgcaaggcaagacagtcatggccgtctagctgtttattagccaaatctgtccacttcagggaatagatatttgtatataaatatttttagtctccaaatgtttttaatttataagattagtcatagtaagaaaatacttgtttttatgaccttatttaactaaaccgccattaataacattttagctatttagctacaaaagtaagttgatattggtcagcactgttggcgactaaagtattacatagaaattaagtatccgccccgttagtgttgctgataaaagggcttatctacaatgaacgagccagtttcaaaaatttcacttacacaagagcaacacttgaattgcttcgaaatttaaacattaaacactgagtaaattcgataatgaaccacccccgccgccagaggccgatagtcagctggtatcgatcacttgtttacaacttttcgcaatgtttataacgtaagcaatctgcgtgaaaagccattagttaatttgggagcgaggaactgaaaaatgaggagcgagcgccgctgaagaacccaacccgaccaacaccccacgtagtccacccactccaaaggtcaaatgctgcctacttacgagcgcttcagtgatcccaaaagcgtcctcttccggcttccctttgcgcgactggcactggtggctcttagtttgcccctgggaggcttcttcttctgcgtgatttggtctctgacctttgacttcgttaggagcacctacacccactgcgatgtgaccaactatctgccctccgtctcggcggccattgggaactatgagccccaaaaaaccgtctggagactggccatatttctgcatttaccactccgtttggcagttgccaaaatctacttggagcactatcgggaacacatccgccggagcagaagattgctgggcatcctggcctgcttcttgaacgtcgtggaggatctggccctcttctgcttgtcgttttggacctctgcggatcattacgagacccacagaaacgcatttgtggtgttcattgcgtgttccgagtgctatatgctggtttcctacctgctgaacaggaatatacagaagaccgtgctcttgccgcacgaggagaagtcgctgaggtacaagagaaatctgttcttggtgaatgtgatcgcctttggcttggcaggatactgcttcgtgaggcacaactcgcattgcgaggcgggaggtgagtgggaatcggttgtgagtccactattgtcttataatgaatcttttctatccacagtctatactttcttcgcgttgttcgagtacatcgtggtgctgaccaacatggggttccacatgacctcctactgggacttctacgccctgaatgtggtgtgtgatgccaagcacggtctctacctatcacaatcgtagaccaatgaactagatcaaacccagcctgcgccgccatttcagccagccagtcgtcctcgagtattgtgtacatacgcggtattagcttaagctcaatgtttacttaattttaccaaaaggaaattgcttacgagggattccgagaggagacgattcagtatgacaggatctgatgcatacacacgcttttagctttaggctctaacacgattttacacctaaaggatctagttaaattcgaaccgagttccatcattatgtagtgcattatttatacacatactcatttaggaacaaggcttcaataaggttttattttatacgtactgaatttgcttttattggcttctaatgttctaattcattattttgtaagtctaaaattgtatttattagaattcagataaattaactttttaattgcttccaattgtttggtgtacttttaatcaactcctaatatttaataccaaccaaatttaagaattattgagattgaactgtcttagttttatgtgtcattgttcgagtgcctcactttgtctggagggataacagaaagtgtaagattgtctgaccgacttgtcctaggattaacctgctcttaaatgctgcactttgtggaggatcaagccaagctgttgcccagctccatcaaggatttgcaggcgaggcggcatttccgcatcccagttggtccgattctcgcactggggcttctgcaattgcccgtctgcatggtgtacaacctggtgatggccatcaccacggacttccagtccaccacgtataccacctgtaatgccttcaacatctttccctccacatcggcggctgccaagtctcagcacaaagtgtgggctctggcttgctacctggagttcccatttctcattgccagtgcatggctgcagttccgattctatcggaggaatctgcgcaggccggtccgaggtttcggctgcctgatggccatcattatggctgtcagtagttccagcgtactgctatggggcaccttcccccaagagga

SEQ ID NO: 7490 - DNA, 1003 bp, DROSOPHILA
tcgcaatgtttataacgtaagcaatctgcgtgaaaagccattagttaatttgggagcgaggaactgaaaaatgaggagcgagcgccgctgaagaacccaacccgaccaacaccccacgtagtccacccactccaaaggtcaaatgctgcctacttacgagcgcttcagtgatcccaaaagcgtcctcttccggcttccctttgcgcgactggcactggtggctcttagtttgcccctgggaggcttcttcttctgcgtgatttggtctctgacctttgacttcgttaggagcacctacacccactgcgatgtgaccaactatctgccctccgtctcggcggccattgggaactatgagccccaaaaaaccgtctggagactggccatatttctgcatttaccactccgtttggcagttgccaaaatctacttggagcactatcgggaacacatccgccggagcagaagattgctgggcatcctggcctgcttcttgaacgtcgtggaggatctggccctcttctgcttgtcgttttggacctctgcggatcattacgagacccacagaaacgcatttgtggtgttcattgcgtgttccgagtgctatatgctggtttcctacctgctgaacaggaatatacagaagaccgtgctcttgccgcacgaggagaagtcgctgaggtacaagagaaatctgttcttggtgaatgtgatcgcctttggcttggcaggatactgcttcgtgaggcacaactcgcattgcgaggcgggaggtgagtgggaatcggttgtgagtccactattgtcttataatgaatcttttctatccacagtctatactttcttcgcgttgttcgagtacatcgtggtgctgaccaacatggggttccacatgacctcctactgggacttctacgccctgaatgtggtgtgtgatgccaagcacggtctctacctatcacaatcgtagaccaatgaactagatcaaacccagcctgcgccg

SEQ ID NO: 7491 - protein, 275 aa, DROSOPHILA
MLPTYERFSDPKSVLFRLPFARLALVALSLPLGGFFFCVIWSLTFDFVRSTYTHCDVTNYLPSVSAAIGNYEPQKTVWRLAIFLHLPLRLAVAKIYLEHYREHIRRSRRLLGILACFLNVVEDLALFCLSFWTSADHYETHRNAFVVFIACSECYMLVSYLLNRNIQKTVLLPHEEKSLRYKRNLFLVNVIAFGLAGYCFVRHNSHCEAGGEWESVVSPLLSYNESFLSTVYTFFALFEYIVVLTNMGFHMTSYWDFYALNVVCDAKHGLYLSQS

SEQ ID NO: 7492 - DNA, 8011 bp, DROSOPHILA
tttaaacgccttccaaaataatttcgccatatgatgccaaatggttgaaaacaccatacctggccgcaattatctattggactaaccttgtctaaattggccacaattcggcttatctgacttgctaaataacattttgatagcacacgtatatacatatattttattttagtgccgttatgggcaattcgagtgcttacaactgtcgattagattgcagatgagatccctttggaaattttttgttttccaaatcgttttgcttggagacactaccctctttgaaatacttttcaactgaaatggtgaaataccgacaaaccattgcaaaagaagtttaccatgccccacgatatctcaaaatctgaaaacaacattatttgtattttatcacaccaagtagtgtgatatatttggattggggaagtcgccgctgggcagcgtaagaatgccgctaccacgcttaagcatccaggtatttcacggcacacctgagcggcggtatgaatcatgactttcgcacgcgatacagatacagatttcctctcggttagtcccccgatctggcgaattcagcttaaaatcttttgcgcggggaaaaccatgcgcgcaaatggattacgcttagtccgtttttgttttggccaaaaaagacccgactccactgcatctatggacacgctgggtcagtaaacaaataccggttacgagagactgataacaaacttacgccgaatcgatggtatgtacgtacaacataactgtctaatcaatctaatctgcatcgtctttatggctctgttttggttacaggaccagcgactaggaaccagtatttcccgccgcctggacgagtgcgaggaacaggcgggttgccaggcgggaatcccgattagttatacgatcgactttgttgccgctcgagaaccgagagccgagattctggcaccgagctgtcgtcgcaaccattcgattttgtgttagtccagttcagatcgcgcactcgtcggctgcagacgtcttcttgagcacttcccagtgccaatagagccagaggaaatatagatatatgtatatatatacatatataaagtcttcagacgatcgcgagtttcatcagtttgccaagtgtccacggaagatcggcacgtgctaagtaagtgccatgtagcgcaagtgaatttccattaattgattcagtttctcgatgcattcgatgagtgcgtttcgtcgacaagtgaataagattgaatcgaatctgagtagctgaggagtgggctattatacccagttccttggatcttgagtgcaagccgttcgcaattgacaatcgcaatcaacacacaaatatctcgctttccaattgcgcttaatttattaatttatgtacgcttgtttttcattcgcgcaatcgagctaatttccttaaattgacttgggaaaattgtttttgctgattaatcagccctttgctctgcgtcgaataatttctacaatatattttatgtaacacgtaaagatacattaattatcacacacttaagcgtcataattgctaccatttttatcaacattagttattttaatggtattataattacgtgtttccaagatgttgagatacattgatttccatttaattaagtgcaagaaaagtgcaagtatttcttgttaagaaaaaacgaatgtcaaactattattataaaatagtggcaatgcaagaagataaagttctagaaatttatttcataacattatgttaaatctgagcctgaattctttgaagagttgaaatattttttaaaattcaatcatacttttgttaatctccccagtaactttcctgggataacatgtttgccttaagagcactgaactctttttgtgaattagaattaagaagatagtaattaggcttttatagtcgagtttgcagataaaaagcgagagcaactgggtgtgtttgtggttctcgtggttaagttctttaattgatacactctaaattatagaccccaatttagagcttagatatcaggccagcacacaaaatgttgtgtttactaattgttaactttgttcttaggcttaattgctatagcgagtatagagatactttactgcagtatcgcctcatagacacaatggtcaagaaggaggaatcacggctgccacaagctggtgactttcagcttaaggaaggatcagtcgtggatgcgacccgaaagtacagttactttgatctggtgagtggtgactccgcatcagcatcgttataggttctatatcctttttggtctcgcctctatagttcagatactcaaccagatgcgagcgcttcctgttggtagtcagtctgctggtggccaccgctgcgtccgcatttattccctacttcatgattatctacggagagttcacatccctgctcgtggaccgaacagtcggcgtgggcacatcctcgccagcctttgctctgcccatgtttggtggcggtcagcaattgtaagttcttaatcataagatagtccaggattatgttataacgtcaaattttcgttcaggacaaatgccagcaaagaggagaacaaccaggcgatcattgatgatgcgactgcctttggcattggcagtctggtgggatctgtggccatgttcctgctcatcacactggccatcgacttggccaaccggatagccctcaaccaaatcgatcgcatccgaaagctcttcctggaggcaatgctgcgacaggacatcgcctggtacgacaccagttcgggctccaacttcgccagcaaaatgacagagtgagtttcgtctcaaataatataattattaataagcgtataatccgaatcttattgcattaaacaaattataaaaaccatatcaattgaatattcattagcagagctagaaaattacgcaatcatagtagcaatcggacttattaacatcaatatggtttaaatatgattgaaacaatttatcactatcgcgattcccagacaattttaggaagccacctgaaagtttttaaataaattaaatatctcatgccagtgacgtgaactttttttgtgcgaattttacaatgtatttattcaaattccttttaattctagaattaaattctaaagactttagagtatttttataactcctcgatttttttctttggaatttgcagagacctggacaaactgaaggaaggcattggcgagaaaatagtgattgtggtattcctgatcatgacctttgtgattggaatagtgtctgctttcgtctacggatggaagctcaccctggtcgttctgagttgtgtgcccttcatcattgcagccaccagtgtggtggctcgactccagggatcgctggccgagaaggagctgaagtcctactccgatgcagccaacgtggtcgaggaggtattcagtggaattcgcacagtgttcgcattcagtggtcaggagaaggaaaaggaacgctttggcaagctgctcattcccgcagagaatacgggtcgcaagaagggtctatactcgggcatgggaaacgcactgtcctggctgatcatctacctgtgcatggctcttgccatctggtatggtgtgacgctcattctggacgagcgtgatcttcccgatcgcgtttatactccggccgttctggtcattgtcctgttcgccgtgatcatgggtgcccagaatctcggttttgcctctccacacgtggaagccattgctgtggccacggcagctggccagaccctgttcaacatcatcgatcgtccgtcgcaggtggatccaatggacgagaagggaaacaggccggagaataccgctggacacattcgtttcgagggcatacgcttccgttaccccgcccgtccggatgtggagatcctcaagggtctgaccgtcgatgtgcttccgggtcagacggtggccttcgtgggcgcatctgggtgtggcaagagcaccctcatccaactgatgcagcggttctacgaccccgaagcgggcagtgtcaaactggatggacgggatcttcgaacactgaatgtgggctggttgcgttcgcagatcggagtggtgggccaggaaccggttctcttcgccaccaccattggcgagaatatccgatacggaagaccatcggccactcaggcggatatagagaaggcggcgcgagcggccaactgtcatgatttcatcactcgcctacccaagggctacgacacccaggtgggcgagaagggcgctcagatttctggtggccagaagcagcggattgccattgcccgggctttggttcgacagccccaagtgcttcttctcgacgaggccacctctgccctggatcccacctctgagaagcgggtgcaaagtgccctagaactggccagccagggaccaaccactctagttgtggcccaccgactgtccaccatcaccaatgccgacaagattgtcttcctcaaggacggtgtagtggcggagcagggtacgcacgaggagctcatggagcgacgtggtctctactgcgaactggtgagcatcacccagcggaaggaggccacggaggcggacgagggagcggttgccgggcgacctctgcagaagtcgcagaacctgtctgacgaggaaaccgatgatgacgaggaagatgaagaggaggacgaagagccggagctgcagacttcgggcagctccagggacagcggattcagagccagcacgcgacgcaagcgtaagtaccagaagttggaatatttaatgcttttactaacccaagtaccaagacttaaattcgatattaagtaaagaaaataagtaataaaaacaaatgcaaaattaaaagttctataaaatcgtgcactatattatatatattaactttaaaatccaattcaaataattaacaggtcgctcgcagcgtcgcaagaagaagaaggacaaggaagtggtatccaaggtgtccttcactcaactaatgaagcttaattctccggagtggcgtttcattgtcgtcggaggcattgcatccgtaatgcatggcgccacattcccgctttggggtctcttctttggcgacttctttggaatcctctcggacggtgacgatgacgttgtgcgagccgaggtcctgaaaatctccatgatctttgtgggcattggcttgatggccggattgggcaacatgctccagacctacatgttcacaacggccggcgtgaagatgacaacgcgattgcgtaaaagggcttttggaacgattattggtcaggatattgcctacttcgatgacgagcgaaattcagtgggagcactgtgctcccggctggccagcgattgttccaacgttcagggtgtaagtttcaagattgagggtaaccatgcagaagcactgctattccaagctactgctttttactatatatgtttaaatatctaacgctttttccttattccaggcaaccggagctcgtgtgggcacaatgctccaggccgtggccactcttgtggttggaatggtcgtcggtttcgttttctcctggcaacagacgctcctcacactggtcaccctgcccctggtctgtttgtccgtctacttggagggccgttttatcatgaagagcgcccagaaggctaaggcgtcgatcgaggaggcttctcaagtggcagtcgaagctattaccaatatccgaacggtcaatggtctttgcctagagcgccaggtcttggatcaatacgttcagcagatcgatcgcgtggatatcgcctgcaggcgtaaggttcgcttccgtggtctggttttcgctttgggacaggcggctcctttcctggcttacggcatctccatgtactatggtggtattctggtggcagaggagcgaatgaactatgaggacatcatcaaggtggccgaggctctgatctttggctcctggatgttgggacaggccctggcctacgcgccaaatgtaaacgatgctattctgtccgccggacgcctaatggatctcttcaagcgcacctcaacgcagcccaatccgccacagagtccctacaatacagttgaggtaagtcaacatttcgccaatcgaaaccgtacattatgttggaaactcaaatttgattgtttttttttagaaatccgagggagacattgtctatgaaaacgtgggcttcgaatatcccaccaggaagggcactcccattctgcagggcctaaatctcaccatcaagaaatcgacgacggttgctctggtgggtccatctggttccggcaagtccacctgcgtgcaactgctgcttcgctactacgatcccgtatcgggatccgtgaatctgagcggagtgccgagcacggaattcccgttggacacactgcgctccaagctgggcctggtctcgcaggaacccgtgctcttcgatcgcaccattgccgagaacatagcttatggcaacaatttccgtgacgatgtgtccatgcaggagattattgaggcggccaagaagtcgaatatccacaactttataagtgctttgccccaaggctacgacacccgactgggcaagacatcgcagctctctggaggtcagaagcagcgcatcgccatcgctcgagccctggttagaaacccgaagatactcatcctggacgaggccacctctgcgctggacttggagagcgagaaggtggtgcaacaggcgctggatgaggcgagatcaggccgcacatgcctgacgattgcgcatcgtctgaccaccgtgcggaatgcggatctcatctgtgtgctaaaacgcggcgtggtagtggagcacggcacccacgatgagttgatggcactgaacaaaatctacgccaatctctatctgatgcaacaggtgtcgggctaacacagcgaactggagtgataattgttaggctttaatttagtatgtacactaggctaattgaacatgttgaagtattacaaaaaaaatagaatgattaggccaactactacagtcgactgtctaccaggggtccgggattggccagggcgttacgtctctcctgaatggcgaaggtgagtttacggaatggccccagtggcaagccaagtgacttaaggtccgattctgtgagcagcatcagagtctccaagtcgatctcttgcttctgaaatctgaaatggtaaaggaggatacgagttgaatacacatacattccagacaaatttggttttgttactcacactggcaggtattcttccagggcccaaacggccaggaatcgctgcaaggcacttcctccggcatctcggtcgtcgtcgtcatcatcgctatagatgtcatgaccgccgccctccgagtccgtatcatccgaaaggttcaaatataaacgaccctttcctccgccatttcgtgtctttggaggattgctgcccgcattccgcatcgtggaagtggaactggtgtccgtgtgcagttgaagctgacttaaagcagcagttacggatcgacgaaaggcaatgctgcccagcatggtgggtctatcgaagagtccaacgggtctctggagggtcacttcctcgcttagttcctgggtcaactgaccatcccccagaatatccggttgggagaaggaacgcgctaaagtagagctatagccactgcggttatcgctgtggtccaactcatcggcctccatgcactcaaaaacatcgctgatcttgccgcgcttgccgacactgtcctcgttggaactaaaggtgcccacatacagcacctcggagtctctctgcagacccgtaagcgatgtaatggttcgctttccatctggctccacctcgcgcaccttgaagccaccgtctgtgtcgctggatatcttcgagtgtggacatgtgctgctgtgctgcttttggagctgcgacggtctcttttgcaccgttcccgctcgactggctattgtggagccaccgctgctgctgctaccgttcccaaccagatcgctgaac

SEQ ID NO: 7493 - DNA, 4157 bp, DROSOPHILA
cactcgtcggctgcagacgtcttcttgagcacttcccagtgccaatagagccagaggaaatatagatatatgtatatatatacatatataaagtcttcagacgatcgcgagtttcatcagtttgccaagtgtccacggaagatcggcacgtgctaagcttaattgctatagcgagtatagagatactttactgcagtatcgcctcatagacacaatggtcaagaaggaggaatcacggctgccacaagctggtgactttcagcttaaggaaggatcagtcgtggatgcgacccgaaagtacagttactttgatctgttcagatactcaaccagatgcgagcgcttcctgttggtagtcagtctgctggtggccaccgctgcgtccgcatttattccctacttcatgattatctacggagagttcacatccctgctcgtggaccgaacagtcggcgtgggcacatcctcgccagcctttgctctgcccatgtttggtggcggtcagcaattgacaaatgccagcaaagaggagaacaaccaggcgatcattgatgatgcgactgcctttggcattggcagtctggtgggatctgtggccatgttcctgctcatcacactggccatcgacttggccaaccggatagccctcaaccaaatcgatcgcatccgaaagctcttcctggaggcaatgctgcgacaggacatcgcctggtacgacaccagttcgggctccaacttcgccagcaaaatgacagaagacctggacaaactgaaggaaggcattggcgagaaaatagtgattgtggtattcctgatcatgacctttgtgattggaatagtgtctgctttcgtctacggatggaagctcaccctggtcgttctgagttgtgtgcccttcatcattgcagccaccagtgtggtggctcgactccagggatcgctggccgagaaggagctgaagtcctactccgatgcagccaacgtggtcgaggaggtattcagtggaattcgcacagtgttcgcattcagtggtcaggagaaggaaaaggaacgctttggcaagctgctcattcccgcagagaatacgggtcgcaagaagggtctatactcgggcatgggaaacgcactgtcctggctgatcatctacctgtgcatggctcttgccatctggtatggtgtgacgctcattctggacgagcgtgatcttcccgatcgcgtttatactccggccgttctggtcattgtcctgttcgccgtgatcatgggtgcccagaatctcggttttgcctctccacacgtggaagccattgctgtggccacggcagctggccagaccctgttcaacatcatcgatcgtccgtcgcaggtggatccaatggacgagaagggaaacaggccggagaataccgctggacacattcgtttcgagggcatacgcttccgttaccccgcccgtccggatgtggagatcctcaagggtctgaccgtcgatgtgcttccgggtcagacggtggccttcgtgggcgcatctgggtgtggcaagagcaccctcatccaactgatgcagcggttctacgaccccgaagcgggcagtgtcaaactggatggacgggatcttcgaacactgaatgtgggctggttgcgttcgcagatcggagtggtgggccaggaaccggttctcttcgccaccaccattggcgagaatatccgatacggaagaccatcggccactcaggcggatatagagaaggcggcgcgagcggccaactgtcatgatttcatcactcgcctacccaagggctacgacacccaggtgggcgagaagggcgctcagatttctggtggccagaagcagcggattgccattgcccgggctttggttcgacagccccaagtgcttcttctcgacgaggccacctctgccctggatcccacctctgagaagcgggtgcaaagtgccctagaactggccagccagggaccaaccactctagttgtggcccaccgactgtccaccatcaccaatgccgacaagattgtcttcctcaaggacggtgtagtggcggagcagggtacgcacgaggagctcatggagcgacgtggtctctactgcgaactggtgagcatcacccagcggaaggaggccacggaggcggacgagggagcggttgccgggcgacctctgcagaagtcgcagaacctgtctgacgaggaaaccgatgatgacgaggaagatgaagaggaggacggtcgctcgcagcgtcgcaagaagaagaaggacaaggaagtggtatccaaggtgtccttcactcaactaatgaagcttaattctccggagtggcgtttcattgtcgtcggaggcattgcatccgtaatgcatggcgccacattcccgctttggggtctcttctttggcgacttctttggaatcctctcggacggtgacgatgacgttgtgcgagccgaggtcctgaaaatctccatgatctttgtgggcattggcttgatggccggattgggcaacatgctccagacctacatgttcacaacggccggcgtgaagatgacaacgcgattgcgtaaaagggcttttggaacgattattggtcaggatattgcctacttcgatgacgagcgaaattcagtgggagcactgtgctcccggctggccagcgattgttccaacgttcagggtgcaaccggagctcgtgtgggcacaatgctccaggccgtggccactcttgtggttggaatggtcgtcggtttcgttttctcctggcaacagacgctcctcacactggtcaccctgcccctggtctgtttgtccgtctacttggagggccgttttatcatgaagagcgcccagaaggctaaggcgtcgatcgaggaggcttctcaagtggcagtcgaagctattaccaatatccgaacggtcaatggtctttgcctagagcgccaggtcttggatcaatacgttcagcagatcgatcgcgtggatatcgcctgcaggcgtaaggttcgcttccgtggtctggttttcgctttgggacaggcggctcctttcctggcttacggcatctccatgtactatggtggtattctggtggcagaggagcgaatgaactatgaggacatcatcaaggtggccgaggctctgatctttggctcctggatgttgggacaggccctggcctacgcgccaaatgtaaacgatgctattctgtccgccggacgcctaatggatctcttcaagcgcacctcaacgcagcccaatccgccacagagtccctacaatacagttgagaaatccgagggagacattgtctatgaaaacgtgggcttcgaatatcccaccaggaagggcactcccattctgcagggcctaaatctcaccatcaagaaatcgacgacggttgctctggtgggtccatctggttccggcaagtccacctgcgtgcaactgctgcttcgctactacgatcccgtatcgggatccgtgaatctgagcggagtgccgagcacggaattcccgttggacacactgcgctccaagctgggcctggtctcgcaggaacccgtgctcttcgatcgcaccattgccgagaacatagcttatggcaacaatttccgtgacgatgtgtccatgcaggagattattgaggcggccaagaagtcgaatatccacaactttataagtgctttgccccaaggctacgacacccgactgggcaagacatcgcagctctctggaggtcagaagcagcgcatcgccatcgctcgagccctggttagaaacccgaagatactcatcctggacgaggccacctctgcgctggacttggagagcgagaaggtggtgcaacaggcgctggatgaggcgagatcaggccgcacatgcctgacgattgcgcatcgtctgaccaccgtgcggaatgcggatctcatctgtgtgctaaaacgcggcgtggtagtggagcacggcacccacgatgagttgatggcactgaacaaaatctacgccaatctctatctgatgcaacaggtgtcgggctaacacagcgaactggagtgataattgttaggctttaatttagtatgtacactaggctaattgaacatgttgaagtattacaaaaaaaatagaatgattaggccaa

SEQ ID NO: 7494 - protein, 1279 aa, DROSOPHILA
MVKKEESRLPQAGDFQLKEGSVVDATRKYSYFDLFRYSTRCERFLLVVSLLVATAASAFIPYFMIIYGEFTSLLVDRTVGVGTSSPAFALPMFGGGQQLTNASKEENNQAIIDDATAFGIGSLVGSVAMFLLITLAIDLANRIALNQIDRIRKLFLEAMLRQDIAWYDTSSGSNFASKMTEDLDKLKEGIGEKIVIVVFLIMTFVIGIVSAFVYGWKLTLVVLSCVPFIIAATSVVARLQGSLAEKELKSYSDAANVVEEVFSGIRTVFAFSGQEKEKERFGKLLIPAENTGRKKGLYSGMGNALSWLIIYLCMALAIWYGVTLILDERDLPDRVYTPAVLVIVLFAVIMGAQNLGFASPHVEAIAVATAAGQTLFNIIDRPSQVDPMDEKGNRPENTAGHIRFEGIRFRYPARPDVEILKGLTVDVLPGQTVAFVGASGCGKSTLIQLMQRFYDPEAGSVKLDGRDLRTLNVGWLRSQIGVVGQEPVLFATTIGENIRYGRPSATQADIEKAARAANCHDFITRLPKGYDTQVGEKGAQISGGQKQRIAIARALVRQPQVLLLDEATSALDPTSEKRVQSALELASQGPTTLVVAHRLSTITNADKIVFLKDGVVAEQGTHEELMERRGLYCELVSITQRKEATEADEGAVAGRPLQKSQNLSDEETDDDEEDEEEDGRSQRRKKKKDKEVVSKVSFTQLMKLNSPEWRFIVVGGIASVMHGATFPLWGLFFGDFFGILSDGDDDVVRAEVLKISMIFVGIGLMAGLGNMLQTYMFTTAGVKMTTRLRKRAFGTIIGQDIAYFDDERNSVGALCSRLASDCSNVQGATGARVGTMLQAVATLVVGMVVGFVFSWQQTLLTLVTLPLVCLSVYLEGRFIMKSAQKAKASIEEASQVAVEAITNIRTVNGLCLERQVLDQYVQQIDRVDIACRRKVRFRGLVFALGQAAPFLAYGISMYYGGILVAEERMNYEDIIKVAEALIFGSWMLGQALAYAPNVNDAILSAGRLMDLFKRTSTQPNPPQSPYNTVEKSEGDIVYENVGFEYPTRKGTPILQGLNLTIKKSTTVALVGPSGSGKSTCVQLLLRYYDPVSGSVNLSGVPSTEFPLDTLRSKLGLVSQEPVLFDRTIAENIAYGNNFRDDVSMQEIIEAAKKSNIHNFISALPQGYDTRLGKTSQLSGGQKQRIAIARALVRNPKILILDEATSALDLESEKVVQQALDEARSGRTCLTIAHRLTTVRNADLICVLKRGVVVEHGTHDELMALNKIYANLYLMQQVSG

SEQ ID NO: 7495 - DNA, 3871 bp, DROSOPHILA
cgtcatttcctcaatcatttctagatccccacctattgaaatgacgtcgtcgttttgatcttcgtcgtcaagggcagttggctcggctgcactcggcttctttggctctgcagggggattagctgggagagcttcttccgacggtggttccttatcccctgttttatctagcttatcagacgtatccgatacttctggcttattactttccagttctttcgaaatagctgctgcttctgactctgttggctcatctggattggctgggtcaactaccttagctggctcttcgggttcatcgcgcacttctccctcctctggctcgctctcaacgactggggctggtgggtccgattcgacttgcttagttgtagttgtttcagttgtcttctttttggtggcctcatcatccgtactgtcgctgatcagcagtgtttcgggttccgtttgtataggtatcacatctggtgaggctgaacgtgatttggaacgtggcagtttgtttaaatcgttagatgcaaccaaagtttcggatgaagtagtagatgttggaggtttgacttccttttctggcgactttgaagtccgcctatagtttcttttgatcttgattcttttgcggggcgcttcctgctccttgctgctgctatcaggctgggatggagatgttggtctagctgattcctgcgatttgcgcttgctcgaatccgtttttttagtgctgcgtttatccttttcctttcgctgtactttctccactggtacttcgtcaatatcatcatctgacttgacctctattttggtgattggctccattgccagttgggagcggatggccctggcacgtgcctgaagttccaacagttccagcacgctcatttgaccacccgctgtgggagaaaagaataccttagtaacctgaacaaatttgccgtcaaacgggcgcacagtctcagatggctgttgttatcatactttcggtcgatttcgattagtttttatacattcgtaaagtttgtacttacactctttgttttcattcccattgttcgttttcttggatctaagcttcttcttggctgaaaatcagacaagattgacacagattgcattacaaattgtgctaaagtatacataaattaactgcacgccaggatgccgatcaaccagaaagaagtaacgccgcaactagacagtcagacaggtgaggatcagggggaggaggaggagcagccggaagacgagaatcgtctggagaagtttacggtgcgtcttaatggacaacatgacctggagcagcgtttaaaggatttcaaagcggcatgcgaggctcacgagaagcacgccagacggcgaaaacggaagagatactatcatttgggtcttgtggccaagctggtgacggaaaccactcacgacgagctgcgacgtatgctggaaaatggaacctacacctttcacgtggatacggtgggcaacaagcccgatgaactgaaagccattttggacaccatgaacattgcgatatcggcgcattctgcagagagggaactacgtctgacaactggcttggctctggagattaacggcgagtgctgtcgcgttgggagactgaggaacaactgcaccgtgatgctggcacgaggtggggtggtcacactcaccacggatgagtcctaccgctacaaaggctttaaagaaatagtgtacgtaatcaatctgcggtgttatctcgcctccgttcagttgggcgatattgtgatgatcggacgtgaagttagaggtaaggtggtgaagaccctgcgggaagcactaaccgtgatgatcatagatgccggtctggtagcctcctacgactttatagagcttcctagacagtgccacgctctcgatccggacctatatcccgatctgtacatgaaggaccttgagatggccgcgtctttgaatgccaactatgtggttctgcccaagatacgatgcaagagctttcttcgtgccgtgcggcagaccttgaactcggacttcaaccttaagttgatcggaatgatagatttcgagtatgtgcgaagtaacatgcttgatttgctaggcatcattaagcttgtggactacatttggatacccgacatgttcaacgtaaactgttgcgtatataactacattatggaggacgtgcttccgatttcgcagtgccagaagaagccagtcattggcactgttccgctggagcgttgcagtgattttaagcgatttgagttgcacgatttcctgtggaaggtcgacgctattcacatccaaaaaagtccatggtgcaacaaatatccgctgatagtcaaaaagctgatgcccataaaagattatcgtgttggcgcggtccagaataagatggtactgaagagcatcctaacctcataccagaccattgtgaattttattatccgcacaattagctcgattgagtgtcaagccatatttttgttcaccacttgcgagaccgccagcgtggccctttcgcgtattgagatctattgcccagtatatgtgatggtgccgctggaggagacagatgatgcggaaaccattacctgcaaggtggagctcgctcgtgcgcttcatttgcgccgtaacatgcacccggttctttacaccaaggatctcaacgagtgcagctacagtccgattgagtttggagtggactttatgaggaagaagggctgcttggaggttggagactttgtagttaccctggaggtgggcaaagaggataaggataacgtggtcatcggcataggagaggatgtttgcatcctgcgggcattttacgtgtcgccgctctttgcctgcgagaagtttaagtacggtggataactttacggcgtgcagttgtgcagattacacagataataaactctaaattaaatgtatcttatgccaccaactcactttttcgggattcctgacctccgatgtcgctgtcggatgatatctcctctagcgagatgtgttctgaaatgagactttataatgaatggtgggtttatagggcaaggaagtgattcaacataccttctttgtgctccacatcggaatcttcggagctttcagtgtctgtgggacatttggtgttttctattatggattttagccgcttcgtagacaagcagagtaactcctccagacaaagttcctcgatttcgtctagtggcgttttctgcgtgaaattattgataaatagctttttataaaaagaactataacacacctttagaaactctggggctaggttcaaaatggttttcggttttaaggtcccaaatatctgtttcaccaattccaggcggtcgtctatgtaatgggacatgggatgcagctttcgttcctcctcgatcttctccttcttaatgctaatgggcttggggatttggtcgcccttgctggattttttcgccttcaagccactcattttatccaatttgttgtcaaaataaaaaccaagtaatttcggtctttcgggcagcgttgccactactatttataccttgtggacagtgggacgaaggcaacaattttgtgggattagtgtgaatggctctattttaaaattcaaaacgcaaagaaaaacgagcagtattacgaaaatgtatttaataaaaattatttcgtatactagggaatggcacatagaatcaataattaaaaatgtacaatggtgtatattgcctttaggactgtattatccactgtgcgctgttgttaacagtgttattgttttttgtacagaacagctgattatcaagcggtgtaggttgaattaaattgtgggagtgttagttgtcttaaaattgttaaggtaagttgatgtattaat

SEQ ID NO: 7496 - DNA, 1871 bp, DROSOPHILA
atacattcgtaaagtttgtacttacactctttgttttcattcccattgttcgttttcttggatctaagcttcttcttggctgaaaatcagacaagattgacacagattgcattacaaattgtgctaaagtatacataaattaactgcacgccaggatgccgatcaaccagaaagaagtaacgccgcaactagacagtcagacaggtgaggatcagggggaggaggaggagcagccggaagacgagaatcgtctggagaagtttacggtgcgtcttaatggacaacatgacctggagcagcgtttaaaggatttcaaagcggcatgcgaggctcacgagaagcacgccagacggcgaaaacggaagagatactatcatttgggtcttgtggccaagctggtgacggaaaccactcacgacgagctgcgacgtatgctggaaaatggaacctacacctttcacgtggatacggtgggcaacaagcccgatgaactgaaagccattttggacaccatgaacattgcgatatcggcgcattctgcagagagggaactacgtctgacaactggcttggctctggagattaacggcgagtgctgtcgcgttgggagactgaggaacaactgcaccgtgatgctggcacgaggtggggtggtcacactcaccacggatgagtcctaccgctacaaaggctttaaagaaatagtgtacgtaatcaatctgcggtgttatctcgcctccgttcagttgggcgatattgtgatgatcggacgtgaagttagaggtaaggtggtgaagaccctgcgggaagcactaaccgtgatgatcatagatgccggtctggtagcctcctacgactttatagagcttcctagacagtgccacgctctcgatccggacctatatcccgatctgtacatgaaggaccttgagatggccgcgtctttgaatgccaactatgtggttctgcccaagatacgatgcaagagctttcttcgtgccgtgcggcagaccttgaactcggacttcaaccttaagttgatcggaatgatagatttcgagtatgtgcgaagtaacatgcttgatttgctaggcatcattaagcttgtggactacatttggatacccgacatgttcaacgtaaactgttgcgtatataactacattatggaggacgtgcttccgatttcgcagtgccagaagaagccagtcattggcactgttccgctggagcgttgcagtgattttaagcgatttgagttgcacgatttcctgtggaaggtcgacgctattcacatccaaaaaagtccatggtgcaacaaatatccgctgatagtcaaaaagctgatgcccataaaagattatcgtgttggcgcggtccagaataagatggtactgaagagcatcctaacctcataccagaccattgtgaattttattatccgcacaattagctcgattgagtgtcaagccatatttttgttcaccacttgcgagaccgccagcgtggccctttcgcgtattgagatctattgcccagtatatgtgatggtgccgctggaggagacagatgatgcggaaaccattacctgcaaggtggagctcgctcgtgcgcttcatttgcgccgtaacatgcacccggttctttacaccaaggatctcaacgagtgcagctacagtccgattgagtttggagtggactttatgaggaagaagggctgcttggaggttggagactttgtagttaccctggaggtgggcaaagaggataaggataacgtggtcatcggcataggagaggatgtttgcatcctgcgggcattttacgtgtcgccgctctttgcctgcgagaagtttaagtacggtggataa

SEQ ID NO: 7497 - protein, 571 aa, DROSOPHILA
MPINQKEVTPQLDSQTGEDQGEEEEQPEDENRLEKFTVRLNGQHDLEQRLKDFKAACEAHEKHARRRKRKRYYHLGLVAKLVTETTHDELRRMLENGTYTFHVDTVGNKPDELKAILDTMNIAISAHSAERELRLTTGLALEINGECCRVGRLRNNCTVMLARGGVVTLTTDESYRYKGFKEIVYVINLRCYLASVQLGDIVMIGREVRGKVVKTLREALTVMIIDAGLVASYDFIELPRQCHALDPDLYPDLYMKDLEMAASLNANYVVLPKIRCKSFLRAVRQTLNSDFNLKLIGMIDFEYVRSNMLDLLGIIKLVDYIWIPDMFNVNCCVYNYIMEDVLPISQCQKKPVIGTVPLERCSDFKRFELHDFLWKVDAIHIQKSPWCNKYPLIVKKLMPIKDYRVGAVQNKMVLKSILTSYQTIVNFIIRTISSIECQAIFLFTTCETASVALSRIEIYCPVYVMVPLEETDDAETITCKVELARALHLRRNMHPVLYTKDLNECSYSPIEFGVDFMRKKGCLEVGDFVVTLEVGKEDKDNVVIGIGEDVCILRAFYVSPLFACEKFKYGG

SEQ ID NO: 7498 - DNA, 3594 bp, DROSOPHILA
tgataaatagctttttataaaaagaactataacacacctttagaaactctggggctaggttcaaaatggttttcggttttaaggtcccaaatatctgtttcaccaattccaggcggtcgtctatgtaatgggacatgggatgcagctttcgttcctcctcgatcttctccttcttaatgctaatgggcttggggatttggtcgcccttgctggattttttcgccttcaagccactcattttatccaatttgttgtcaaaataaaaaccaagtaatttcggtctttcgggcagcgttgccactactatttataccttgtggacagtgggacgaaggcaacaattttgtgggattagtgtgaatggctctattttaaaattcaaaacgcaaagaaaaacgagcagtattacgaaaatgtatttaataaaaattatttcgtatactagggaatggcacatagaatcaataattaaaaatgtacaatggtgtatattgcctttaggactgtattatccactgtgcgctgttgttaacagtgttattgttttttgtacagaacagctgattatcaagcggtgtaggttgaattaaattgtgggagtgttagttgtcttaaaattgttaaggtaagttgatgtattaattgaacttgtaatccatcagtgtaaaagtgtttacggaaagcggtgatagcaattttatatcagcaaacagtttcttgtcgtagatatcatgtgaaatccgttagtaaggtgttacgtgagaaatagtacttgtggcagaattttagagtttggcttttattaatggggatctgttactagtgtaagttacatttaaacacattagtccaatatatatttagcattttctatatttttgtttttttgacatgccgctagaaaagtaacagaaactgttaagtaacagtgatggcacatttaggttatttcattggggagcgtgttttgacaactctgctgcggccacactgaacatatgttccggggagaatggctgcgatttcgcgtcggtaaaaatagcaaatactcgttaatgtgctgtgggaacgcttcctccccggccccaaagtggccccgaagaaagtgagcaaatgtgcgcgccgcaagatagtcgccgccgaacaaacgatagtgacgaaagtgatttaattcaactaccagcactcccgcaaatacgatgagtatgtcgcgcggcggcaacacaactctggacttgcagccgctcctggcggagagcgatgtcggaaacagggagctggaggagaagatgggcggatcggcggatcggtcatcgctgctcgatggatccggttcgaaggagctgagtcaccgggaacgcgaggactcggcgttgttcgtcaagaagatcgggagcgccttgttctatggcttgtcctccttcatgattacggtggtaaacaagacggtgcttacctcctaccacttcccctcgttcctgttcctcagcctcgggcaacttactgctagcattgtggtcctgggcatgggcaagcgcctgaaattggtgaactttccccctctgcagaggaataccttcgccaagatctttccgctgccactgatatttctgggaaacatgatgtttggactgggtggcacaaaaaccttgagtctgcccatgttcgcagccctacgacgcttctctatcctgatgaccatgctgctggagctcaagatcctgggactgcgaccttcgaatgcggttcaggtcagcgtatacgcaatgatcggtggagcgctgctggccgcctctgatgatctgtccttcaacatgaggggctacatctatgtgatgatcactaacgccttgaccgcctcgaatggcgtatatgtgaagaaaaaactcgacacctcggagatcggaaagtacggcctaatgtactacaactcgctgtttatgtttctgcctgccctggccctcaactatgttacagggaatctagatcaggcgctgaactttgaacaatggaatgactcagtgtttgtggtgcagttcctgctcagttgcgttatgggtttcatcctatcgtacagcaccatcctgtgcacgcaattcaactcggcgctgaccaccaccattgtgggatgcctgaaaaacatctgcgtaacatatctgggcatgttcattggaggcgactacgtcttctcgtggctcaactgtattgggatcaacatcagcgtgctggctagtctgctctacacgtacgtcacttttcggcggaagcgggctcccgataagcaggaccacttgcccagcacccgcggcgagaatgtctagcttcatcttagctcaaactcaagccaaagccatacgatatgttaagtgtattccgtactgtgtacttcaattgcgatctgcgattcgcgacaacgttcgtatttgattttcctacaaccacacagcgcatcgtctctgtacatatatctagctatatttctataaaaatgtaatttagcaattatgtaattttaatcactttgtacatttgtctgcatgcaactgtttcctgcatcgaaagtgtcataagaaatagaaatacacagacttccactcctccgcctacggaatgggtgggccagataaacaattgtgttccgtcttctgttccattttgggtcataattgataagattgcctgctccgataaggcatacaactcggacgttgcaaattaagcagacatcttgctctctctcacgtgcttttctaattacttttttgtgtaaaataagtaatgtagtggaactgcgttgtgggatttgccaattacttgtgcttaataggttgttgtttatctattctgagcaaacacgttggcgccttgagattaatacaaaacaaagtactgcattgccggacaatccagcagcgtcatcactcaacatcactatgtaaaaagctttggataggttgctcgattactgattactctatatcaaaattttgggtttttatgttgaataaaaaaaaaacaatattatcagccaagaacgtgattgcgagtggtgatagtattttttagaatagtacgccttccgatattttgtgttattttccgtttcatttggtaattgcctcaaaaggcttttgtttagattgtagtgctgaagaatctttttctttgtcttaaaagtaaataaatttgcgcagctgaaactgttttgttttagcgaaataagtatgtatactttaagatggctatctattttcttagaattagattttacttggtaactgcctagttccttatcaaaagattaagatttaaatatcccacatatatgttgctaaacttatcttttaaatggtgactactcatttatccaaagaaacaacaatgacgacattgaatcgggcataaagcggcagaatgaggtgctagtgccccggcagcactttgtttgggttattttgggagcccgcaatatatgatgggcggtggtgaagtgagggattcggagtggggacaggtaatgaggaagccgaaacaggtttgcacagacttagccgtgcggtgaggtaaattgttagtcagcatcagccccgaccg

SEQ ID NO: 7499 - DNA, 1594 bp, DROSOPHILA
gttccggggagaatggctgcgatttcgcgtcggtaaaaatagcaaatactcgttaatgtgctgtgggaacgcttcctccccggccccaaagtggccccgaagaaagtgagcaaatgtgcgcgccgcaagatagtcgccgccgaacaaacgatagtgacgaaagtgatttaattcaactaccagcactcccgcaaatacgatgagtatgtcgcgcggcggcaacacaactctggacttgcagccgctcctggcggagagcgatgtcggaaacagggagctggaggagaagatgggcggatcggcggatcggtcatcgctgctcgatggatccggttcgaaggagctgagtcaccgggaacgcgaggactcggcgttgttcgtcaagaagatcgggagcgccttgttctatggcttgtcctccttcatgattacggtggtaaacaagacggtgcttacctcctaccacttcccctcgttcctgttcctcagcctcgggcaacttactgctagcattgtggtcctgggcatgggcaagcgcctgaaattggtgaactttccccctctgcagaggaataccttcgccaagatctttccgctgccactgatatttctgggaaacatgatgtttggactgggtggcacaaaaaccttgagtctgcccatgttcgcagccctacgacgcttctctatcctgatgaccatgctgctggagctcaagatcctgggactgcgaccttcgaatgcggttcaggtcagcgtatacgcaatgatcggtggagcgctgctggccgcctctgatgatctgtccttcaacatgaggggctacatctatgtgatgatcactaacgccttgaccgcctcgaatggcgtatatgtgaagaaaaaactcgacacctcggagatcggaaagtacggcctaatgtactacaactcgctgtttatgtttctgcctgccctggccctcaactatgttacagggaatctagatcaggcgctgaactttgaacaatggaatgactcagtgtttgtggtgcagttcctgctcagttgcgttatgggtttcatcctatcgtacagcaccatcctgtgcacgcaattcaactcggcgctgaccaccaccattgtgggatgcctgaaaaacatctgcgtaacatatctgggcatgttcattggaggcgactacgtcttctcgtggctcaactgtattgggatcaacatcagcgtgctggctagtctgctctacacgtacgtcacttttcggcggaagcgggctcccgataagcaggaccacttgcccagcacccgcggcgagaatgtctagcttcatcttagctcaaactcaagccaaagccatacgatatgttaagtgtattccgtactgtgtacttcaattgcgatctgcgattcgcgacaacgttcgtatttgattttcctacaaccacacagcgcatcgtctctgtacatatatctagctatatttctataaaaatgtaatttagcaattatgtaattttaatcactttgtacatttgtctgcatgcaactgtttcctgcatcgaaagtgtcataagaaatagaaatacacagacttcca

SEQ ID NO: 7500 - protein, 373 aa, DROSOPHILA
MSMSRGGNTTLDLQPLLAESDVGNRELEEKMGGSADRSSLLDGSGSKELSHREREDSALFVKKIGSALFYGLSSFMITVVNKTVLTSYHFPSFLFLSLGQLTASIVVLGMGKRLKLVNFPPLQRNTFAKIFPLPLIFLGNMMFGLGGTKTLSLPMFAALRRFSILMTMLLELKILGLRPSNAVQVSVYAMIGGALLAASDDLSFNMRGYIYVMITNALTASNGVYVKKKLDTSEIGKYGLMYYNSLFMFLPALALNYVTGNLDQALNFEQWNDSVFVVQFLLSCVMGFILSYSTILCTQFNSALTTTIVGCLKNICVTYLGMFIGGDYVFSWLNCIGINISVLASLLYTYVTFRRKRAPDKQDHLPSTRGENV

SEQ ID NO: 7501 - DNA, 3867 bp, DROSOPHILA
catgttcattggaggcgactacgtcttctcgtggctcaactgtattgggatcaacatcagcgtgctggctagtctgctctacacgtacgtcacttttcggcggaagcgggctcccgataagcaggaccacttgcccagcacccgcggcgagaatgtctagcttcatcttagctcaaactcaagccaaagccatacgatatgttaagtgtattccgtactgtgtacttcaattgcgatctgcgattcgcgacaacgttcgtatttgattttcctacaaccacacagcgcatcgtctctgtacatatatctagctatatttctataaaaatgtaatttagcaattatgtaattttaatcactttgtacatttgtctgcatgcaactgtttcctgcatcgaaagtgtcataagaaatagaaatacacagacttccactcctccgcctacggaatgggtgggccagataaacaattgtgttccgtcttctgttccattttgggtcataattgataagattgcctgctccgataaggcatacaactcggacgttgcaaattaagcagacatcttgctctctctcacgtgcttttctaattacttttttgtgtaaaataagtaatgtagtggaactgcgttgtgggatttgccaattacttgtgcttaataggttgttgtttatctattctgagcaaacacgttggcgccttgagattaatacaaaacaaagtactgcattgccggacaatccagcagcgtcatcactcaacatcactatgtaaaaagctttggataggttgctcgattactgattactctatatcaaaattttgggtttttatgttgaataaaaaaaaaacaatattatcagccaagaacgtgattgcgagtggtgatagtattttttagaatagtacgccttccgatattttgtgttattttccgtttcatttggtaattgcctcaaaaggcttttgtttagattgtagtgctgaagaatctttttctttgtcttaaaagtaaataaatttgcgcagctgaaactgttttgttttagcgaaataagtatgtatactttaagatggctatctattttcttagaattagattttacttggtaactgcctagttccttatcaaaagattaagatttaaatatcccacatatatgttgctaaacttatcttttaaatggtgactactcatttatccaaagaaacaacaatgacgacattgaatcgggcataaagcggcagaatgaggtgctagtgccccggcagcactttgtttgggttattttgggagcccgcaatatatgatgggcggtggtgaagtgagggattcggagtggggacaggtaatgaggaagccgaaacaggtttgcacagacttagccgtgcggtgaggtaaattgttagtcagcatcagccccgaccgcgtacccacattatggacaaattgtttgctcatattcgccgctattgaaagtgggcacgtacatacgtacgtatggctcgagggaccagctttaaccgaagacaggtagtcagggtcatgtttgtgtgcgacgatgatgatgatgataataataatgtaatgatgatgatgccgacgatcgtgctgataaggtcaccaccgggtgcacctccccatatctcctctatgaatccacagatcatcatgatgcaacgctgtttgcgtctccaaaagccgctggccctacgacgaggccttcgcttggcccaggctaatagccaagcggtggccacagaagcacccgaggcggaacctctggatgccttcgagcgtcagtacctcaaggagcgaatcgagatatcgcccttccagcggctgttcctgggggcaggatcctccattgccgcgctcttgaatccaagacggtagggcatctgatgaaatttaaaaatctcttaaaactcttaattattattatgaagtcatgacatgatcgcctgtttgggtgagacgactggagaggatgctctatggacaattttggacaccatgcaagccagcgaggagggtcagcgcatcatggctgataagccccgcatccacaccagcaccattgacttcaagtatctggaaactttgccaccggatacctttggagccgcttacgtaaagtttctgaaagataatgtaagtagttcaaagaatccggtaagaaaaagcgttagtaaccataaaacgacgaaaatctggttcaaagacattcctaagagaatttggacagtgaatgtcatggtcgaatttgaagttggtaacaattgaaaatcttaaaaattattgtctcataaacatacttgcatataaaagatatatttagatggaaaataaaataataattgcttttgtccatcgcttcaacgattattttggtaatcaattttcagcaagtcacgccggacagtcgcatggccgtgcggtttttggaggacccgaagttggcctacttgatgacgcgatatcgcgaatgccacgacctaatccacacggtgctggacatgcccaccaatatgctgggcgaggtggctgtcaagtgggtggaggctctgaacacgggcctgcccatgtgctacggtggtgcggtattcggagcagttcgcctacgtcccaagtgagttcagtgaactgggttctctaattatagctccccattcacgcgtttgtttattttctcctccacttaggcagcggcgtgcgtacttgaagcattacttgccgtgggccctggagaacggcaagcggaccaagcccttgatgcccgtctactgggagaagcgctgggagcagaacatccacgagctgcgctccgaattgggcattactgtgctgaataaagcttgataaggctgtttatttttaagcccatttttaaattttgaacttatcgactattagtatcgagcagtcctatcgcgatcgtagaattgtgatctggcaacgtcgtgtaacgtcgaactgattgtagatgtttccacttacaaagaaaattattatttgattatagcaataaatataaaagttgatgcagtttgccgaaataatttaaagatcgagaaaaaaactttatattattttttatattagaatttgagcacagtgagaacagtcaatttccgcgaatgatcgcatcaaaacttaacccgatgtggcaactccactcgttctgtttgcatttgctgatgtgttgttttgtttttttcggtcgatcgtcttaatggctaattatccctaagttaaacaccatgactgagaaattcaatggttttagccacgacgagatcctcaagataacgggcgtgaaggagggcggtgtgggcaaaaggcctgcgagtctggaagcaggttagatcactaagcatgaaccccaaagcgtgtaaacaattatctgtttataataaaaacctttgcctatgtgtgcgtgagcagcgaagccggcgctccgaattcaacccggcattcggcgtatgcccgataagatcttccggcaagcggatcagttacggaagcagcagcagcagcaaccacagcaacccatacaaaaaccggatgtggcgaagaagaccaaatcgggaacagcgactcccacggaaaagccaccgactcccactcccgcggcggaggatgacgtagcgaacggatcgctaaatttggaccgcccactctccgattcattaatagaggcactctaccatggaaatgctacagctagagataagaaaactcccgccacgtatgcagatgctgaaacaacgtccaccgacgacagttcgattctgaagatcagcggcggtgacagccagacaactagctccaccgatgatggcagcatcctgccgagtac

SEQ ID NO: 7502 - DNA, 827 bp, DROSOPHILA
ttctttgtcttaaaagtaaaatgatgcaacgctgtttgcgtctccaaaagccgctggccctacgacgaggccttcgcttggcccaggctaatagccaagcggtggccacagaagcacccgaggcggaacctctggatgccttcgagcgtcagtacctcaaggagcgaatcgagatatcgcccttccagcggctgttcctgggggcaggatcctccattgccgcgctcttgaatccaagacgtcatgacatgatcgcctgtttgggtgagacgactggagaggatgctctatggacaattttggacaccatgcaagccagcgaggagggtcagcgcatcatggctgataagccccgcatccacaccagcaccattgacttcaagtatctggaaactttgccaccggatacctttggagccgcttacgtaaagtttctgaaagataatcaagtcacgccggacagtcgcatggccgtgcggtttttggaggacccgaagttggcctacttgatgacgcgatatcgcgaatgccacgacctaatccacacggtgctggacatgcccaccaatatgctgggcgaggtggctgtcaagtgggtggaggctctgaacacgggcctgcccatgtgctacggtggtgcggtattcggagcagttcgcctacgtcccaagcagcggcgtgcgtacttgaagcattacttgccgtgggccctggagaacggcaagcggaccaagcccttgatgcccgtctactgggagaagcgctgggagcagaacatccacgagctgcgctccgaattgggcattactgtgctgaataaagcttga

SEQ ID NO: 7503 - protein, 268 aa, DROSOPHILA
MMQRCLRLQKPLALRRGLRLAQANSQAVATEAPEAEPLDAFERQYLKERIEISPFQRLFLGAGSSIAALLNPRRHDMIACLGETTGEDALWTILDTMQASEEGQRIMADKPRIHTSTIDFKYLETLPPDTFGAAYVKFLKDNQVTPDSRMAVRFLEDPKLAYLMTRYRECHDLIHTVLDMPTNMLGEVAVKWVEALNTGLPMCYGGAVFGAVRLRPKQRRAYLKHYLPWALENGKRTKPLMPVYWEKRWEQNIHELRSELGITVLNKA

SEQ ID NO: 7504 - DNA, 7570 bp, DROSOPHILA
gcagcagttggaacagcaacaaacgtgagaaactaagtggcttttaaacgtaaaatttgctttgttaacaaaatcaataaatcacacaaagattgttcatttttgtatgaaaaacattagaaaacgcagttgtagccagttgtccaagagaatacgctaaacaataaatgtattacacactcgccgtttgtaaccgattaaattgttttgcaaaattctgaaggggaacctggggtgaggtcggatctaggaatgacacataaagttgtgaaatgaaagccaagtcaaatatcagtagccaacaagcagacaaatgtcgttacggttaagtaataacgattaaaaccgggtaactaccgattagataagatacggcaacaaatttgtatactccaaaggcatatcaagtgcgtgatcaaaatggccatttcataattaaaatccaccagattaaagctaattttaaaatttccattttgagaaggctctttttatctgtcaaaaaatatatttttacatatgtatattgacaacgaaattcaaaaacaaattatatatttccttgaatccgtgattgaactatagaatatcactaggcattattaaaaaatttaataaataaatgaacttatttgaaaatgaaaataaggtaaaaggtacctttcttgcgatcaataatatcaaaagatttaaatttgtccaaattatgtttgacagcatatcgaaagttgccaagttgattcttgccataaagttaaagaacgaaagtaaatgggagacaatataaaaacaaagtgattaattaagaaactatttttaattaattcaacatttattttaaacatttgaaaataagccgttaggcttggacgaacaatcgatacttggcttagtggggacaaaaaccgaatgcaacactgcgccagctgtgttggtggtgggagcgaaaattgcccgatttttcagtagtgtttttttttcagtagtgtcagactctcggtgacaacaacacgtcgggaaattgcatcgctgtggaaaacaataaaatagagcgtgagagtgagagacagtcgcgcgggtgtcggtcagaaataagcaatattttctgtgatttttgagtgtgacgtcctgttttgagtgcttccgcctcgtaattcgcggcattgctgcggccaaaagttcgccattggatggttttttatagcaaccagcgcgcacggaaataaatcggagcacggggagcacccaaagtgcagagatgtcgaggcaatttgcataattttcgggtggtcggtcgcagctagaaagttgtataataagattgcgaaaaccaggaggtacgcccggctcaccacaaatggacggggaatgttgtggcagctccaccgcgtccaccaacaccacaaccatcgccaccaccaccaccccagctgaaagcgcctacaccatcgtatcccaaaatatttcaataaatgtctagtgccaggctactcgagtcgcagacatccgacgaggataacgaggacatcgagcggcggcctcaccagagccattcacgcagctgcagcaacaacaccacccccacccatccaccacatcccatggtcaggaaggggggtgtggccaggaggatctgcctgataggtggggcactgttcctgctcctcgtcgccctctgctacctcaccctcagcggggacactcgcctcggtggctccgaggattcggaggagggatctcaccatggattaggtaagcagcggatctcagtaatggaatcccgcccggctgactggctgttgagatatactcgacctgacaagcacgagggggatgaccggaatccaggtgaagaggagttcccagggaatcttagtcatagagcgcaagaaatctacgaatatgaatggaatttcaagatagaagagcaaacgaccaagcaaatgcaaatccgaaataggcatcgtttcgatcccagaatccgtgagtcatgcttgtactctaaagttccatcccatgggggcaaatgcagttggcggcgctctttcacgactgctggccgaaagtgaattggccactctgccaccactttcacttttcattttggcccactgccaatcaaagcctagttcaccctacgttttgtgggggactttagtgaacgccctacgtttgtttgaattagaaaacaaattttacctgttatgttattttgttcttttttttttaacgaaagaagagagagctaagaacatttgagcagttaaagcgctttgccaactgagtggcaatacagactgaaaaaaactatagtatccgaaaaaagtttatttattatttataatactcacgtgatatcgaagcattatacatacatacataagtcgatgtgactgcaccacttcacttctaagttattggatgcggtaattatcgcgtgaaacgcgtcggctcgtcgctgttccgactttggctactagtgagtcaggttgggctttttattatttaaccgtaattggatctatttggtaactattgtcttcgccaaacgcgatgtacatatatatatatatataatatatggaagtagcccacccacaagcgcatgcagcggcaattacatcgattcgcctgttggccgttttttattgcaatgagcgaaagccggaacaaggtcaaattttccagtttactttgcatttttattgaatggcccataaaaaggttaatctgttttgaccactttaaacctactggtttaatctaatcagacaaaccttttcgattttaggtaacagatttgttttgtatctgcagcctatgttttagttatttattcacgagtttattggctaataaagttctcgaaatacagctgaatttgcagaacgaaaatgcggcaatccagattcaaggctaatatgcaataaggtggaccattcaagtttgcgatcaatgatcgggctggccgaaacaaaaaaacacaaaaaataatcatgaatctatcttcatctacggaatttgttgctcgaatcaacggttgatttagtcaagaaaatccaaatcaagtgcgcgatttgagtggcaccaattgtctaattgcacatttccccacaatttcccagattctagattgcgcagtgctcagttctgcaaagaaaaaaagcttttagcagttttttgcctctcatttcatgagtataattcacacatcgccccaatcttatcaacatcttgtataactaggggtacagggggtctatgggtatggcaatcgcttttgttgtaccatattatggtgagcctgaataatatgaatatatatttataattcgtctagctctcgtgcaatacaaattctgctcatctgtttcgagtcgatttcagtatcttttcaattgcgcgtgtcgagtgctatctgtcacgaccccccgccccctcctttatacaaggtattgttgctcgactttgaatgtgcacctttaagcatgctaccgtagcaaattgccatcgaattgtctacacaaatatttacaatctgcgaattgcactcatatatccagagtaatttgaaatgcatggcgtgaaagccaattcagcggaatctaaaacacatgtataatagaaatttttagttcaattatattggcttgtggcctgcaatctgcaagggaagataagtgtatcgccaggtatataaaacgagcttctttctttttaaaattacttcggtttgcaagctgtgattggcattcatataataagttcatgagatacaaacttataaacttgactaaaatcgtttcatagataagaagcaacgaaatatttgttgtatgtatgtacacatattggggtatatagtattatgactaatgattttattattttaattataccgttggtggcacacgatgcaccttctactcaagttctaaatcacatctttctttgttatcatattatagataccgctctattacttatataacctgaactacttctcgtatcttctcgagaacccttcttaaatatcaatcaagggaaagtaacattatcgatctgtggtattaacagccaatcgaatgtaacaagttgggattgcgaatgtagaattgctaaattagtcatttctttattctgcacttcatttgcctggtttcgccagtttttctttgagtgttttgagtgcacaacaaaagagtgaatgaatatgataaggacggaccgtaaaacaatttgtgactcacactagctatccgtagatcaggtgtctggggaattctcaattgactgtaatcaggctgcggtcacagttcgacatcatctagatatgggcaacaatcaaccgcaaatacgtatgtgtggatgtgattatggccagattggtgtcgcaccccaccaaaaagttcgtgtgctatctgatgtactgggacagctagccgctagctagctatcgtttcttaatagtgttcgtcatctggaatacctggaaaccattagattttcgattagttgatggttgaaaccgccgccttcgtgtggagcatattttgattgaaggggcttggtttatatttgctttgtgaataacttattagggaatacttttgctttatattaccaatgctgcctttggggtcctgtctgtgaatttattcccctcttattgtttgtttccggttatcagtcatataaatcggtaatgggtatttgttccccccaaaagttgctccaattgcgtgcttttcactttccgttctggataaatgataaggtggtctaatagcatttgcacacgcaatcgatccgaacactatatagcttgataggaggcaaaagatttctagcacatattaacccattaggtaattacctcgattattttcgatcgtatgatctttgaaatgtgtgcatagaacaaacatttgaaggctcttaagctttttggtttgtttaaatagttatcccaacaatttcaggccggctacagcaaacgtttcgttgcgaagctcttaagaaaacctgattagcacattttacgaaattaagacacacacaccgcacagattattgttcatcactttgaagcgtaagattgtgatctctccactacgtcacgtagttatggctggctgcctcaaccgggggacagaggtcaatgagttgggctgtttaagtaattgagaattgtgattaattcatcaaatccacagcaccagacggtggaattccaaaagtaattgaccccctgtaaccggattactcttgctttgctcacccacagatagtatgaatttccggccattgaacgaaaccgttcacatatgcagcgagagttacgaggatcgacggcagttcatgcaggataagccccaatctgattacgtccagttgcccgtgatatactttgttactccaacgtatccgcggcgcgagcaaatcccagaactaacccgtctggcgcacacgctgctccatattccacgattgcactggctggtggccgatgatcaagagaaatgcaatgactatatggacacgctgctctatcgatttggtaaatatgaataattatattaagagatttaattttgataattaaccattgtgatttacaggtatgccctttacccacatggtcagcccgatgcccagcaaattccggaatgaaaagccagcgccgcgaggtgtggcaaatcggagggcagccttgcagtggatacggcagcataatctcaccaacggaatactttacttcggagacgacgacaacacctatgatctgcgtttgttctctgaaatccggaaaacgcaacgggtttccatgtttcctgtaggtcttattgctgattatggggtcagcgggccagttgtgcgcaaagtaagattatgatattatcaactacccattgatactaacaatggggtgaaaactaaatgtaatatgaagttttaactaaaatgtggtacaccattgatatggccggttttatagcgagccatcaaactgattattcagttcttattaatttttttcttacgaatttcagttttactttgttgaaaattaataatcttatcttttgactttttaagggcaaggttgtagcattcctggactcctgggttgccggtcgacgctggcccgttgacatggccggttttgcagtgaatttggagtacatggcgcagtatccctatgtgaatatgccgtacaagcccggctacgaagaagatctctttctgcgcagcattggccttcaaatgaatctgattgagccgcgcggcaataactgcaccgaaattctggtttggcacacgcagacaaagtcaaagaagctcggaatggttcgattagaaagcaaatacttggacgatcgttctaacttgggcgctctgcttcataatcttaaactaatgggcgtgaccagtacaacggaaagtgaaggtgcgttacaatcgaatcaaagttaaacaattgctataacattttacatttttaaaggacgcaatgcactgatcagcaaaaatggaagggaaaatccacactccaaaattcttagctgagtcctatggtccaacccgaataatacttatagacttttagagctaaatgtatagttattctaaaacaaatctcgaatccactgctcgctgtatttccatggaattttcctgttctagttatcagtcgttttcgtactgcacaattatattttttttttcacaaattattgcgtgggtgctgcctctctgttctagattctcataatgaaaagttaataaattatgcatgtattgttaattagttgtagataagtttgttcgtgatagcaatataggaaacacagggacggctacaaagataggtcttatttatttatatcataatcgctgacagtaggttgtaaaagcagctaggaatgtttataacttgcttattgtacgttctaatttgctaagcaaaacgaaggcttcggtctgtatggtctttcgaccaagcccttagggatcattttatcgttgttaatcacctcatcgacttgcaacacatatcattaagcttggtataaattatttaggcatataaaaagtcatcgaattcccttaagagcaatggtcattaagtatgaaggacttgtgtcatttttaatgtaaactttatgtatactctgtaaatcagtcaataagatagtgagtcataatgtaaaagaattaaacgctagttttatgaagctttcccaaatggaatgaattattttttgattatttaatggaaggaagtatggtaagtattctgaaaattgattgacaccgatggctcagcaacattcgtttctatctggttaaaggaagtgtcatggaaatggtatgacagagaaaaagcaaacaatacttttcaattaactttacatttccttgtcgtttgcatcgacctcatccagagttcattcctcatcctaagacatgttttactttgcagtagtttactttgaatgccccatagcatttcgtgcttggtgcaaaagtcgaatagtcaagaaaaagtagaaacttgtattgtgca

SEQ ID NO: 7505 - DNA, 1933 bp, DROSOPHILA
tgacaacaacacgtcgggaaattgcatcgctgtggaaaacaataaaatagagcgtgagagtgagagacagtcgcgcgggtgtcggtcagaaataagcaatattttctgtgatttttgagtgtgacgtcctgttttgagtgcttccgcctcgtaattcgcggcattgctgcggccaaaagttcgccattggatggttttttatagcaaccagcgcgcacggaaataaatcggagcacggggagcacccaaagtgcagagatgtcgaggcaatttgcataattttcgggtggtcggtcgcagctagaaagttgtataataagattgcgaaaaccaggaggtacgcccggctcaccacaaatggacggggaatgttgtggcagctccaccgcgtccaccaacaccacaaccatcgccaccaccaccaccccagctgaaagcgcctacaccatcgtatcccaaaatatttcaataaatgtctagtgccaggctactcgagtcgcagacatccgacgaggataacgaggacatcgagcggcggcctcaccagagccattcacgcagctgcagcaacaacaccacccccacccatccaccacatcccatggtcaggaaggggggtgtggccaggaggatctgcctgataggtggggcactgttcctgctcctcgtcgccctctgctacctcaccctcagcggggacactcgcctcggtggctccgaggattcggaggagggatctcaccatggattaggtaagcagcggatctcagtaatggaatcccgcccggctgactggctgttgagatatactcgacctgacaagcacgagggggatgaccggaatccaggtgaagaggagttcccagggaatcttagtcatagagcgcaagaaatctacgaatatgaatggaatttcaagatagaagagcaaacgaccaagcaaatgcaaatccgaaataggcatcgtttcgatcccagaatccatagtatgaatttccggccattgaacgaaaccgttcacatatgcagcgagagttacgaggatcgacggcagttcatgcaggataagccccaatctgattacgtccagttgcccgtgatatactttgttactccaacgtatccgcggcgcgagcaaatcccagaactaacccgtctggcgcacacgctgctccatattccacgattgcactggctggtggccgatgatcaagagaaatgcaatgactatatggacacgctgctctatcgatttggtatgccctttacccacatggtcagcccgatgcccagcaaattccggaatgaaaagccagcgccgcgaggtgtggcaaatcggagggcagccttgcagtggatacggcagcataatctcaccaacggaatactttacttcggagacgacgacaacacctatgatctgcgtttgttctctgaaatccggaaaacgcaacgggtttccatgtttcctgtaggtcttattgctgattatggggtcagcgggccagttgtgcgcaaaggcaaggttgtagcattcctggactcctgggttgccggtcgacgctggcccgttgacatggccggttttgcagtgaatttggagtacatggcgcagtatccctatgtgaatatgccgtacaagcccggctacgaagaagatctctttctgcgcagcattggccttcaaatgaatctgattgagccgcgcggcaataactgcaccgaaattctggtttggcacacgcagacaaagtcaaagaagctcggaatggttcgattagaaagcaaatacttggacgatcgttctaacttgggcgctctgcttcataatcttaaactaatgggcgtgaccagtacaacggaaagtgaaggacgcaatgcactgatcagcaaaaatggaagggaaaatccacactccaaaattcttagctga

SEQ ID NO: 7506 - protein, 443 aa, DROSOPHILA
MVRKGGVARRICLIGGALFLLLVALCYLTLSGDTRLGGSEDSEEGSHHGLGKQRISVMESRPADWLLRYTRPDKHEGDDRNPGEEEFPGNLSHRAQEIYEYEWNFKIEEQTTKQMQIRNRHRFDPRIHSMNFRPLNETVHICSESYEDRRQFMQDKPQSDYVQLPVIYFVTPTYPRREQIPELTRLAHTLLHIPRLHWLVADDQEKCNDYMDTLLYRFGMPFTHMVSPMPSKFRNEKPAPRGVANRRAALQWIRQHNLTNGILYFGDDDNTYDLRLFSEIRKTQRVSMFPVGLIADYGVSGPVVRKGKVVAFLDSWVAGRRWPVDMAGFAVNLEYMAQYPYVNMPYKPGYEEDLFLRSIGLQMNLIEPRGNNCTEILVWHTQTKSKKLGMVRLESKYLDDRSNLGALLHNLKLMGVTSTTESEGRNALISKNGRENPHSKILS

SEQ ID NO: 7507 - DNA, 4443 bp, DROSOPHILA
ccatcgacggtgatagcggtgtgcttgtccggcgtgatgggctttccatcgtgataccaaatcgcttccggcttgggaatgcccgtggcgatgacttcgtacttgaggggcacactttcgtagctgtgctgctggaagacatcgacgtggacgatttcgggaacggctataaggcaagatatgtatcaagatctgtgtgtatctcagaggagtgtactattagatttctgtacatgttgcatagatcattcgtaggattagtttcggcagtgcagcacttacaacatcctcaataactggtatcttacaggtcaaataggatcgcaataggacctactgactaccacctaattatcttatcgtagcttattatggatgtgagatatcttatcgcatgagcgagcatacagctgtcaagtgaaaaagttcaaagaagattgagaaacttaaggatcggtttttagtttcccaatcgtcgtgcaattattaaaatcaatccacttagatactaattcattcacgatgctcacatattcgcgtttcttacactttgttagaggctgtcgtttgatttatattctctgtacactttaagttaggtggttgtgttaaatgtgacatgaaatgcatccttttttttttttttttttttttttgatgatatgtacaatgggcgtgcatatgaaattatggcgacatctttttggttatttgtcatttcagggttaattcgtttaaatttagaattatttcgattcgttctcattcatggcattccccaagtatttttagtgatgcttatagtgatgcattggaaatgatttggtttacccccttcttcaggctcttcggtcgtcgcaatcaaagtctttgttacggtctgttccagagacaaagcctcgctggctgcatcagaatttcatattggagacaggagattaggtttaatggcaaaattcgggtgtcgggacatatacatatggttatcacttcttttcgcctatagcacttgatcccttccacttcttttaagaatcccatggattttcgaaaatgtatactcacttagaacggccaccttgcacgtcgatgtggtctcgccaataaagttggtggccttcatctcataggtgcccgcatcctcggtcctggccagattcaaggtgagatagtagttctcgatgcgctgggtgtcccgtgagattttgatgcgggcatcttcataaatttcatgaccatccttgaacctggataaaagagcaggttatttaagctttgaattaggattgctcattgccattaccatttaattttggcctccggttcactgtacacttccacctccaaggtaaaggacttgccctcctgaacctcgacgttcttaagtccgcgcttaaccttgggtttgcctggaatttaagtagagattagatacaaacggcatatggggtgcccactactcacagttgacggtcaccacgcagttgtcctccagttttccgtagtcattcatgatcttgcaggtgtagttgccctgcatgttggtggccacctggttcatgatcagcttgaagtcattgccctcctccacgtgacggaaatcgttcctcttctcgtcgatctcgatgccatcgatgtaccacttggcatggggccgcggataggcatccacacccaccacgagctccacattggagtcgccctcggccacagtgatgttcttcagtttatgagtgaactctggagcgcacttgatgagcagctgagtggaactggtggccgatccgtgctcattggtggccttcacggtgtactttccagcatccacacgcgtggcaccggttatcttcagggtgtaggcattgccgtcgctgctaaccgtgtacttggagtcggttatcttgatctcggtctcgtcgtggtaccaagtcagcttggcctccggataggcatcgatgcgcaccgtcatctggacgttctccttctccccgtggatgtactcgctctcgaagttcttcacaatcacgggcttcgacttgaccgtgcagctccagtactccgaggtctggctaagatcgttagtggccttgatggagtagttgcccgcctgggacagcttgatttccttcacctcgacaacgaccttctccagactcttgccaatggaactcgatgagatcttgacgttgctctcggcggtcacgtccttgccattgttggtcacctggacggtgggttgtggaaaaccctccacttcaatttccatcttgattgtctcaccggccgagcaagtgatgtccgtgattttcttgattttcggaggagcttaatggggttttaagattagtacgccgcttataattgctatgagcttaataaagagtacaaataaagccataccaacggactttcccttggagatgtttaagtaattaccttttactaccaagttaatggacgactcgtcctggcctagttcattgatggcctctatggtgtatactccggcgtcgacggtgtccacgttcttgatcaccagcgacatgctctcctcatcctcgtacatgaacttgtgcctgtcgtccacctggatgacctcaccatcgtgcttccactgcaccgccggcttggggaagcccttgcactggagctccaggatggccgagccgccgatgcttgcgttcgcctcgcggtgctcgatcaccagggtgggcttctcgggctcccggtttagggtctggatggcaccctgaaccgagagctcggcactgcacgagatgttgccggtggacgtttgggccacgcaggtgtagatgcccgcatcctcgggcttcacgtgctgaaagaccagggccaaagagtcctcgtcctcgccgaagagcaccttgaaccgctcctcgggatcgaactcctcgccgttccgcttccattggaagactggcttctctccagccggcagaatttggccgcttaatgcgccaaatggatttttatcctctgttgaaattacgaaattgtaattaccaaatatttatgggactatctggacttgacttacccactgtggtggcgatagcctcgcagttggcttcaccatgcttattggtggccttgcaggagtaggttcctgcgtcggtcttctgcacgtcggcaattacgagctcatagaaacccaaataatccttgtcccgaataatttggatcctatcattggtttcgagtatctccttttcatccttgtagctgcacaggaataaagaatgacatttcatttatagctcaattttaaggtaagttttccactcacaatttcacgcgaggcttgggatcccctataatcttgaccatgaaacggaagagagtgttctcgatcatctcagcatctttcaagctaaccaggaaggctggctccgtattggttttggtttcatcatgaccaggagctgcacgggaaatgggctagtcatctcatggctgcaaacgctacctaaatctactcttaccttgaccaaccgccagttgtgccgacacagttgtcgtttcggatgcagactgggcccgaatggtgtaggtacccgcatcggtctcactggaaccagttcgagaaatcatttaaatcacttaaattgtagaaaacaacaaaggcacccacctgcagttcttgatgtccaaccggtaggagttcatgggagcggccgtttgggtgattctatcagccaaacgatcctccaggggcttgttgtccttcagccaagtaaccaagccaggctgatccttgaattggatctcaaagtgggcagtctctccagctaatcgggcagttaacataatcgcttaaaaaccatatctttgaacatgcatgtgtgataaactcacgttccacttgcacgctcttcagcatcttcaccaccactggcttgtcgaccgagcgcaggggtcgatcctcttggagacgggacgatgaccggattccggcacgcgattctgccacagagtaggaggcacggctctcggctcggctttcggcgcggcttgcagcacggctctctgtgcgtccggtggccagcagagacgaacgggcttcgaccttgtcaacggaactccgatcccgcctggagcttatgccatactgcgatcgctcaacggtgctgtcataggaggttccccggtcgtagtcccgagttttggctttacggatggccagagtcggaaaagtttattagtagtgggccaaaacggaatattcaattttagacagaggcattcctgaaatcccgagaatccagagattccaagaacccctcgttgacaaccaattctcattctaaagaggaacttgcaaggatgggattggttttgggattcaatgtgggaaaacaggtagacacacataaagtgttatttgtaaagaaaacaacgtgtgtaaacaatgaagagtaacac

SEQ ID NO: 7508 - DNA, 2096 bp, DROSOPHILA
ctcctggtcatgatgaaaccaaaaccaatacggagccagccttcctggttagcttgaaagatgctgagatgatcgagaacactctcttccgtttcatggtcaagattataggggatcccaagcctcgcgtgaaattctacaaggatgaaaaggagatactcgaaaccaatgataggatccaaattattcgggacaaggattatttgggtttctatgagctcgtaattgccgacgtgcagaagaccgacgcaggaacctactcctgcaaggccaccaataagcatggtgaagccaactgcgaggctatcgccaccacagtggaggataaaaatccatttggcgcattaagcggccaaattctgccggctggagagaagccagtcttccaatggaagcggaacggcgaggagttcgatcccgaggagcggttcaaggtgctcttcggcgaggacgaggactctttggccctggtctttcagcacgtgaagcccgaggatgcgggcatctacacctgcgtggcccaaacgtccaccggcaacatctcgtgcagtgccgagctctcggttcagggtgccatccagaccctaaaccgggagcccgagaagcccaccctggtgatcgagcaccgcgaggcgaacgcaagcatcggcggctcggccatcctggagctccagtgcaagggcttccccaagccggcggtgcagtggaagcacgatggtgaggtcatccaggtggacgacaggcacaagttcatgtacgaggatgaggagagcatgtcgctggtgatcaagaacgtggacaccgtcgacgccggagtatacaccatagaggccatcaatgaactaggccaggacgagtcgtccattaacttggtagtaaaagctcctccgaaaatcaagaaaatcacggacatcacttgctcggccggtgagacaatcaagatggaaattgaagtggagggttttccacaacccaccgtccaggtgaccaacaatggcaaggacgtgaccgccgagagcaacgtcaagatctcatcgagttccattggcaagagtctggagaaggtcgttgtcgaggtgaaggaaatcaagctgtcccaggcgggcaactactccatcaaggccactaacgatcttagccagacctcggagtactggagctgcacggtcaagtcgaagcccgtgattgtgaagaacttcgagagcgagtacatccacggggagaaggagaacgtccagatgacggtgcgcatcgatgcctatccggaggccaagctgacttggtaccacgacgagaccgagatcaagataaccgactccaagtacacggttagcagcgacggcaatgcctacaccctgaagataaccggtgccacgcgtgtggatgctggaaagtacaccgtgaaggccaccaatgagcacggatcggccaccagttccactcagctgctcatcaagtgcgctccagagttcactcataaactgaagaacatcactgtggccgagggcgactccaatgtggagctcgtggtgggtgtggatgcctatccgcggccccatgccaagtggtacatcgatggcatcgagatcgacgagaagaggaacgatttccgtcacgtggaggagggcaatgacttcaagctgatcatgaaccaggtggccaccaacatgcagggcaactacacctgcaagatcatgaatgactacggaaaactggaggacaactgcgtggtgaccgtcaactgcaaacccaaggttaagcgcggacttaagaacgtcgaggttcaggagggcaagtcctttaccttggaggtggaagtgtacagtgaaccggaggccaaaattaaatggttcaaggatggtcatgaaatttatgaagatgcccgcatcaaaatctcacgggacacccagcgcatcgagaactactatctcaccttgaatctggccaggaccgaggatgcgggcacctatgagatgaaggccaccaactttattggcgagaccacatcgacgtgcaaggtggccgttctaagtgagtatacattttcgaaaatccatgggattcttaaaagaagtggaagggatcaagtgctatag

SEQ ID NO: 7509 - protein, 666 aa, DROSOPHILA
MVKIIGDPKPRVKFYKDEKEILETNDRIQIIRDKDYLGFYELVIADVQKTDAGTYSCKATNKHGEANCEAIATTVEDKNPFGALSGQILPAGEKPVFQWKRNGEEFDPEERFKVLFGEDEDSLALVFQHVKPEDAGIYTCVAQTSTGNISCSAELSVQGAIQTLNREPEKPTLVIEHREANASIGGSAILELQCKGFPKPAVQWKHDGEVIQVDDRHKFMYEDEESMSLVIKNVDTVDAGVYTIEAINELGQDESSINLVVKAPPKIKKITDITCSAGETIKMEIEVEGFPQPTVQVTNNGKDVTAESNVKISSSSIGKSLEKVVVEVKEIKLSQAGNYSIKATNDLSQTSEYWSCTVKSKPVIVKNFESEYIHGEKENVQMTVRIDAYPEAKLTWYHDETEIKITDSKYTVSSDGNAYTLKITGATRVDAGKYTVKATNEHGSATSSTQLLIKCAPEFTHKLKNITVAEGDSNVELVVGVDAYPRPHAKWYIDGIEIDEKRNDFRHVEEGNDFKLIMNQVATNMQGNYTCKIMNDYGKLEDNCVVTVNCKPKVKRGLKNVEVQEGKSFTLEVEVYSEPEAKIKWFKDGHEIYEDARIKISRDTQRIENYYLTLNLARTEDAGTYEMKATNFIGETTSTCKVAVLSEYTFSKIHGILKRSGRDQVL

SEQ ID NO: 7510 - DNA, 5379 bp, DROSOPHILA
gggcaggtgccgtgctccttcatgtggctaacgatgcacttccagcaaaagacgtagccggaaacggagcaggcagtgggcgtctggatggacagcaggcagactgggcactctccccgctggggaaggctctgctgcacttccttgggcagctgctttctcggcatcgcttcgggatttatcagagttccacccactttccgccgctggtcgttggagtaccaccactggacgaactgcaggaagaaggccaagacctccagcatctttaggaccacgtaggtccactgatcctctttgggaggttcgctgggatagcgaagggtcagccccaacaatctgaagatgggcgagtggtttgaggcgtactttacgaggtaaaagaatgtgtgcgccgccttggcggcatggaaagcatggaatgcgcttagaaggcgttgctcccagggactggtgtcctcgtgcctggtgatcctggtccttagcttccgctccacgtaaggcatgaaggttagcagtgtggcagaggcgaactgctgcctgcggttcagcagatccccagtggttgtgaccgtcctttgcaatccgtaaaagctctcaccgaaagaggaggccctcttgcgcagatacaggtactgcagcagccaagtcagcaatggcgacagctcctcctgaatcctcaaactcccccatagtttaaagtccaggcgtagtccaaagtagtcgaatatcttgctcagtgccgggtaaatcaggttgtccagcgtctctgacgctgaaatttcgaagatcgacggcacattttgaaggttctggcgcacatttgccgcttctgccattgtgtttatagcatttaaataaatggaattaaattcgaataccaattatgttgttattcttatcagtactggtgttatcgggcttggcttgaaaacagtcgagtgctcatcaatatatcgataagtcgttggcaccatcgatagttgggttaataatctggcaagatttgtttattttgtggtgcagcttcgttgtttatttaccaactgttgaaaatatatacatttatgaattatacaaaaccaagaagatgaaaacctctggcgccagcaatactgacgagctgaacaagtcatcgcacagcaaagtcagcaaaaagtccactaagtcgcgatctaagtcggcgaaattggagttgactggaaagaattccctgtcggcatccgcatcatcctccatcgcatccgcagtgagcgggggcgttgcagtgggcagcctgccggccacgcccactcacctaaacatggtgacaacgcccaccacgccaacatctagtctgggtaactacaatctgtttgacgcctcatttgcggtagcaggaagtggtgggcacggacttgcaggcggcatcgcgggcgcagaagcctctggcaactccagtcgaatggtaaggatgccaatctcagggccctcttatggtacaagctctctttactgtagggtcatcagaagagctatgctggtttcgatccgcgcagcatcaagatcttttgggagcagcacgaccagaccgatgtggaactctcccaggatgtgtgcgcccgtttggcggaagatgcctcctacaaagtctgggagctgatcaatgtaagtcgaccgtaatacacctctttaatccctctaacctcttgatctctcagaatgtcaaaatatactcgcgccactcgggcggagtggtgacatacgacctggtgaacgaagtgctaaaagatgccgatgtgccgcctatgctgggtgcgatggacagcgactgggaccggatcgactatgacggcagtttttactttcactcggataagatcttcgagctgagcgcggagtttcagaaggaagtcaatctgtgcacacctgatgatgcagactttcagagcatctgcccagtggaggataagcacatggaccaactaagacagtgtgtccagagtcttgtgacggcagccctttttgcggacagcaaatcccagacggccgccgtctgccatgcttttcagacacccctgatgggatctatctaccgagtgattgtgagtaagatggtccagttgctagcctttaagcagcaggaccatttgagccagcgatgctggcgactgctccgagcatgcaactacaacgccactgctaatcacaatgcctgccggccggagtacttcaacctggccgaggtactggtcagccagctaatggcaccttacgaaactatcaaagctccacacgtcgacccagatccgggacaaaccacctccatcaaaatggagtttgaagaagaactaaaggttgagccagaccagtgccataatccggaaacccaggaaaatccggaggtcatgggagtagagaaacaggagcaagaaccccagatgtttccgggtgagagcaccatggaacacacaatctacaagctgcaatcggaggaggaggaattgaatcctcagccggaggcggaacacctatccagctactttgcctgtccagtcggcaatggcctggtggacgagctgtgtgaaactataggacagctggcatctcaaagtggttacctacatgcagagtgcctgtttttgatcaagagacgcctagcgagattcttcgaaggtcgccacgtcagcagtgagagaggtaaatcatccttacaatttgttagcctggatccttatctttggatttcttaattaagactttaggtatatcagtagagcagtgcgcggtctcattgccctgggagaatatgcctttcgtgagtttattccctacatctacaaactgcgcgtcgaggaaatcccggatagcctgtggccggatctggctccggctgccatcttccttggcggtcatgatgacgtatacctgtatgaatggctggagtacggatgcggtgctgctctgcagcccttcttggtccactatgcgcgtaagaaacacccatgtgttccatgaaaagcggttaagtaactaaaaatcattgcaggagcctacgaaaagatggtaaccagacggtatgtgaaggccaaacaacccgcttacagaatagaatcagtgccgggagtgcgtcggttggaatggagtactcttgcggcagccatgtgccacggagacgatcctagcaaggcactcaaaccgaagcctacgctctgcgaggctttccccgaccttcagtcaccaaatcttcagctcaactgcgcgggcaacatccgctttaagtttgcaggatgccgcccggtgctgctgaagccgaaggttgcgactgttccccactccgaagactcgccttcgtcggcagcgaacggtggtgggggtggcggtgccagctccgacatcctgatcgccaaacgaaaactctttaagcccctgaccaacgtgagaaagtggtcgcccatcagtggctatcactacctaaggatctgaaagggacttgggaaagtattataagaccttctggaggtccaggaggacctggggatctcaataaaactcttcgtttactttagacttcctcttcggtcttccgaaaggtgatacaactttactcgtaatacataaaaacacagaactaaaaggcttcttcctgaggcgtatgtccatttagtgagcccaaagcgggcacgggcattcctgcagctttcatctccgccacaatccgcttgttgataatgtttcggatgttggcattcacatccggcagaagtccacctgttcgagctgcgtgctcaattcgctggacgacgtcgatttcgcggcgcgatgatatcaggttcgtgactagcgccttgtccatgttgcccacccgaccgatcctgccacaacgatggatataatcggagacgtggagcggaaagtcaaagttgaccacatgtcgagctcgtgtggtatccaggccacgacttcccacatcggtggtggaaaggacgtcgcagtgaccgttttggaactgctcgaagcggccaagacggatcttcatcagcatatccccattcagatttaagcagttcactccgctgttgttcaggaagatggaaacgaagtcactggtggtggacttgttgctgaacacgataagagggcgacgtttggcaagatcatgcttcacgagtgacagaagtgtggcgggccgatcggccttcgacagccgcaggaacttctgcgtcacatgagacatcagtcggtgcaggtgcggactgacgacctcacggatggtgtccacgtctatgactttgtgaaggatctctctggtgttcgtgggcatggtggccgaggccaggatcatctgggtgccagcatcctccttttgcaccaagtggaactgtcgaataagaaaaaacaagctgattgaagccattcctttggtaatcgcctagaatgacttacgggaaatctcctgaggaagtaggaaagtttgtctgtgaacgtatcatctaggagggtgtccgcttcgtctagaaccagatgacgaacctgctccatgcggtagatgccagtggtcaccagtttgctaagtgcacccagagtggcgaccagtatgtccacctcctcgaactgtgggttcatcataagctgcttggtattgccgccaagtaaagattgcactttgagattggtgccctgggtgagcttctccgtgaccccagcaatctgcgtggctagttctctgccgggagtgaggatcaagacacggggggtgttgagttttcgttcggtgaccacttctttctggaggagtttgtctacgataggcaggagatatgtaattgtttttccacacccagtttcagcggcaatgaggcagtgctcatttccatggacaacgggcattccctgtttttggattcccgtcagtaatttgatgcccagctcgactcgcaagttctcaaggagttgcggatgaatctgcatccccgtgctctcgaggaactcatcgacggtctgcatttcctgctggagttcctcacctcgcacgctggcgttcaggatgaagaagtctcccttggatttgttgtgcagccagcccttggaggccagcgaaagactcccaaacttggcatccgtctgctcgtattgggttaaatcgaactggcttcttctgcaggagattaggggctcccccttctgctttttgcccttggactttgcctttggtggcttcgtcttaactgccgccgccgccgctgtggcatatgaagccacatggcgcgatgattgcacccggagcaccacggacaagttcagcatgctttcggaatattattcaatgtttttcatttgccggcaagtcagctgtgcacacgcatcgaagtgttggaaagcgccgctcgaattcaatgc

SEQ ID NO: 7511 - DNA, 2416 bp, DROSOPHILA
caagatttgtttattttgtggtgcagcttcgttgtttatttaccaactgttgaaaatatatacatttatgaattatacaaaaccaagaagatgaaaacctctggcgccagcaatactgacgagctgaacaagtcatcgcacagcaaagtcagcaaaaagtccactaagtcgcgatctaagtcggcgaaattggagttgactggaaagaattccctgtcggcatccgcatcatcctccatcgcatccgcagtgagcgggggcgttgcagtgggcagcctgccggccacgcccactcacctaaacatggtgacaacgcccaccacgccaacatctagtctgggtaactacaatctgtttgacgcctcatttgcggtagcaggaagtggtgggcacggacttgcaggcggcatcgcgggcgcagaagcctctggcaactccagtcgaatgggtcatcagaagagctatgctggtttcgatccgcgcagcatcaagatcttttgggagcagcacgaccagaccgatgtggaactctcccaggatgtgtgcgcccgtttggcggaagatgcctcctacaaagtctgggagctgatcaataatgtcaaaatatactcgcgccactcgggcggagtggtgacatacgacctggtgaacgaagtgctaaaagatgccgatgtgccgcctatgctgggtgcgatggacagcgactgggaccggatcgactatgacggcagtttttactttcactcggataagatcttcgagctgagcgcggagtttcagaaggaagtcaatctgtgcacacctgatgatgcagactttcagagcatctgcccagtggaggataagcacatggaccaactaagacagtgtgtccagagtcttgtgacggcagccctttttgcggacagcaaatcccagacggccgccgtctgccatgcttttcagacacccctgatgggatctatctaccgagtgattgtgagtaagatggtccagttgctagcctttaagcagcaggaccatttgagccagcgatgctggcgactgctccgagcatgcaactacaacgccactgctaatcacaatgcctgccggccggagtacttcaacctggccgaggtactggtcagccagctaatggcaccttacgaaactatcaaagctccacacgtcgacccagatccgggacaaaccacctccatcaaaatggagtttgaagaagaactaaaggttgagccagaccagtgccataatccggaaacccaggaaaatccggaggtcatgggagtagagaaacaggagcaagaaccccagatgtttccgggtgagagcaccatggaacacacaatctacaagctgcaatcggaggaggaggaattgaatcctcagccggaggcggaacacctatccagctactttgcctgtccagtcggcaatggcctggtggacgagctgtgtgaaactataggacagctggcatctcaaagtggttacctacatgcagagtgcctgtttttgatcaagagacgcctagcgagattcttcgaaggtcgccacgtcagcagtgagagagactttaggtatatcagtagagcagtgcgcggtctcattgccctgggagaatatgcctttcgtgagtttattccctacatctacaaactgcgcgtcgaggaaatcccggatagcctgtggccggatctggctccggctgccatcttccttggcggtcatgatgacgtatacctgtatgaatggctggagtacggatgcggtgctgctctgcagcccttcttggtccactatgcgcgagcctacgaaaagatggtaaccagacggtatgtgaaggccaaacaacccgcttacagaatagaatcagtgccgggagtgcgtcggttggaatggagtactcttgcggcagccatgtgccacggagacgatcctagcaaggcactcaaaccgaagcctacgctctgcgaggctttccccgaccttcagtcaccaaatcttcagctcaactgcgcgggcaacatccgctttaagtttgcaggatgccgcccggtgctgctgaagccgaaggttgcgactgttccccactccgaagactcgccttcgtcggcagcgaacggtggtgggggtggcggtgccagctccgacatcctgatcgccaaacgaaaactctttaagcccctgaccaacgtgagaaagtggtcgcccatcagtggctatcactacctaaggatctgaaagggacttgggaaagtattataagaccttctggaggtccaggaggacctggggatctcaataaaactcttcgtttactttagacttcctcttcggtcttccgaaaggtgatacaactttactcgtaatacataaaaacacagaactaaaaaactgtcgaataagaaaaaac

SEQ ID NO: 7512 - protein, 646 aa, DROSOPHILA
MVTTPTTPTSSLGNYNLFDASFAVAGSGGHGLAGGIAGAEASGNSSRMGHQKSYAGFDPRSIKIFWEQHDQTDVELSQDVCARLAEDASYKVWELINNVKIYSRHSGGVVTYDLVNEVLKDADVPPMLGAMDSDWDRIDYDGSFYFHSDKIFELSAEFQKEVNLCTPDDADFQSICPVEDKHMDQLRQCVQSLVTAALFADSKSQTAAVCHAFQTPLMGSIYRVIVSKMVQLLAFKQQDHLSQRCWRLLRACNYNATANHNACRPEYFNLAEVLVSQLMAPYETIKAPHVDPDPGQTTSIKMEFEEELKVEPDQCHNPETQENPEVMGVEKQEQEPQMFPGESTMEHTIYKLQSEEEELNPQPEAEHLSSYFACPVGNGLVDELCETIGQLASQSGYLHAECLFLIKRRLARFFEGRHVSSERDFRYISRAVRGLIALGEYAFREFIPYIYKLRVEEIPDSLWPDLAPAAIFLGGHDDVYLYEWLEYGCGAALQPFLVHYARAYEKMVTRRYVKAKQPAYRIESVPGVRRLEWSTLAAAMCHGDDPSKALKPKPTLCEAFPDLQSPNLQLNCAGNIRFKFAGCRPVLLKPKVATVPHSEDSPSSAANGGGGGGASSDILIAKRKLFKPLTNVRKWSPISGYHYLRI

SEQ ID NO: 7513 - DNA, 4509 bp, DROSOPHILA
taaccataaaacgacgaaaatctggttcaaagacattcctaagagaatttggacagtgaatgtcatggtcgaatttgaagttggtaacaattgaaaatcttaaaaattattgtctcataaacatacttgcatataaaagatatatttagatggaaaataaaataataattgcttttgtccatcgcttcaacgattattttggtaatcaattttcagcaagtcacgccggacagtcgcatggccgtgcggtttttggaggacccgaagttggcctacttgatgacgcgatatcgcgaatgccacgacctaatccacacggtgctggacatgcccaccaatatgctgggcgaggtggctgtcaagtgggtggaggctctgaacacgggcctgcccatgtgctacggtggtgcggtattcggagcagttcgcctacgtcccaagtgagttcagtgaactgggttctctaattatagctccccattcacgcgtttgtttattttctcctccacttaggcagcggcgtgcgtacttgaagcattacttgccgtgggccctggagaacggcaagcggaccaagcccttgatgcccgtctactgggagaagcgctgggagcagaacatccacgagctgcgctccgaattgggcattactgtgctgaataaagcttgataaggctgtttatttttaagcccatttttaaattttgaacttatcgactattagtatcgagcagtcctatcgcgatcgtagaattgtgatctggcaacgtcgtgtaacgtcgaactgattgtagatgtttccacttacaaagaaaattattatttgattatagcaataaatataaaagttgatgcagtttgccgaaataatttaaagatcgagaaaaaaactttatattattttttatattagaatttgagcacagtgagaacagtcaatttccgcgaatgatcgcatcaaaacttaacccgatgtggcaactccactcgttctgtttgcatttgctgatgtgttgttttgtttttttcggtcgatcgtcttaatggctaattatccctaagttaaacaccatgactgagaaattcaatggttttagccacgacgagatcctcaagataacgggcgtgaaggagggcggtgtgggcaaaaggcctgcgagtctggaagcaggttagatcactaagcatgaaccccaaagcgtgtaaacaattatctgtttataataaaaacctttgcctatgtgtgcgtgagcagcgaagccggcgctccgaattcaacccggcattcggcgtatgcccgataagatcttccggcaagcggatcagttacggaagcagcagcagcagcaaccacagcaacccatacaaaaaccggatgtggcgaagaagaccaaatcgggaacagcgactcccacggaaaagccaccgactcccactcccgcggcggaggatgacgtagcgaacggatcgctaaatttggaccgcccactctccgattcattaatagaggcactctaccatggaaatgctacagctagagataagaaaactcccgccacgtatgcagatgctgaaacaacgtccaccgacgacagttcgattctgaagatcagcggcggtgacagccagacaactagctccaccgatgatggcagcatcctgccgagtacccaggacacctcgccgcgggagcgcctcaacacagactcacctttcaagggcatctcgctgaaggacttcgaacagcatcgccgcatgatcgaggagcagaacaagcagaagaagcaaatgctgtaccaggccatcgagcagcacacccagaagacggcggcggagtcgcgaaagatcgaggagatccgccacgagctgtccaagctggaaagtgatctggccgtggacgtagctctgctgaggaagcagatcgacaatgcctgcatacattttgccaatgtagagtaagtggcgaagccaaatacttgtgtgtttcccttattaatatttatgttacacagaaaacaatacgtcaaaatcgaggctcagttcttgcgggccaagatagagctgcacaatgcatccgaaaagaaggagctgctcacagagcatctatgcacagtaattgcccacaacgaggaccgtaaagcgcaaaagcttactgaattgatgcagaaagtgggtctgtcgccaaccgatgattgccaaccgattgatttaactcaacaaagcccctaaacacgtaacacgtgtaaattcaacttcaaatcatctttaattcgaattttcagcggtgtttgcttaacttgaccaaaagtatcaatttgttgctccctgaaatattatattttttaaattggaaaattatgtactaattttccatcggctatattgtattggaattgtaaacataaaacacgcctgaaatatgtcgaatgcgctctaatattagcatgtaattaatgttcatagcctaagtgatgaagtgcaaattgcaaataaaatatgtatatgttatgtgtaaaattaaagtgtaattactgaaactgagtagttggaactgcgacctaaataaaaataagggtattaaaaagcgaacattcttcaataatgttattgtttggctttgactatgtggcaacaccgttagctgcggcaacagctgatcgttttcagagtttaataaacgtgcaagctgaacaatacaatcggaaataagtgtttctaaacagaatacaataaattaagcatttataatggcaggccgcggaaggggcggcaagacaggcaccctcacggcggagcaaatggccatgttgggatgcacaaaggatatgccggtgcagacggcgccgccacctacatttccgcctgttttgaacagacccactaccctagaagtgggtacaaatccatttacattagtttaaaaaacatcgatcaactttttacctgttttacttcgatagacaacagccacacagaactatcagctcctgtggaaggaggactttctgaaccgaatgcgagattccccctattacatgatctccgccagtcgggacgcaaaaaaccttgatcacaaggactggcgagaagtaataatactggctattttaaattagctgcttataatcctgcttttacacccccagaaagccatggagcgcatgaagctcacagcacaacccgattttaactacaaagccatgccccaagagctaaacatctccagtcgaaaacgtcgtggagcagatgcaaggccgaatctgctgaccaagaagacaaacatcgaggacagactgaaggttctggagcagaaagaactgaaatcaggtggcggtgagcaggacgagaacaaacaagagtccgattccgaacaggaggaggaggaagatccggaggcggcgttggatgatgagatggacgaggacaacgactacggtgcaacgtactttgataatggagaagccttcaatgatgaggacgacaacttggacgatggtcccgtttactgagacaaataaaaccatcgaactgattactttcggatctgtgatttactatgtcgccactttaagcttatttaacacaaatgttggattaatttacacgtaagggaacgctggcttagtccaggctcttgggcgcgtagtagttgaagtggatgataccagaagatttcacctgcaaagcgtatttcaataagaccgatatgggatggaaggaatatggcagccacttacgaatccaatagtgccggccaggacgagaatgccagtgatgagcgcggcattgtacttggcgttcttctggctgtgctgctccttccagtctccagcgggcacgggcagatcgttcatggtggagtggggaccatgtccaccgtggtaagcggcacgcgacaaagcgccagctgaaatgagagaacaagaaagaatattcaagtgattggttttaaaaagggggtaatcccaacgaaatgcaacttggttaatgatctcatccaagtttcttccgatatctgtttggctaattctgataatatccatggctatgctgaagattggtgggtgaaccattccttcgcagttccttgaagtttctccctttgcttatccacattatgtaatttttaaggttagcagttttgctgaaaagaggtgttgggccactccaactcaccgttcttgagcagaagcccctgcttgacaatgtgcttaaccaacatgattgctcgaaagtagctggaaatgggtaaatatgggtttattttcactgccaatactttttcgcattataactcacccgaagattaccttgtgttgaacagtgtgaccgttgtgttgttatagaataatatctaccctacagttgggatgagatcacgagctgcatacttgttattacctacgatgcgatgaaaccttcaatgtatctattatactgaaatgtttaaataacaatatgatttaatacattttaattggtttctgtagtcttagcatatttttgcta

SEQ ID NO: 7514 - DNA, 1661 bp, DROSOPHILA
atttgctgatgtgttgttttgtttttttcggtcgatcgtcttaatggctaattatccctaagttaaacaccatgactgagaaattcaatggttttagccacgacgagatcctcaagataacgggcgtgaaggagggcggtgtgggcaaaaggcctgcgagtctggaagcagcgaagccggcgctccgaattcaacccggcattcggcgtatgcccgataagatcttccggcaagcggatcagttacggaagcagcagcagcagcaaccacagcaacccatacaaaaaccggatgtggcgaagaagaccaaatcgggaacagcgactcccacggaaaagccaccgactcccactcccgcggcggaggatgacgtagcgaacggatcgctaaatttggaccgcccactctccgattcattaatagaggcactctaccatggaaatgctacagctagagataagaaaactcccgccacgtatgcagatgctgaaacaacgtccaccgacgacagttcgattctgaagatcagcggcggtgacagccagacaactagctccaccgatgatggcagcatcctgccgagtacccaggacacctcgccgcgggagcgcctcaacacagactcacctttcaagggcatctcgctgaaggacttcgaacagcatcgccgcatgatcgaggagcagaacaagcagaagaagcaaatgctgtaccaggccatcgagcagcacacccagaagacggcggcggagtcgcgaaagatcgaggagatccgccacgagctgtccaagctggaaagtgatctggccgtggacgtagctctgctgaggaagcagatcgacaatgcctgcatacattttgccaatgtagaaaaacaatacgtcaaaatcgaggctcagttcttgcgggccaagatagagctgcacaatgcatccgaaaagaaggagctgctcacagagcatctatgcacagtaattgcccacaacgaggaccgtaaagcgcaaaagcttactgaattgatgcagaaagtgggccgcggaaggggcggcaagacaggcaccctcacggcggagcaaatggccatgttgggatgcacaaaggatatgccggtgcagacggcgccgccacctacatttccgcctgttttgaacagacccactaccctagaaacaacagccacacagaactatcagctcctgtggaaggaggactttctgaaccgaatgcgagattccccctattacatgatctccgccagtcgggacgcaaaaaaccttgatcacaaggactggcgagaaaaagccatggagcgcatgaagctcacagcacaacccgattttaactacaaagccatgccccaagagctaaacatctccagtcgaaaacgtcgtggagcagatgcaaggccgaatctgctgaccaagaagacaaacatcgaggacagactgaaggttctggagcagaaagaactgaaatcaggtggcggtgagcaggacgagaacaaacaagagtccgattccgaacaggaggaggaggaagatccggaggcggcgttggatgatgagatggacgaggacaacgactacggtgcaacgtactttgataatggagaagccttcaatgatgaggacgacaacttggacgatggtcccgtttactga

SEQ ID NO: 7515 - protein, 529 aa, DROSOPHILA
MTEKFNGFSHDEILKITGVKEGGVGKRPASLEAAKPALRIQPGIRRMPDKIFRQADQLRKQQQQQPQQPIQKPDVAKKTKSGTATPTEKPPTPTPAAEDDVANGSLNLDRPLSDSLIEALYHGNATARDKKTPATYADAETTSTDDSSILKISGGDSQTTSSTDDGSILPSTQDTSPRERLNTDSPFKGISLKDFEQHRRMIEEQNKQKKQMLYQAIEQHTQKTAAESRKIEEIRHELSKLESDLAVDVALLRKQIDNACIHFANVEKQYVKIEAQFLRAKIELHNASEKKELLTEHLCTVIAHNEDRKAQKLTELMQKVGRGRGGKTGTLTAEQMAMLGCTKDMPVQTAPPPTFPPVLNRPTTLETTATQNYQLLWKEDFLNRMRDSPYYMISASRDAKNLDHKDWREKAMERMKLTAQPDFNYKAMPQELNISSRKRRGADARPNLLTKKTNIEDRLKVLEQKELKSGGGEQDENKQESDSEQEEEEDPEAALDDEMDEDNDYGATYFDNGEAFNDEDDNLDDGPVY

SEQ ID NO: 7516 - DNA, 3784 bp, DROSOPHILA
gttatgtggtccagattccctatgagggctacttcacccagacggtggaggtgacgcgttgcattcaggcacgctgtcactacctggacggcggttgcttgtcgtcaccacgctgggtaagcctgttggtggcggagatcttctaccccaatgcggaggacacagtgcccaccagctcgaccaccactcaggccccttctgtgcaggatttccaggcctaccagcagtacctgcagaagagggcaggcgtggctaccgcctccgacggaacctcgtctggagcagccggccccgcggcgcaggtggacgcccactgcgatggacacgatgaactgggctgcttccaggtgcgtctctactacgactggttcctcatccccggctcttgcaagtgctggcgcccggactacttcgccaagtacgtgcgccggaagtcggtggccgagttgtgaacacttcctggacaggattttcgaaggaaatccttagaataagactaagttctagcctttagaggaacacaactttgaggtgaaaggctcattctagtaatccacccgggtgccccacagccctatacggatcacgcagagtttgcagttcgtgcatctaccagatacaatcttaacctaggcggttagctccctctttcgactgattaagccaagagcagtgcatttctactaataaatacgtttctacctaatcataagagagcctctctattcggcactttgctgagactgcgatgtggtattggcctagcctgtgtgtgttagcctcctggaactctctcagctgcgcttgtgttggaagatccaccgaaaacccacagaaaccagtcgcgcaagttgcgcatgcgtgcgagactcgggcccaaaacctcggccgctgatctagtgtgcagtcaatataaccagttggttggctttgggtgttttggccggggatccaagcgaccgagctgcattacatacacagaatagttgcagagtttgcgcagaagccttgacgaacggcctcaaaaggctgccagacgagccgcggactcggatttcaggagccaattttccgcatagcttgggtaagtcagccaaatggagggccgtctctttgtttataaacaaaataagcaaccaaagtggactaaggtacagatgcagctgcgataataacattgagtaaacttggtacttgaaggcaagaaactaacaaaatcattcatttgcacgtctcagttgagcccatttaaataaaattgtagagtttgaaatcaagtaattttgtgtggcgactagacgattttataaaaataaatttgttaaaactgcttgtaaataagtgggaaatatcttagctcagagattcagtcctaaggcagcgtgccagattcacacacattccatttggagttacccatgcaaatgagctcctattaatataagttatgcattggtgccaagcgtgggactatacgattcataatctcatcccactttccattttgcgccatccgcagacgaagatgctccgccagaacaagaataccagtaccagtctgctgaacctaagcataggcgatgtgggaggcagccatccacaggggcagtcgcaattttgggaactggatacgctgcctaagcagttcgtcctgtccatgaaaaagctcttcgacatcttagatgacaagcagaccggatacgtgcgcttcacggacatcgagaagggctggcaggatgatggctccaagggactgccacgcggagttgtggactcactccgtcgggtcactcccagtagcggacttctctccttcgagcggttctgcgccggcctcaagctgtgcctgctccgcaatcagcaaaacgctgtggaagacctgaagttgcggcctcgttcccacggaactcttgctccggagatggagttccattctcctgctccgccgccaaaacctccacgacaggtacccaagtcccctgctctgggtaaagacgacattcgccatgccctccaaaactggcaactgaacctgatggcggacgcaggaaagtcaaaaacgacgcagtcgcgggaacaattcgaacaccgtggatcggctgacggtggctcttcctccacctctgcttcggccaccgactggagcctggcccttccggctgtgcccaagaagaccagcagcaagcgcagagagtcgcggaggcacactctgcaacacggcatcgattacaacatgctaaaaagactgaagcaattggaggagcagcgggaactgcttcttttcggactcgatggcgtggagaaggcacgcgattggtatatgatgcaggtgctcaatgtacaggagcagataaagtatttcggccgtttaggaacccgatttgtaagtagtcctctagcttgtaattaatagttacccctttcctgattttcgcacaggatcagtggtctgaactgcagcaagaaaggctaaactttcaacgcgcccgcgtttttgaggccaatcgcagcctccagattctggccgacacctgggagcacggcggctacccactgcacattaatttggctgtgccgacacccaccgtcccaaaaccgaggcagatgtccgatctgctcagtcgggttcgcgagaagccgccgcttctgtcagacttgtacgaggcgcagcactctcattcccatccgcagttcctgcgtgccatgcccaacttcgtgctcagccagccctcgccggtcagccaatcctcggccgggctgggagacgccgacgtggtctactgacgaatcaatgctgctgcgtacattgtaaatagtgtattattaaacaacttgaactatgtaaagctatacgggattggggtagcggcgcatgtacttgttaagttgcttgtagttcaggttgctgcccggttggacgattccctggttcacggtcttcttcgcctcaaacttacggtccatgtagcacttgtagcagttctggaactggctgatctccttgtggcagtacttctccacgaattcgttgtctttcaagcaggcgaacagcacgcccatctcctggagacaggccacatcggatccggagtccgccttcccgctcacggtgttcttcagccgcagaggcagaatctcctggaagggcacgtccttctcgctttgaggcgctcggccgcgcgcggcaaacagggctccgggtacgcgcatctgaaaccccttggctctgtgagtccggtcatttcagtcaaaaaatacgattttacccacctcgtaatttccaccgactcctggacaactgaacagctgcttcagattacgtcacgaactggttcctgcttttggtggtgattgccagtacgtctgcagccctggtatttcgtttaacataagcatacggtcacacttagagtctccgtggaacaaaaggtaaataatcaacctgcgggcacgccaggagattcttcaaggatcaccgaagaccacgcgcacatggaagccgccgagcagctcgacgaggcggcagcaccagccgccctttgcgcgccttcgcgtgcagcctacgcggccgccgagcaggaagatccagacccagaccaggagcaggaccgaggccgggaatcgcccattggttcgttggagtgcgcccccaccctgagcagtcgcaagcggcagctgagtcgctttcatccataccacgggtccaatatccagttgggcgacgacgccacagtggcctaccggagagctagttttgccgacgccctgacattctcggagcgtc

SEQ ID NO: 7517 - DNA, 1293 bp, DROSOPHILA
cagaagccttgacgaacggcctcaaaaggctgccagacgagccgcggactcggatttcaggagccaattttccgcatagcttggacgaagatgctccgccagaacaagaataccagtaccagtctgctgaacctaagcataggcgatgtgggaggcagccatccacaggggcagtcgcaattttgggaactggatacgctgcctaagcagttcgtcctgtccatgaaaaagctcttcgacatcttagatgacaagcagaccggatacgtgcgcttcacggacatcgagaagggctggcaggatgatggctccaagggactgccacgcggagttgtggactcactccgtcgggtcactcccagtagcggacttctctccttcgagcggttctgcgccggcctcaagctgtgcctgctccgcaatcagcaaaacgctgtggaagacctgaagttgcggcctcgttcccacggaactcttgctccggagatggagttccattctcctgctccgccgccaaaacctccacgacaggtacccaagtcccctgctctgggtaaagacgacattcgccatgccctccaaaactggcaactgaacctgatggcggacgcaggaaagtcaaaaacgacgcagtcgcgggaacaattcgaacaccgtggatcggctgacggtggctcttcctccacctctgcttcggccaccgactggagcctggcccttccggctgtgcccaagaagaccagcagcaagcgcagagagtcgcggaggcacactctgcaacacggcatcgattacaacatgctaaaaagactgaagcaattggaggagcagcgggaactgcttcttttcggactcgatggcgtggagaaggcacgcgattggtatatgatgcaggtgctcaatgtacaggagcagataaagtatttcggccgtttaggaacccgatttgatcagtggtctgaactgcagcaagaaaggctaaactttcaacgcgcccgcgtttttgaggccaatcgcagcctccagattctggccgacacctgggagcacggcggctacccactgcacattaatttggctgtgccgacacccaccgtcccaaaaccgaggcagatgtccgatctgctcagtcgggttcgcgagaagccgccgcttctgtcagacttgtacgaggcgcagcactctcattcccatccgcagttcctgcgtgccatgcccaacttcgtgctcagccagccctcgccggtcagccaatcctcggccgggctgggagacgccgacgtggtctactga

SEQ ID NO: 7518 - protein, 400 aa, DROSOPHILA
MLRQNKNTSTSLLNLSIGDVGGSHPQGQSQFWELDTLPKQFVLSMKKLFDILDDKQTGYVRFTDIEKGWQDDGSKGLPRGVVDSLRRVTPSSGLLSFERFCAGLKLCLLRNQQNAVEDLKLRPRSHGTLAPEMEFHSPAPPPKPPRQVPKSPALGKDDIRHALQNWQLNLMADAGKSKTTQSREQFEHRGSADGGSSSTSASATDWSLALPAVPKKTSSKRRESRRHTLQHGIDYNMLKRLKQLEEQRELLLFGLDGVEKARDWYMMQVLNVQEQIKYFGRLGTRFDQWSELQQERLNFQRARVFEANRSLQILADTWEHGGYPLHINLAVPTPTVPKPRQMSDLLSRVREKPPLLSDLYEAQHSHSHPQFLRAMPNFVLSQPSPVSQSSAGLGDADVVY

SEQ ID NO: 7519 - DNA, 2979 bp, DROSOPHILA
tgtggagccggcgctgcggcgctctcgtagttgggctgcttgtccttgtcctcctcgagcagttgctggaagttcttgcgatacttgacgagaaagtattcggcgcccttgcgcttgcctttcttctccttgccggtcttcaggctgtcctggaatttgggcaacttcttggacatgacaaggtcggcgtgtgggtcatcgtggtagttgtcctgctccagagcctccaaggctttgcgggcacgccgctggcgggctgtggagtccaggacacgcttcttttcagcgtccttgatgcggttggattcgcgacccgtcatggttgtttttaggtttttacttttggctattggattttatgggttgtgtaggttctaagcgtccttgtcgtgcagcggaaagcttatccgatccatcaagtcgtccactcgcgcctgcaaaacttccacaatgtccgtggagataaacaaatggttctcgtccagatcctggataatgaatttgcgtcccagagccagtttttcgtccaagtgcagcaggaattgtttcatagcaggatcactgcggggattgggttgaatatagcgaaaccaacgcataccaaacgtataccacttaccactccaccagcactcctttcataacatttaccatgttgccagcatttgtttgccgaaattaataaacaatctcaccaattctcagagctgaatgacatattcacagtgaaacgtaggctagaggtggcagtctttactatcgatatttttttgactttacttgataatttaatcaataatttcagcatggcaatataatatttacaatcaacgaaatataacacattgctttaaaccagcacccgatattaactatattatgttagtttcaccgtcggaagtttcgtactttaagaaatatagctattttgccagccctatcagtgctactcactacgaaaagtagacagaagtagcggggtatttgccagtcacacggacaaacaccaaggcaaaagtgtgaggaaatattgaattccaaattaaattcctaattaaatcagaccataagcacgcaatggaaaggctgaccggaaggaatgtggcactactggtgctgtgcctgtgcgccggatacgccctggtgttcgccgagggcgagaaggagataccggttaccaaattcggacagaacatagcgccgacgatgactttcctttactggtgcgttatatgcggggcaattaacataattgataacaatgacctctgtgtttctcaccattgattcgccaaatagctactcctgcggctatcgcaaggcgttcgaggactacgtgggcctgctgggcgagaagtatccgcaaattcaggtgaatggcggcaactacgatccgccgggtctaaactattacctctccaagatgatattcgccctgaagatcataatcattgtgtccgtggtcagtgcggtcagtccgttcaccttccttggcctgaacacgcccagttggtggagccacatgcaggctaacaagatatacgcctgcatgatgatcttcttcctgggcaacatgctcgaggcccagctcatctcgtccggcgctttcgagataacactaaacgatgtgcctgtgtggtcgaaactgcagacgggacgctttccctcgccggaggtactctttcaaatcatcgacaaccatctgcagttcaccgaaaaggtgcaggagaatccggactttgttaaataatagcattggactgactggacggacggaggagcgcggaaaacagcagttggacaacaccaaaacagccgcagacatcgatttccggctctgaacctaacttaaacataagctcttgtcccgacattatccacttagctgtatttctgttttcaccccaactatagcctactctacacatcctaaacgcatccaatccgaaccgaacaaaatcgcatttgatcggatttagatgggatataaagttcgctttaatttcaatcaaacgaaatttcttgtgcattcgttttatgtgttgtacattttatttatcaaaaaactgggctttctttttggttgtgttacgtttacaataatcccaacaggggcacaagatttactttcgttgcagtggaggcagtggttactcttctcgacccctcttccataattccataattatatttggtatgtggcatatgtgtcatatggttttagtttttggtgtccacgtaattagattacatctccacggaaaatggcactgttctgtggttaaagttttgtttgtttggtactcgagttggggtttggatcgttatctcgtttcctggataggatagcaaattacttaagacgtatatttaactgctacttagttcgaactgcaatctagggggcggtggtgtcctcgcgtgggcgtcggttgtactggcgggtattgccaccatggcgagcatactcatcgtaggcctgcaggttgctcgggtgaaccctttgctggtaccttccgttcagatagtttgatgggccgcgactgcgcgtgatccaagaggagcgcgtggacccggcgttagattcgggattggaaccaggactggagcccgtggaccagctagagtacgatcccggattggagaccgatcctgctacgggtccggaatgccagctggatccagcattggtcctcgattgccaggcggcgttggagccaggataagctccggcattggagccaggataagctccggcattggagccagaataagctccggcattggagccaggataagctccggcattggatccagatgaccaggatccggagctggaaccaggactggactgagagccaggactggaagaccggccggattgccagtttgccctgtaattgccatctgttttcaaactgcccgaaggattactcgaggcagaaccatctgtgaaaccggaagacgcatctgccctgg

SEQ ID NO: 7520 - DNA, 903 bp, DROSOPHILA
caaacaccaaggcaaaagtgtgaggaaatattgaattccaaattaaattcctaattaaatcagaccataagcacgcaatggaaaggctgaccggaaggaatgtggcactactggtgctgtgcctgtgcgccggatacgccctggtgttcgccgagggcgagaaggagataccggttaccaaattcggacagaacatagcgccgacgatgactttcctttactgctactcctgcggctatcgcaaggcgttcgaggactacgtgggcctgctgggcgagaagtatccgcaaattcaggtgaatggcggcaactacgatccgccgggtctaaactattacctctccaagatgatattcgccctgaagatcataatcattgtgtccgtggtcagtgcggtcagtccgttcaccttccttggcctgaacacgcccagttggtggagccacatgcaggctaacaagatatacgcctgcatgatgatcttcttcctgggcaacatgctcgaggcccagctcatctcgtccggcgctttcgagataacactaaacgatgtgcctgtgtggtcgaaactgcagacgggacgctttccctcgccggaggtactctttcaaatcatcgacaaccatctgcagttcaccgaaaaggtgcaggagaatccggactttgttaaataatagcattggactgactggacggacggaggagcgcggaaaacagcagttggacaacaccaaaacagccgcagacatcgatttccggctctgaacctaacttaaacataagctcttgtcccgacattatccacttagctgtatttctgttttcaccccaactatagcctactctacacatcctaaacgcatccaatccgaaccgaacaaaatcgcatttgatcggatttag

SEQ ID NO: 7521 - protein, 198 aa, DROSOPHILA
MERLTGRNVALLVLCLCAGYALVFAEGEKEIPVTKFGQNIAPTMTFLYCYSCGYRKAFEDYVGLLGEKYPQIQVNGGNYDPPGLNYYLSKMIFALKIIIIVSVVSAVSPFTFLGLNTPSWWSHMQANKIYACMMIFFLGNMLEAQLISSGAFEITLNDVPVWSKLQTGRFPSPEVLFQIIDNHLQFTEKVQENPDFVK

SEQ ID NO: 7522 - DNA, 2529 bp, DROSOPHILA
ttaaaaaataatttgtagtaatgcttacttaattacgttattgtaattgaattccgcagcacacacagtggttgtgcaattacaaaaattatttaattatatttaccttattattttctattaattcaagtatgaaaataacaagctagatatttttactctgagaaattgaattttgcgggcttgcaaaggttgagttttttcgagttctgaaatctgcgcactttaaacatgttcaatgccacagacaaaccatcctatttgtccttgctcgcctgtttatgctccacttgcccccaaaccatccactcccatcttcttcactctcttctttctcctctctccactctcccctttcacctttcaccattcgcaagtcgcggtaatcgcacgcatcggtcggacatgtattcgttttgacaaccttcccacctggcacgacgttttgtctgtcaaccattgtaatcatatttccaacagcagttaacccgggggatgaaaggaaagtgtggaatgcggggcgaaagcacgttctttctgtgccgcaagcaaattgaacagggagcaaccaattcgagatgccaccgaggagagcccaaaaaaaaaattaaaaaaagcaaagcaatcgtgcacttattgaatatcatattttatatgaataaacaaaatgcttgtgaatattacaatcaatattacagctaaagatcaatatgcagttctgccaataacatacataacattacaatcaataattacacttacgcctggacttttaaaaccctttcaatgcacacatttttggatttgtttttatgttatacatatatatgtacatacaatacatatgtttgtatgtatttatgatggctttctatgcgcgttacgcatacgccccgttgacgcctcccgttttctgaccctgcaaacaaacggcattgtgccgcaaaatgaaggaaattatggaatgagtggattgattgaatgggaacgggtgccgatgaagaagtagattgtgctcttatgaacgggaatgaaggagcatttcggagcaatatccatacaaaagaacaacaatgaattgaagggctttggttggtggttggtgggggggaaatgtgaaattgatattgatattatgcaatgttgtcccgcaaatgaatcgaatcgaatgggaatcggagcgaaacgaaacgaaacgaaaaacccaaacgatgagagtcgattttacgagccttaaacatgacactgaaatgaacttttttttcaaacggaggcttcttcagccaagtggatgtggatgtggatatggatgtggatatgaatgtggatatggatgtggatgtggatgtgcgaatgcatacgcagatttttacgacattttgttagcggattcagtgggtctcgtattcgaattcgcattcgcagtgcgaatggccagggaaatggatcgaatcggtttggatcaaaacgaatcggacaggatttccgctgtcatcgggaccatagatgcgtccgccagattattataagttgatcacactgcaatcgctagtttctcttccttaaatttttggattttttcttttgcctgcagttttaggatgcaatctgtttgaacgaatgccgtggaaaatgccaacggaatgatctcattttcccttttgttcaaacgagcgacgttgttttccaatgcctgaaatgttggccttctaatttaccatcgaattgagttgctcactggcattcatgacaccattcatgaatatgatgattttgctgggctgcaaagttgaaatttaatttcgactgtgtgcaagtctctgctcctttcgcctgtcttcgctgtttgtttgttaataatgtaagcgttttaatatttaatattgcgcatacgacatgttgcgccagctttttttttggagctgacatttaaatgaattttcaataatttcgctgtcggttttttggcagccgatagagttgttgttgctgttgctgttaggttgggaaagcaccaccaacaagcacttaacgcctagaaaggacctttataccagtgcccgcatccacaaggatatcacacacccattccattttcggtggcgcaacctactgacgaaaatgccatttgtgcaaatctaataaacagcgaaccgcattaaatttgacagtgaggtgtgggaggtgttcagggcagaatggatatatatatataaaataatatatatatatatgtgtgtgtgtgttcagggagaatcgtgtctctgggaaaacgtgtcaattgagcggcgttttgggaaaatgggcgcaaatgcgtcctggtgggcggcacaatggcccaactttcattacggcatccgcaacgaatcctttggccaaatatagactaacttacttgataccgtgttttataaagtatttatatatatatatatatacaatatatttctttattatttatacatcaatggcattagtgattttccttcttttctcttacaccattaaaccttaaaaactgatttatta

SEQ ID NO: 7523 - DNA, 529 bp, DROSOPHILA
aagaagtagattgtgctcttatgaacgggaatgaaggagcatttcggagcaatatccatacaaaagaacaacaatgaattgaagggctttggttggtggttggtgggggggaaatgtgaaattgatattgatattatgcaatgttgtcccgcaaatgaatcgaatcgaatgggaatcggagcgaaacgaaacgaaacgaaaaacccaaacgatgagagtcgattttacgagccttaaacatgacactgaaatgaacttttttttcaaacggaggcttcttcagccaagtggatgtggatgtggatatggatgtggatatgaatgtggatatggatgtggatgtggatgtgcgaatgcatacgcagatttttacgacattttgttagcggattcagtgggtctcgtattcgaattcgcattcgcagtgcgaatggccagggaaatggatcgaatcggtttggatcaaaacgaatcggacaggatttccgctgtcatcgggaccatagatgcgtccgccagattattataa

SEQ ID NO: 7524 - protein, 124 aa, DROSOPHILA
MNRIEWESERNETKRKTQTMRVDFTSLKHDTEMNFFFKRRLLQPSGCGCGYGCGYECGYGCGCGCANAYADFYDILLADSVGLVFEFAFAVRMAREMDRIGLDQNESDRISAVIGTIDASARLL

SEQ ID NO: 7525 - DNA, 3558 bp, DROSOPHILA
gaatgatatatgttctgcagccatgcaatatatataagtacaatttattaaattttttaatctaacattgctgtggtgagtatgggggttgggtcatagcgtttagtataagtattttaagttaagtacttttcttgagtgacatggactggtaacattaacatatggcacaatattttaattatttttacaaatagcatttaattttaaactagcattaatttctttttatatttttggataccccgtcagaaggacgaaagcaccggaaggacagaaggacaggagtcatcgccggggataaattggagttttgcagcatttaaatatagccgactgtcccacccactgtccctcccactgaaatcttaatgttgcagatctattgcagaaatcttattgttaataaagcggttcatgacatggattggttgtggtattggtactaaagagggcggatcttaaactcctcccactgttatgttattatctcaaaaacagtggaaaatttttaatgattttttaatttaatgaaatattcctgaaatgtccttaaggtctgaggagttaaggtttgaggaggtctagcgtgcaaaatgttggggagccgattattctatcgcattatttttttactttcttgagccctataagtagtacatagatagttagatctgccattttgaaacatttttgcatttttattcttgggaatttactcccaaataacgttagcgcaaatttattaattaatgtatttattaaataaatttattatactgataacatattaatatagcaaaaaaaaatacgtttttgaatatatgtgcattctttttaaactgctgcacacatttattatttttttggactcttacaatactttttcaaaaattttaaatataactgcgactttgagcgatactttcacttttcccgtgacgccaaccgatatgcacagcgcttgcagccctggccaattttgatgtgtttcagcattgtaccctgacaaccctgctctgtaaaactaggaaaaacagaaaattttattttcaattgttaaatatccaaacgtaaacagccggaaaatgtcacgacaagcctctcgtttggacgccaagaaagtggtaagttggccaaagaagagagaacagcgcaagatcggtatcgttagtcatttggaggcatagatctagttgtaaggttagatttgtgccatagtgcctaagaacgaatctttgacgtgccatccaccctcaaaatcggcttcattcacttttccagtaagtgtgtgtgttgggggcttgaggttgagacacggacacacagacaggcacaagccgacgtgcaatcaggcaatggaaaaccatttcagcgccaccagtcgcccctcagccacgcccagaatgtgcaccaccgcctctgccgtcggtgctgccgccagcgccgccgccgccgccggcaacaacaataacaacagcaatagcagcagcaacaacaacgcaacaaccggcaacaatttaagtgttagcactgcagccggaggagccacaaatgccgcagcaacggcacaacccatccaagtgataccaatgcccatgctgcccaccggagcggcgcaaatcataattggccagcagccacagggtcaggcgacggcgacgggtctgcagccacaattgataccgctgcaggccaaccagattatgctgcaggctgcgcagcagcagccacagatgcaggtgatgcagctgcccgatggccagactatattctatcagacgcccaccattgccgccttggatccgaatgcagcggccaacgccgcagctgccatggcagcccagccgacgccgcactacctcaatatcaatgggcagctggtgcagatcaatccagcaccgagcgctaatcaggcggcacccacagctgggcaacagattataatggtgccgcagacagcgatggcagcggtgaatgcagcggccgccaatgccggagtaggcgccggagtgggcacagtggttacccaacaacaacagcagcagcatcaacaagtacaatcccagacccaaaaccagcagcagcagcaacagcagcagacggtggcggcggtggctgccagtgctgcagtcaataatataagcgccgatgtcagcacaagtacaactggaacgaatacgaacagcgaggacgagagctccaagggcgaggcggacgaggagccgctctatgtgaatgccaagcagtacaaacgtattctcattcggcggcaggccagggccaagctagagtcgcgcatacccaaggaacggtgcaagtatctgcacgaatctcgtcatcgccacgccatgaatcgggctcgtggcgagggtggtcgcttccattcggcacaggagaagggcgaccaagattcgtccggcccggaaggcggcagcatgccaatggcgtccagtggcggcgtcaccctcagccgtggcacggcacgtgctccgcccaaactgatcgcgccacatcaaacgcccagcattaccataacggcgatcaaatcggaatagtcgcctcctagctgtaggatacaaactagataagattgtagtcatagcgtttagtcctaagccagtcgctctgtgtccatttgtcctcaatcacaccactttagtcggctcacatagttttcattttttttttttttcaaaattaagtcttcatatattattttcaaagggaatttttgggtttttctatttattttcattcacttagattggaaaagtgataagttcaagaaagagataattgttttacttattatattcattttctaaatcgtttctaatttctaatatttattttctgttagccagctgttaaaaattgtttgtaattattaaatagagaatttatttcatttactagacattttcaaaatttacacaagtaatgcaattattaatttagggtttatagttcatttcaaaatggaatggggaaagggctgccaatagtcaccgcaaaacaacagagctcaacaatataagattcaacaagggtgaatgatatagtcgccttccccgactatcagatacccgttactcagcttttggaaatgcgaactcgaaatttcaaaagttcataaatttcaaacaaattttttggcaaatcgatagaagactaataaaattatgaaaaaatatccaaaaaattttcaaaagtgtgggagtggcaattttgtgcggcttgtgggcgctgcgtcgtggtctctatcattaacctcaatatcaaccctttagcgtttatatttcctgagatctcttttaaacggacagacggacatggttacatcgactcggctactgattccgatcaaaaatatatatactttatatggtcggaaacgcttccttctgcctgttacatacttttcaacgaatctagtatactctttgaatctacgagtaacgggtaaagcaccattgaggaccatttgccgcataataaatgcaacacagtttataaaattaaaaaaaaaaagcatatacatttactgcggaactc

SEQ ID NO: 7526 - DNA, 1401 bp, DROSOPHILA
gtaccctgacaaccctgctctgtaaaactaggaaaaacagaaaattttattttcaattgttaaatatccaaacgtaaacagccggaaaatgtcacgacaagcctctcgtttggacgccaagaaagtgtaagtgtgtgtgttgggggcttgaggttgagacacggacacacagacaggcacaagccgacgtgcaatcaggcaatggaaaaccatttcagcgccaccagtcgcccctcagccacgcccagaatgtgcaccaccgcctctgccgtcggtgctgccgccagcgccgccgccgccgccggcaacaacaataacaacagcaatagcagcagcaacaacaacgcaacaaccggcaacaatttaagtgttagcactgcagccggaggagccacaaatgccgcagcaacggcacaacccatccaagtgataccaatgcccatgctgcccaccggagcggcgcaaatcataattggccagcagccacagggtcaggcgacggcgacgggtctgcagccacaattgataccgctgcaggccaaccagattatgctgcaggctgcgcagcagcagccacagatgcaggtgatgcagctgcccgatggccagactatattctatcagacgcccaccattgccgccttggatccgaatgcagcggccaacgccgcagctgccatggcagcccagccgacgccgcactacctcaatatcaatgggcagctggtgcagatcaatccagcaccgagcgctaatcaggcggcacccacagctgggcaacagattataatggtgccgcagacagcgatggcagcggtgaatgcagcggccgccaatgccggagtaggcgccggagtgggcacagtggttacccaacaacaacagcagcagcatcaacaagtacaatcccagacccaaaaccagcagcagcagcaacagcagcagacggtggcggcggtggctgccagtgctgcagtcaataatataagcgccgatgtcagcacaagtacaactggaacgaatacgaacagcgaggacgagagctccaagggcgaggcggacgaggagccgctctatgtgaatgccaagcagtacaaacgtattctcattcggcggcaggccagggccaagctagagtcgcgcatacccaaggaacggtgcaagtatctgcacgaatctcgtcatcgccacgccatgaatcgggctcgtggcgagggtggtcgcttccattcggcacaggagaagggcgaccaagattcgtccggcccggaaggcggcagcatgccaatggcgtccagtggcggcgtcaccctcagccgtggcacggcacgtgctccgcccaaactgatcgcgccacatcaaacgcccagcattaccataacggcgatcaaatcggaatag

SEQ ID NO: 7527 - protein, 399 aa, DROSOPHILA
MENHFSATSRPSATPRMCTTASAVGAAASAAAAAGNNNNNSNSSSNNNATTGNNLSVSTAAGGATNAAATAQPIQVIPMPMLPTGAAQIIIGQQPQGQATATGLQPQLIPLQANQIMLQAAQQQPQMQVMQLPDGQTIFYQTPTIAALDPNAAANAAAAMAAQPTPHYLNINGQLVQINPAPSANQAAPTAGQQIIMVPQTAMAAVNAAAANAGVGAGVGTVVTQQQQQQHQQVQSQTQNQQQQQQQQTVAAVAASAAVNNISADVSTSTTGTNTNSEDESSKGEADEEPLYVNAKQYKRILIRRQARAKLESRIPKERCKYLHESRHRHAMNRARGEGGRFHSAQEKGDQDSSGPEGGSMPMASSGGVTLSRGTARAPPKLIAPHQTPSITITAIKSE

SEQ ID NO: 7528 - DNA, 5609 bp, DROSOPHILA
ttttgcgggttttatctataagcagttggctacgaatcttatcgccggtagtcaaaaataaacttcatcaataagttcgtaaaagattatatgtatgagggtggctgtccatggatcaactataagttcaggaatgcttttctagaacaaaaataagaaccaacatgtaaacagttacctaaccttcttgtggattattcaaatcataaacctaataattgagaaacctttggaaaactaactgtaactgttgtaaagttacagacacttgtttggtctaaagatgagtcaattgcgatataaagttattgatatcgttaccgctgagtcacatatgtatatttatactttttaatgccttttatgccttacataaatgcatacatacatatgtcctttgaaatcagtttgtttgttattacaaagaaattattaattaaaagagataaaataagcacatacattacactaaaggtttaaagattatttttaatatttcagtaggtaaaaaataattcaaaatgaatgatcctttttctattaaaagtacaaattttcgacatgcttatcgccccttcaacgggggggattttttgagcatgggcgcttctggcaggcgtcatattgtttatgggtctatttaattggggttccacctgttgagagggcacaacaataacatttaaaacaatgtccacatgcttcgatttacttgtttttttcttttactcccaaaagtaccgcctgtttgggccaatgattcattttcgatcgataaatggaatgcttttctggaaatggagctttcgagactggaagttaaaattagtgatagcaaaggtcccaatatcaactgcacttctttttttatatatgtacaaatgcgaattgaaagataaaagctcgccgataagaagcagtgacgaatcgctctggttcggtttttaaacgtcaggcttttgcaaaccaatagtttagtgaaaagacaaactttggtcagttcagacgcattttggagtcagaagaacgcaagtgaataaaagaaactatttttcataggaataacttatcaacaattaacgcacaatgggtaagtagaatgagtaacctctgataagtgcaaccaaaaaaaaaaaaatgattttgcaatgccaaagtctaatgaaataagtgtaatttaccttcaagatcatcaaaatcaaaaaatatattgttgcatattagcttaattaaattcaatttcccaattacgggcgaagaaatccgcaagtgctgaccaattctgttggtattgcgatttttttctctgtgcacattagccggaagaaaagcaaagagcattgagtgacttctacagttctccgcctttctttgctctttccaggcgccgtgcagccaggaggagttgtgaccgttggtaggacgagtgcagtgagcccagggtgaaacccctacgcctctgtgaaaccccaaatcccatttgatccccgcccccagaccacctaggccacccaaaaccacccaaacccgcaaaaccgtacagcaagccaaatatgtacacggagaaaaagctatgagagtatgagtatagagtgaatcattatattgtacattgtacttaatttttaatcaaaaccgtatccatttaataatgcagcttcgggatgataaatgtttaccttttgaaaaagtacgaagttagtaaatcttaatctttttttttttaataacaatatataatatctatcaagacaatattaatataacagtgatttaaatcaatcaagtagagttttaagatatttccaatggaaaggacacgaaacttactctccggttttcgctctgtgtacagataggttatcttatcgcgtggtatcaaacttatcgccctactgcctttctccttgcagacaacacctgggtgcactcgtctccatacagccccctgcccccatacgcggttatcggtggccatgactcggaccgcacgcccatctatgtgggtcgatcctttcacgaaggcgagaatcttcccgccaaggtcgtaccgagcaagggatgcgcctatgtggcctacggtggtgcggagcacacgaagacgcactacgaggtgctggtgggtcagggatttgcctgggtgcccagttccagcggtggagtgccaccgaatgcggtgaggagcggaacgacgcgaacgggcgagccgctctatgtgggacgcggacatcatgccggaagcttgactgtgggcaaagttcatccatcgcacggctgcctatacattccatttggcggccaggaggtgcgcatcaacacctacgaggtgctcatcaagcagcagcacgacgtctgggtaccggcctcgcccagttacactcctccgggcgcagtgatcgccggacacgactccgaccgtactcccatttacgccggaagggcaatgcacgagggtgaaatgctgcctgccaaggtggtgccgagcaagggaaccgcctacgtttgcttcggcggatacgaattccagaagcccagctacgaggtgctcactggctacggatatgtatggatgaattgcggccacagcattccaccaaacgccgtaaccacgggtcgtgctcgcaatggagagctgctgtactatgggcgaggacactaccagggcagtttgacaccgggtctgatctcggccagccagcgttgcctctatattccgtacggaggtcgggagattcgcatcaactcgtacgagattctctgcagacaataagctaaaggaacggaacactacagataccatatgcatttagtctagatcaaactgttatcgcagccaaataaactgattgttaataccggaagaaatctgtgggcattttgtgttccttctatttttaaaatacttatccctgcaaatgtattatactgatatggccaaaatggactgtcggattagacaggttttacaaaatttatgagctacgatagtggcttgctatgaaggtcatttccttatattctacctttcttccacattatttacttttaaagaaatttaaaattactacatcatttttttgcatgtctatagatgaaatagcatattattggttagtcctttatgataaactaatcacttctgaataagcaaataacaaaatgcatctttctttcagcctacaagtgggttcaatcctcggcctactcctcccttcccgaggaggcagtggtgggcggcaacgatgaggacggcgccatgatatacgtgggcagggcggagcacgagggcgatatgttggtctgcaaggtggtgccgagcaagcaactgggattcatttcgcagcgaggagaggcactgcccaaggacatcttcgaggtgctgtgcggtcagaatctggtgtggatcaagtgctacgatcatgtgattccggagaatgctgtactctgtggacgcacatcgctggatcagccggtttacattggtcgtggtcattatgagggtcatctgattatcggcaaaatctcctctgtccatcgagctttgttcatcgcttttcgcggtgccgaacgtcgtctggattcctatgagattttggtggaggagcgcagagtggttcctggctggcagctgccgccaccacctcctccactagaggagccggaaaagtgtccactatcgccgccgccaccaccttctccaccggcaatggcgccgccactgccggccaaaccatatccatatccggatttggctgcgatgccatttcctgacaggcctccggcctacacacccactccggatcccatgccacccgttggaggtgtgatggtgatgccgagtccaaccccaccaccgccggcgggaggagtgctggtcatgccacgaccaccaccaccaccaccgcctgcaggtggtgtgttggtcatgccacctcctcctccatcgttcactccagctgaggtggcgccaccgccatcatttgttcccgcagaggtgaccgcagtatccgttcccgtggcaccatcgtttacacccgcttccacctataatccctacgaggcgggatgctcgtcctacactccggccgagtgtgctgctccttcggcatatgacgcctacggctatggcaacaactatgacgtttgggtatcagccgaaccgggctattattactctcccgatgccgtgattggaggtcatgacagcaacatggagcaattgctggtttgccgggcctactaccgtggtgtccatgttcctggcaaggccattcccagccagggatgtggctacatagcccacgggggtcgtgaaatcattgagccatcgtaccaaatgctggtgggcaagggcaaataccactgggtgccatcctacggcggaaacgttccacctggagcagttgtggccggaacgacacctggcggagcaccactctacattggacggggtcactactgcggcagcttgacacccggtgtaattgagacctacaaccgatgcctccagatcccattcggtggccaagagatccgtctgagcaactatgaagttcttgttaggagcgatatttaccacggacagcaggccatccgcctggtttactgaagacatatttaatctggaaaatccgagagcagctaggccatgaaaacccataaacaaattttttgttcctataaattattccaggcatatctttgtatattgtgaaaaactacattttaattattaattacctatatttatatacgcactcaatattaaatgcatctaagccaaatgcaaaatgtgaaactacctctacacacattatatttaaccgacatgtttatttactagttaagatacttatgcactaattatattgacacacttttaaagttcgttgtgtaataaatgttttatttatttaatgacgcctttggatttaatcatttgttatggtttgggtttcttattacgtcggttctaccacgtgtaaaataagttagtaattatactatgacaaacaaagactctttaacatttccataaacgcttgaacaaaatcgtaaagaacaaagttcttccgccttaacatagaaattacaattagaagatggtaagtaaacgatttgcgggcacgagagtttaaggtcaaaataatattgtatcacgtagaatagtaaacttggcttaatgtgcggaattaaaaacgctgtattcccagcttagcaaagaaccccatatgcttgaaaacctccttgaacccacacgggttttaacgattagacaaatctggcatttcccacaactatccgttattggccaacacaagatttcttaaacgattctggtttttcgacgtcaactcggcgcacaagatgaaagagaagaaagagaaaggcgaaacaggtaagagtaaatatgagcgaatgcgtcataatgcgcactctggaaatacaccgtcagaaaaacttgaatatttaaacttgaatttaaactcacattctacatattttaatattttcacgcttttaatgtgtttttttaatgatatgcactttaagcaattaattttttaaattaaacaaatttcagttctttattaaacttattacttcga

SEQ ID NO: 7529 - DNA, 2333 bp, DROSOPHILA
ttcagacgcattttggagtcagaagaacgcaagtgaataaaagaaactatttttcataggaataacttatcaacaattaacgcacaatggacaacacctgggtgcactcgtctccatacagccccctgcccccatacgcggttatcggtggccatgactcggaccgcacgcccatctatgtgggtcgatcctttcacgaaggcgagaatcttcccgccaaggtcgtaccgagcaagggatgcgcctatgtggcctacggtggtgcggagcacacgaagacgcactacgaggtgctggtgggtcagggatttgcctgggtgcccagttccagcggtggagtgccaccgaatgcggtgaggagcggaacgacgcgaacgggcgagccgctctatgtgggacgcggacatcatgccggaagcttgactgtgggcaaagttcatccatcgcacggctgcctatacattccatttggcggccaggaggtgcgcatcaacacctacgaggtgctcatcaagcagcagcacgacgtctgggtaccggcctcgcccagttacactcctccgggcgcagtgatcgccggacacgactccgaccgtactcccatttacgccggaagggcaatgcacgagggtgaaatgctgcctgccaaggtggtgccgagcaagggaaccgcctacgtttgcttcggcggatacgaattccagaagcccagctacgaggtgctcactggctacggatatgtatggatgaattgcggccacagcattccaccaaacgccgtaaccacgggtcgtgctcgcaatggagagctgctgtactatgggcgaggacactaccagggcagtttgacaccgggtctgatctcggccagccagcgttgcctctatattccgtacggagcctacaagtgggttcaatcctcggcctactcctcccttcccgaggaggcagtggtgggcggcaacgatgaggacggcgccatgatatacgtgggcagggcggagcacgagggcgatatgttggtctgcaaggtggtgccgagcaagcaactgggattcatttcgcagcgaggagaggcactgcccaaggacatcttcgaggtgctgtgcggtcagaatctggtgtggatcaagtgctacgatcatgtgattccggagaatgctgtactctgtggacgcacatcgctggatcagccggtttacattggtcgtggtcattatgagggtcatctgattatcggcaaaatctcctctgtccatcgagctttgttcatcgcttttcgcggtgccgaacgtcgtctggattcctatgagattttggtggaggagcgcagagtggttcctggctggcagctgccgccaccacctcctccactagaggagccggaaaagtgtccactatcgccgccgccaccaccttctccaccggcaatggcgccgccactgccggccaaaccatatccatatccggatttggctgcgatgccatttcctgacaggcctccggcctacacacccactccggatcccatgccacccgttggaggtgtgatggtgatgccgagtccaaccccaccaccgccggcgggaggagtgctggtcatgccacgaccaccaccaccaccaccgcctgcaggtggtgtgttggtcatgccacctcctcctccatcgttcactccagctgaggtggcgccaccgccatcatttgttcccgcagaggtgaccgcagtatccgttcccgtggcaccatcgtttacacccgcttccacctataatccctacgaggcgggatgctcgtcctacactccggccgagtgtgctgctccttcggcatatgacgcctacggctatggcaacaactatgacgtttgggtatcagccgaaccgggctattattactctcccgatgccgtgattggaggtcatgacagcaacatggagcaattgctggtttgccgggcctactaccgtggtgtccatgttcctggcaaggccattcccagccagggatgtggctacatagcccacgggggtcgtgaaatcattgagccatcgtaccaaatgctggtgggcaagggcaaataccactgggtgccatcctacggcggaaacgttccacctggagcagttgtggccggaacgacacctggcggagcaccactctacattggacggggtcactactgcggcagcttgacacccggtgtaattgagacctacaaccgatgcctccagatcccattcggtggccaagagatccgtctgagcaactatgaagttcttgttaggagcgatatttaccacggacagcaggccatccgcctggtttactga

SEQ ID NO: 7530 - protein, 748 aa, DROSOPHILA
MDNTWVHSSPYSPLPPYAVIGGHDSDRTPIYVGRSFHEGENLPAKVVPSKGCAYVAYGGAEHTKTHYEVLVGQGFAWVPSSSGGVPPNAVRSGTTRTGEPLYVGRGHHAGSLTVGKVHPSHGCLYIPFGGQEVRINTYEVLIKQQHDVWVPASPSYTPPGAVIAGHDSDRTPIYAGRAMHEGEMLPAKVVPSKGTAYVCFGGYEFQKPSYEVLTGYGYVWMNCGHSIPPNAVTTGRARNGELLYYGRGHYQGSLTPGLISASQRCLYIPYGAYKWVQSSAYSSLPEEAVVGGNDEDGAMIYVGRAEHEGDMLVCKVVPSKQLGFISQRGEALPKDIFEVLCGQNLVWIKCYDHVIPENAVLCGRTSLDQPVYIGRGHYEGHLIIGKISSVHRALFIAFRGAERRLDSYEILVEERRVVPGWQLPPPPPPLEEPEKCPLSPPPPPSPPAMAPPLPAKPYPYPDLAAMPFPDRPPAYTPTPDPMPPVGGVMVMPSPTPPPPAGGVLVMPRPPPPPPPAGGVLVMPPPPPSFTPAEVAPPPSFVPAEVTAVSVPVAPSFTPASTYNPYEAGCSSYTPAECAAPSAYDAYGYGNNYDVWVSAEPGYYYSPDAVIGGHDSNMEQLLVCRAYYRGVHVPGKAIPSQGCGYIAHGGREIIEPSYQMLVGKGKYHWVPSYGGNVPPGAVVAGTTPGGAPLYIGRGHYCGSLTPGVIETYNRCLQIPFGGQEIRLSNYEVLVRSDIYHGQQAIRLVY

SEQ ID NO: 7531 - DNA, 5386 bp, DROSOPHILA
agtagttgaagtggatgataccagaagatttcacctgcaaagcgtatttcaataagaccgatatgggatggaaggaatatggcagccacttacgaatccaatagtgccggccaggacgagaatgccagtgatgagcgcggcattgtacttggcgttcttctggctgtgctgctccttccagtctccagcgggcacgggcagatcgttcatggtggagtggggaccatgtccaccgtggtaagcggcacgcgacaaagcgccagctgaaatgagagaacaagaaagaatattcaagtgattggttttaaaaagggggtaatcccaacgaaatgcaacttggttaatgatctcatccaagtttcttccgatatctgtttggctaattctgataatatccatggctatgctgaagattggtgggtgaaccattccttcgcagttccttgaagtttctccctttgcttatccacattatgtaatttttaaggttagcagttttgctgaaaagaggtgttgggccactccaactcaccgttcttgagcagaagcccctgcttgacaatgtgcttaaccaacatgattgctcgaaagtagctggaaatgggtaaatatgggtttattttcactgccaatactttttcgcattataactcacccgaagattaccttgtgttgaacagtgtgaccgttgtgttgttatagaataatatctaccctacagttgggatgagatcacgagctgcatacttgttattacctacgatgcgatgaaaccttcaatgtatctattatactgaaatgtttaaataacaatatgatttaatacattttaattggtttctgtagtcttagcatatttttgctatgtgacttttaaccacgtaaagaacactcacgcaatgcgctcatccccaaccgatagtctgtaaacgcctctgcagaagctctgttaaatcagctgttggtgcggaggcgttctccaattgctaattgcaagtgcaaacaactggccagttgttgattcttgaaaggactttattcgagaccagtgcatcccgaagatatacccagccatgctgtccattggcgctatggccaacatcaagcacacgctgcagaaggaactcttcttggcctccggagaacgcctcctttctgtggtgacggtggtcaagaagaaggacaagaagccgtgctacctttgcgttgtcaccacggcgccaccggtacccgtggtcactttgtgcctgatcaaacagtcggagcagcgcgagggcgaatacaagcgcaagcggagctggcagctggacgagattaagtgggttgacggccggaacgagcagttcgagacgcacgagttcgatctgcagttggaaaagctgtacaaatggtacgcccttaaccctcacgagcgccaaaactttctggccgtgctcaatcgccaaatccaaaaaagcgtgcgtggccagcgggcggaattccggaatgtgcccgcagcgtggttgtcggagaagtcgccggaaaaggtggcattgggcagagcggttcagaagacgcaacacatggacgacgaggaggacgaagaggaggaggcccaggagtttaccgctctgacggacaaagaggccaatgagctgggcaaacttttctccgagtgcgacttcgccattaaagatgctgagcagttcatagagcagctgtcgcgtgagctccacgatttggatggggttagtaaattgggcttgtccaccgtgtatacattactcataatttcttatctcgcaggccaatatgcaaagtgtacttgcctcggaacagaaggttctgaaaatgatggaacacatcgacaatgctatctccgaggcggataagtttgaaaaccgtcttgatagctacgaggacattctggggcatgtcaaggaaaccatggagaaaattggaggcaaaaatgccatgatcgaaattgccaacaataacaatatcaagcttatgaaggagctcaacaaagtcatagtgcgtattcttagtgtactcaattttatactgtttaataattctgctacttctgcagagtcaactggatctgccgcacagccagcagcaggctctggatgaacccgatttaaagaccgccaatggacgcaaagcagccattgcagctgctcagtgcctgcaacaggcaatgaacagcgatatagatcctgctctgctgcgtttggaggcggtgcaggaccaacgcaagcgctttgaaaagtggaaacaaaaattctctgccacggtcagtcggtttatgaacaacctcttcatccacctgggcaatgaaataggagacatgcaggtgactagcactgaacttacgctgcctaaccattccaacgtccatcgggaactgacgccttatactgagctgatgcactggacaaaagccatggatcggaagacctacgatggtctaatgcgtgtgtacacagcatcgctgagcaagatctatgacagggatgtgaggaacttcttcaatttggtaagacatgaacatggaaatgtaatagtttgtaatctaagctaatctcgatcacttctgattattttataggctaaaattcaggtgacggaaaagcttcgtaattctcgggaggatctggacatgtctacgtcttcaagaaagtccgcagtttccacaataccttatggcacactgggaatcaacagggatcagtggggtcccggtgtagagacagcggatcgaatgcgttttgatgcattgttggaaaaggttctagctgagctggaacccatcgccctgcaggaacagcttttctgcatcaacttttttcagatggacgttattagtccaacgacaaagaacacacagactacgttggagatggaaaaggcggtggatatgacacagtcaatcatatcaggagcggtttcgccatcaggtgatggtgttccgcagaagcggattgaccgtcaaattaacgaagatgtgcgtaaactgatgatgggccttttcggttgcctagaaccagagctagttagcttcatccagagctttgagcgtgtagacagcttgtaagtaaacaatatagtaatggagtaaggagtaattaacaaatttgttttcgtagctactctctgtacgtttttgtgcgacttacgcagcacgtcatgtccgcccaggacacacattcctttcttagcatgaccttcgcttccgccttggtgcaggtgaagcggagcttcgaccgctttatgcagaaccaactactgtctatccgggaggcaaagctgcacaaacgttctaaggccattctgccgtatgtggaaaactttgaaaactttgcccaaactgcagagggcatatttcggaaatcggatcgccgaacggacatggagaagtggtacttgcagctggtgaatgccatatttgagggcatccaactgcattcgcaggagcaccccaagacaccagttcaggtagtgcgcatggagaactaccaccacatgtacgctttgttagcccagctcaaggttcctggtctggacgccctgaaaaaggaggccaagaagtgttataacgatgcgctaaaagcgtatgtgactcagtacttcggccggccgctggagaaactgaatgtaagccaaagtcaatgaccttccagaagaaaagataagtcgatcttcatctcataaatttccgttctgcctttgcagcaattcttcgaaggcgtgcaacttaaggtggcccagggagtcaaggaaacggaaatcagctaccagatggcattctccaagcaggaactccgcaaggtgatcgctcagtatcctgcacgagaggtgaagaaaggactggagaacctatataagaaggtggaaaagcacctgagcgaggaggagaatctgctgcaagtggtatggcatgccatgcaggaggagttcattgcccagtataattacctggaggagcgcatccaaaagtgctacgccggcgccatgatcaacctggagttcaacattcaggacatactcgccttcttctcggacatagcgcgctcccactgatctagggattggaatctgaaagtcagggagcggttcaaccgggttttatttttaagtgcaatagtatttaaagcgctgtttctgctgattgcaaaatatatggcgcgtatatttaaacagatgtggatctgcgaatgttcgaaacgtccaagagagagggatcgcgtagtgaaaaatcaacgagactaggccttaaagggaacttttcaacagctagccattgaagttgattattgtataagttctaagctaaaattacatagccaatactcaacttttgtccaagaatgcgagtaaactaaattttatatataaaaatgtagaatttctagagatcttacttgatctttagtacgtcagcttttaaaaatcacagatagaagtttgactttttgtatttatacttttatagtataactctaatttactaccgtgcacattcaaacagcctcctaaggtcaaagagagctcttcaagatcaaaagagatagatcatagcctaaagagagagagagagagagagagtgctcgaagagtgagctttccggggtggcttttcgttcgccagccgttggagttcgggctggtgctcccagtcaagccgcgcgactctttcgcatcggttgtcgcctgtccgcgtgatttacccaactgcagtataagcattttatttcgtgtattttaaattgttctagccgtacgtgtttccgtgtgtgctcatgtgccgtgttgataactccgtgaaatgcaaatggtaattgcaaatggcaaatggcaaacggaaaatggaagaagccgcaacgacttgcgactgaatgtggtgcatattttatgaagctccgacagggagaacaaaaagttagactaccgccgaaccgatccgatccgaactgatcctccctcctgtctgggctgtcccataaacatggccaccatagcgacccgtccgaccagtttcgtgctgttgtgcggttgtcgctcctgactcggttctccctaccttcccgtgacccccatccccatccccgtctacattcccattcccatctcctccagccgttccattccttagcttaccttagcctgtcttgccctccgccttgcatttctcatgcacacacgttgcccgctttttgtgcttttcgtgcgctcccgtgctcatgttcttccactttttcggcagcctgtagtacagtggatgccggttaacggaagacatttacattttaatgcatgttcgacatggaaaactaatcggatacgaaacgcatacaaaaagactattctttttaggaccttaatgagatgcaggaatactgag

SEQ ID NO: 7532 - DNA, 3064 bp, DROSOPHILA
aaacaactggccagttgttgattcttgaaaggactttattcgagaccagtgcatcccgaagatatacccagccatgctgtccattggcgctatggccaacatcaagcacacgctgcagaaggaactcttcttggcctccggagaacgcctcctttctgtggtgacggtggtcaagaagaaggacaagaagccgtgctacctttgcgttgtcaccacggcgccaccggtacccgtggtcactttgtgcctgatcaaacagtcggagcagcgcgagggcgaatacaagcgcaagcggagctggcagctggacgagattaagtgggttgacggccggaacgagcagttcgagacgcacgagttcgatctgcagttggaaaagctgtacaaatggtacgcccttaaccctcacgagcgccaaaactttctggccgtgctcaatcgccaaatccaaaaaagcgtgcgtggccagcgggcggaattccggaatgtgcccgcagcgtggttgtcggagaagtcgccggaaaaggtggcattgggcagagcggttcagaagacgcaacacatggacgacgaggaggacgaagaggaggaggcccaggagtttaccgctctgacggacaaagaggccaatgagctgggcaaacttttctccgagtgcgacttcgccattaaagatgctgagcagttcatagagcagctgtcgcgtgagctccacgatttggatggggccaatatgcaaagtgtacttgcctcggaacagaaggttctgaaaatgatggaacacatcgacaatgctatctccgaggcggataagtttgaaaaccgtcttgatagctacgaggacattctggggcatgtcaaggaaaccatggagaaaattggaggcaaaaatgccatgatcgaaattgccaacaataacaatatcaagcttatgaaggagctcaacaaagtcataagtcaactggatctgccgcacagccagcagcaggctctggatgaacccgatttaaagaccgccaatggacgcaaagcagccattgcagctgctcagtgcctgcaacaggcaatgaacagcgatatagatcctgctctgctgcgtttggaggcggtgcaggaccaacgcaagcgctttgaaaagtggaaacaaaaattctctgccacggtcagtcggtttatgaacaacctcttcatccacctgggcaatgaaataggagacatgcaggtgactagcactgaacttacgctgcctaaccattccaacgtccatcgggaactgacgccttatactgagctgatgcactggacaaaagccatggatcggaagacctacgatggtctaatgcgtgtgtacacagcatcgctgagcaagatctatgacagggatgtgaggaacttcttcaatttggctaaaattcaggtgacggaaaagcttcgtaattctcgggaggatctggacatgtctacgtcttcaagaaagtccgcagtttccacaataccttatggcacactgggaatcaacagggatcagtggggtcccggtgtagagacagcggatcgaatgcgttttgatgcattgttggaaaaggttctagctgagctggaacccatcgccctgcaggaacagcttttctgcatcaacttttttcagatggacgttattagtccaacgacaaagaacacacagactacgttggagatggaaaaggcggtggatatgacacagtcaatcatatcaggagcggtttcgccatcaggtgatggtgttccgcagaagcggattgaccgtcaaattaacgaagatgtgcgtaaactgatgatgggccttttcggttgcctagaaccagagctagttagcttcatccagagctttgagcgtgtagacagcttctactctctgtacgtttttgtgcgacttacgcagcacgtcatgtccgcccaggacacacattcctttcttagcatgaccttcgcttccgccttggtgcaggtgaagcggagcttcgaccgctttatgcagaaccaactactgtctatccgggaggcaaagctgcacaaacgttctaaggccattctgccgtatgtggaaaactttgaaaactttgcccaaactgcagagggcatatttcggaaatcggatcgccgaacggacatggagaagtggtacttgcagctggtgaatgccatatttgagggcatccaactgcattcgcaggagcaccccaagacaccagttcaggtagtgcgcatggagaactaccaccacatgtacgctttgttagcccagctcaaggttcctggtctggacgccctgaaaaaggaggccaagaagtgttataacgatgcgctaaaagcgtatgtgactcagtacttcggccggccgctggagaaactgaatcaattcttcgaaggcgtgcaacttaaggtggcccagggagtcaaggaaacggaaatcagctaccagatggcattctccaagcaggaactccgcaaggtgatcgctcagtatcctgcacgagaggtgaagaaaggactggagaacctatataagaaggtggaaaagcacctgagcgaggaggagaatctgctgcaagtggtatggcatgccatgcaggaggagttcattgcccagtataattacctggaggagcgcatccaaaagtgctacgccggcgccatgatcaacctggagttcaacattcaggacatactcgccttcttctcggacatagcgcgctcccactgatctagggattggaatctgaaagtcagggagcggttcaaccgggttttatttttaagtgcaatagtatttaaagcgctgtttctgctgattgcaaaatatatggcgcgtatatttaaacagatgtggatctgcgaatgttcgaaacgtccaagagagagggatcgcgtagtgaaaaatcaacgagactaggccttaaagggaacttttcaacagctagccattgaagttgattattgtataagttctaagctaaaattacatagccaatactcaacttttgtccaagaatgcgagtaaactaaattttatatataaaaatgt

SEQ ID NO: 7533 - protein, 889 aa, DROSOPHILA
MLSIGAMANIKHTLQKELFLASGERLLSVVTVVKKKDKKPCYLCVVTTAPPVPVVTLCLIKQSEQREGEYKRKRSWQLDEIKWVDGRNEQFETHEFDLQLEKLYKWYALNPHERQNFLAVLNRQIQKSVRGQRAEFRNVPAAWLSEKSPEKVALGRAVQKTQHMDDEEDEEEEAQEFTALTDKEANELGKLFSECDFAIKDAEQFIEQLSRELHDLDGANMQSVLASEQKVLKMMEHIDNAISEADKFENRLDSYEDILGHVKETMEKIGGKNAMIEIANNNNIKLMKELNKVISQLDLPHSQQQALDEPDLKTANGRKAAIAAAQCLQQAMNSDIDPALLRLEAVQDQRKRFEKWKQKFSATVSRFMNNLFIHLGNEIGDMQVTSTELTLPNHSNVHRELTPYTELMHWTKAMDRKTYDGLMRVYTASLSKIYDRDVRNFFNLAKIQVTEKLRNSREDLDMSTSSRKSAVSTIPYGTLGINRDQWGPGVETADRMRFDALLEKVLAELEPIALQEQLFCINFFQMDVISPTTKNTQTTLEMEKAVDMTQSIISGAVSPSGDGVPQKRIDRQINEDVRKLMMGLFGCLEPELVSFIQSFERVDSFYSLYVFVRLTQHVMSAQDTHSFLSMTFASALVQVKRSFDRFMQNQLLSIREAKLHKRSKAILPYVENFENFAQTAEGIFRKSDRRTDMEKWYLQLVNAIFEGIQLHSQEHPKTPVQVVRMENYHHMYALLAQLKVPGLDALKKEAKKCYNDALKAYVTQYFGRPLEKLNQFFEGVQLKVAQGVKETEISYQMAFSKQELRKVIAQYPAREVKKGLENLYKKVEKHLSEEENLLQVVWHAMQEEFIAQYNYLEERIQKCYAGAMINLEFNIQDILAFFSDIARSH

SEQ ID NO: 7534 - DNA, 6815 bp, DROSOPHILA
atttattaaggctagtttaagaaatggttgaaatataagaataagaaatataataagaaatatattaatttaaaacctcctgacatctccgattttactgtgggcaaaccaatcaataaaagtattataatagaatggaaaatgaataagaaattaaaaaattttaaaaagaagttttccctgcaataaaactgaaagaaaaaatctttagactttttgatctgcgaacttcgaagacttcagaatagtattgggtgagtacgctactatttagaggataggatcattataaataaaaatatgcaaaataaactcttaactcccacggcaatgataataatggtgttaatttgcatggaaagtatcgtcatggtacggttccttcgttcgcaatttatccgttagatctgcattgttacgttacgtagagcagtctaacggttaattcgccaagacggaaacgaagttgctgcttttattgttgttggctgccactgattggagagctctttcgcgctcacattgtggttgttgctgttgctgccacttctgtgggggaaaaaaggaaaaggcaagggaaaagaagcaaaaagcatttccaatttggaggcattaaatagcgtgggagcgagaggggtgcagatatagacgtacgcctacgtgcaaatatgcgatttctgctgacggaaattgcaagttgcgattacataggcactcattctaccttgattgcacatggtcttatgtattccgaagtgtttgcagatggataagagcccgtaagagttgtaaaacctctgccatttatgtgcagccctttgttctctatccccctccctcttcaattttccgcttgtacatacagaaacgaacaaagaaacggctggcaaagcaaaagaaaagagccaaacgccgacgtcaatgtcggcgtcgacgcaggcagcggcagcgaccgacgatgtggcgaccgaaaaacagagtcagcgaagagcgcctgttttagtgcaacaccaacattcaacgagagcggttcgtcgacgctgtgcggaaagattacagagcgaacgagagagaccgagccagagcgacgacgccccgcaacgagaacaacaaaagagccgagtgcgcgtgcaagagagatagctgacttgttgcccagtgagaggccggcgagagcgagacggacgatcagtgtgcgagcgacgaaaaagaaaacaaagatactcgcccagagcagttggctacctgtctttggcctggtatataagtgtgtgtatgcgagagagagtaaatagcgggcaacgcagcagtacataaacgaaaagcagcgtggtcgttagtcgaacaaaaactctcaaagcgaacggacgtgtgcggtcggttgtttcgatactcctgctttatcgctatccaaacagagtgaagcgaccactataaataacgaaacaagaaacatgtgtttatattacaaccagagctcaaagcttcagttgcataataataataataataaaaaagcaatctgaagccaatttcctttgtgtgacaaatgccgtagcagcaacaacagaagcacaacacaactacgtctgctggcttatgtacgtcgcgcgcgcttgtgtgtgtgtggggcagaaaacatagagcaaagcataatacacaataaaggtgcccgcgaaagcagagcagccgaaagtgccagcgcgtgttggtgtggtttgaatgtgcaggcgaagtgaagaagtagaaagaaaataaaataaaataaaagtgaagtggagcatagtgaagaaagagaagcagaaacgctgactcaaaactcaagtgtggattatttacttggattattcctcttgccattggattatttatgtatacaaggcgaccaccgcgatgccaattaactggctggattattagtggattaaagattggatacaaagggaactgaaaaccgattccgagcctgagttggtggacacactgcgtccgcggtaccttcaatgcccggccatgtgccgtgtgagccacttgaagaagttcgtctacgacaaatttgagattgatgcccagcgttttagtatcgacattatgtacaaggtcaagacaatcgttctgcttgactactacacgctaatggacattgcctacatctacacgtggaaacgggatgcacccatgcggttttactaccgtgtttatgagtcgccccagccgctggtgaagccggctcctcgtcgagtgctgccactaaagctggagaagcaggagagggagaatcaagagcaacagctggcagttgaagtcgcgtcttcgaaggtggaacctgtgtccctgcccgaggaccaaaaagccgaagcttccattaaagtggaggagcaggagagcactagagaaattgtgaaagaagtgatcaaagatgtggcagccacacccccgacagagacactgaagctggtgatcaaccgaaatatgctggacaagcgtgaaaagagtcactctccacagatgagctccaaatcgtcgtcgaaaagttctccctgcactcccgtttcgtcaccctcggagcccaatatcaagctgaaaatcgatctgtccaagcagaacagtgtcaccattatcgatatgtccgatcccgagcgcagagagattgttaaacccctaaagcccgagaaggagtcacgttcgaagaagaaggacaaggacggaagtcccaaatcgtcgagcagctccagttcctcttcaagtggagagcgcaagcgtaagagtcccagcccgttgacggttcctccattgaccattcgcacagagcgcatcatgagtccaagcggcgtgagcaccctgagtccaagagtaaccagcggagctttctcggaggatcccaagtcggagttcctcaagtcgtttgcactgaaacccatcaaggtgaaagttgaatcaccggaaaggacgttaaacaacagagccatcaccccgccttcgccttcagtgcaacagtccgcttcacccaaatcgaagggtaacaacctggacgacagtattcttatgaaaccgcccagctgcatgcctcccaaatccattgcatcttcgaagagaaagagcaaagaaccagttaaggcggtgtccaagaagcaaaaactatcgccgccccttccaacggtggactttaagatacgcctgcccgtcaccaatggcaattcttcaggcactgcatctccaaagatagaaaaaccgctgatgccaccgccggcaaagccgccaatgttggctccccggaaactccagccctccgctcagtttgcgccgcctccatcgccgatacatcatcatgccggtgtgcagatgtcagctcctggtaatcgaacacccatcgccaaacgctatcagccaattttacccaaagcttcgcgaccaaatccctttgccaatataccaaacgatgtgaatcgattgctcaaagatgctggtaccgaaatcaagtcgattggtggaggatcagtggagaacaacagtaacgctgcccaaaagccacatctgtacggacccaagggagaaagtaagatgggacccccggccttacctgcaaccaccccatctcagggtaacaaaaacgttggaaagcaggcaggcaatttgccgatgtcagcgccgcccaataagggtaacagttcgaacaactatctgaatctggcgctgttcaattccagtaagtgcaagggcaaggaggcgcctcctggctgccgcactcccatgtacacgccaaattcgccgatatactcgcccagttcgccgcagtatgtgcccagctacaatattccaacaatgcccacctataagtatacaccgaaaccaactccaaattctggtagtggtaacggaggctctgggagctatctgcagaatatgttgggaggcggaaatggtggatctcttggcggattattcccctcaccgcccaccaagtcggatcagaatactaatccagctcaaggaggaggaggttcatcttcagctactcaaagtggaggtaataatggcattgtgaataacaatatctatatgcccaatgaagatgcgcccgaaaagcagcaggtgaaggtcaagtctctgctcaactcgtgcaacatcaatattccctcctcgctatcgatcaccatctctcgggataatggagattcttcatcacccaataacggacagcatcctaagcacaaaagtccggtcaacaattacattgagattgttaagctgcccgatcagccgcaggatcaggtccaggctgccaaggaggctcagaaacggcagtcaccacctgctgccgttccaggacatctagccgcaaagttgcccccgccgccaccatccaaagctattccttcgccgcagcatttggtgtcgcgtatgacgccgccacagttacccaaagtggccactccaccgcctccaagttctcctcgcgtgatcacgccaccaaaaacatcaccacctgccaatgccgcaaaggtaacgcctttgaagccagtgctcacgccaacgcaggtggataagaagacacccagcccggagaagcgaaccgccgcccagatgggcagtcattcaccaactgccagtgaaaacaagtcgcccaagggcggacctgcaggagtggcaaattcgactggtggcgctcagaatggcgatccagcggccaagaagttccgacccattctgccccgccagaatggcatgcctgagttggcacccaagctgccaacactggcgcccttcgttggtttcaacccactgcaaaatccagccgctggcaagaaggtgccgcccagcaagaagtcaccgaatgccggagcagctgcccaccagagcggccaacaaaagctggtcaatggtggacagtcgcagccggctcaacagaaaactagcccaccagcccagaagaatcaacagcaggtgaagaaggtgtccaagaatccgactccaccgccaccatccttgccggcagtcggcaaaatgatgccccatcccgtcatgcacagtcagaatgctccactaagcatcgcctccagcgccagtgctgcggcagtcgcctccgggcaattggacctgagcaacttcctcaaggagaacctgaggcgggtgcatgccgcgcaagcggcgcaggctgcccaggtggcggccgctgccaaccagtcgaatatgatgtacaatctggcccaaatgggtcacatgacgccagcgatgtacaactaccagcaggcatatttcagggagcagttgtcgcggatgcagcgcgtcggaaacgaggttttcaacgattacctgcaaaagctgaagactgcagcagcgaccggaggaggtggtccggtagaaggagagcttaagcccatgctgcccaccgtcacgttgcccagtccaggagctactccgccggcagccagtccgaaaacatcacccctgccagctggaaaactcacggcagcagctacggcaccccaaaccaagggaaacagcagcagtggagcggctaatgcacggcagcagacggcggccaccggcaacaacggagcaacagtgcccgccgcctccttgccaccggccaccaaaagcaagtgaaggagtcgtcccagcagcccctcgtagatcgtagctctaattaatttttaaagaccttgttttagttattcatttacgttacccgttcgttcgttggcgctttggcagagtccacgaccagaaccaattcctcgccctaattacggtggcacggtggaatccaacccctgcatctgggggtggattctcctcacccaaaaaaaaaaaaaaagaaaatgttacacaatccagccgagtttaggctgccccccttcggtagtagtgagccaacgctctgtaaatatataatgatatatacaaatgtctagacttaggaattgtattaaaaataaacggaggataagacagtgattcagaatcgatatatatatgcagttatacgaattatatttattcatagccgtaagcgatgataatcctaagtgtaaatagcagacataagatatcatttatataatcttttctatgtaaaatcaagcggaaaaatagaaatctaatttatgcgaaaaacgttgacgtcttttaatgccacttcctaattcccaatgactttagctcacgcgcacacacacacacacacagttggagataccgggtcggacaatggactggtccaatcccaatgctaatcaactggccaaggtcagaggtcgaccttccccgcagaccgaccgctgcgtttcgagcgtttctaatctgccaattcccactgaatgaacgcctggcgacggggaaagaaaaatgtcgaaatgtctttaaaatgaaaaatgtccgagcattttgaacattcgaccaaccgaccgaccatcggacacaaagggagtaaagattatattgggtttctcgccagcacggatgcggacaccgtgaaaccgagcagaaggaccgggaaggatggctggatttccttgtcgccgtttcgaaaaattcaataaaaacgattggaaattctgttgcctttgttgttgcctcgccgcccttttacctttatcttatttttttcccccgcttttctgccggatttcgcaaagtttctctgatttccgaactaggcaattttcacgaaaatgtgtcccaagaaagaaaacccaatccgacgtctcgaacgtaattcgtgtaatgaatgtgataagatagtagtagtagtagtagtaggcatcaggatgaaagggatgaactaaagatattttcagagggtctgagattag

SEQ ID NO: 7535 - DNA, 6015 bp, DROSOPHILA
tagtgcaacaccaacattcaacgagagcggttcgtcgacgctgtgcggaaagattacagagcgaacgagagagaccgagccagagcgacgacgccccgcaacgagaacaacaaaagagccgagtgcgcgtgcaagagagatagctgacttgttgcccagtgagaggccggcgagagcgagacggacgatcagtgtgcgagcgacgaaaaagaaaacaaagatactcgcccagagcagttggctacctgtctttggcctggtatataagtgtgtgtatgcgagagagagtaaatagcgggcaacgcagcagtacataaacgaaaagcagcgtggtcgttagtcgaacaaaaactctcaaagcgaacggacgtgtgcggtcggttgtttcgatactcctgctttatcgctatccaaacagagtgaagcgaccactataaataacgaaacaagaaacatgtgtttatattacaaccagagctcaaagcttcagttgcataataataataataataaaaaagcaatctgaagccaatttcctttgtgtgacaaatgccgtagcagcaacaacagaagcacaacacaactacgtctgctggcttatgtacgtcgcgcgcgcttgtgtgtgtgtggggcagaaaacatagagcaaagcataatacacaataaaggtgcccgcgaaagcagagcagccgaaagtgccagcgcgtgttggtgtggtttgaatgtgcaggcgaagtgaagaagtagaaagaaaataaaataaaataaaagtgaagtggagcatagtgaagaaagagaagcagaaacgctgactcaaaactcaagtgtggattatttacttggattattcctcttgccattggattatttatgtatacaaggcgaccaccgcgatgccaattaactggctggattattagtggattaaagattggatacaaagattgacgcttgtgcgaaaaacaaaagcgaatttttagcggcgagagtgtattattactatgatgacgccagaatcgaaagcaatacagccggcagcagcaacaacaaagcaaacagcagaagcaacagcaacaacaacaatggctcacacacaacaaaagtcgcagttgtcaacgttggcgaaaacaacaacgacaacggcaacgaataaggcggccaaaagcgttgtcagcaatgcaaatagcagtggcaacaattcgagcaaaaagctggctttgtctcagtctcagaaaacaacaacaacaacaacaccaccaacgacgacgacaacaacaacagcagcagcagcagcagaggcaacaactaatgctgataaaatgcaaaagcaacagcaactgaagcagcaacttttcgctgcctgcagcattaaagtaaaaagtgaaaacacattagcaactactgcgaatgcagcattagcagcagcaacaaccacaacaacaacagcaacaccagcacttgccaccggcaaagcagcaaaaacaatattagaaaacggcataaagaaggaatccacgcctccggctgtcgaatccgttgaggcctcctcctcatcgtcatcctcctcctcgtcctcctcatcatcatcgtcctcgtggccgacgacaaggagagccacttcagaggacgccagcagcaatggtggcgcctccgccgacgaggagaagtcggaggaggacccaacggcagctgtggctgcgtcttcaacggcgacaacgacttccgatttggccacaacttcaaggccacgccccgtccttctaacggccgtcaatccgcacatcatctgtcacctgtgccagggatatctgatcaatgccaccaccatcgtcgagtgtctgcactccttctgccacagttgcctcattaatcacctgcgaaaggagcgattctgcccgcgctgcgagatggtcatcaacaacgccaagccgaacatcaaatcggacaccacgctccaggcgatagtgtacaagctcgtgccgggcctttacgaacgggaactgatgcgcaaaagggccttctacaaggatcgtcccgaggaggcagctttggccacgcccgagcaacgaggcgatgatacggagcatctgatctttagtccctcggatgatatgtctttgtcgctagaatatgccgaattgggggaactgaaaaccgattccgagcctgagttggtggacacactgcgtccgcggtaccttcaatgcccggccatgtgccgtgtgagccacttgaagaagttcgtctacgacaaatttgagattgatgcccagcgttttagtatcgacattatgtacaaggtcaagacaatcgttctgcttgactactacacgctaatggacattgcctacatctacacgtggaaacgggatgcacccatgcggttttactaccgtgtttatgagtcgccccagccgctggtgaagccggctcctcgtcgagtgctgccactaaagctggagaagcaggagagggagaatcaagagcaacagctggcagttgaagtcgcgtcttcgaaggtggaacctgtgtccctgcccgaggaccaaaaagccgaagcttccattaaagtggaggagcaggagagcactagagaaattgtgaaagaagtgatcaaagatgtggcagccacacccccgacagagacactgaagctggtgatcaaccgaaatatgctggacaagcgtgaaaagagtcactctccacagatgagctccaaatcgtcgtcgaaaagttctccctgcactcccgtttcgtcaccctcggagcccaatatcaagctgaaaatcgatctgtccaagcagaacagtgtcaccattatcgatatgtccgatcccgagcgcagagagattgttaaacccctaaagcccgagaaggagtcacgttcgaagaagaaggacaaggacggaagtcccaaatcgtcgagcagctccagttcctcttcaagtggagagcgcaagcgtaagagtcccagcccgttgacggttcctccattgaccattcgcacagagcgcatcatgagtccaagcggcgtgagcaccctgagtccaagagtaaccagcggagctttctcggaggatcccaagtcggagttcctcaagtcgtttgcactgaaacccatcaaggtgaaagttgaatcaccggaaaggacgttaaacaacagagccatcaccccgccttcgccttcagtgcaacagtccgcttcacccaaatcgaagggtaacaacctggacgacagtattcttatgaaaccgcccagctgcatgcctcccaaatccattgcatcttcgaagagaaagagcaaagaaccagttaaggcggtgtccaagaagcaaaaactatcgccgccccttccaacggtggactttaagatacgcctgcccgtcaccaatggcaattcttcaggcactgcatctccaaagatagaaaaaccgctgatgccaccgccggcaaagccgccaatgttggctccccggaaactccagccctccgctcagtttgcgccgcctccatcgccgatacatcatcatgccggtgtgcagatgtcagctcctggtaatcgaacacccatcgccaaacgctatcagccaattttacccaaagcttcgcgaccaaatccctttgccaatataccaaacgatgtgaatcgattgctcaaagatgctggtaccgaaatcaagtcgattggtggaggatcagtggagaacaacagtaacgctgcccaaaagccacatctgtacggacccaagggagaaagtaagatgggacccccggccttacctgcaaccaccccatctcagggtaacaaaaacgttggaaagcaggcaggcaatttgccgatgtcagcgccgcccaataagggtaacagttcgaacaactatctgaatctggcgctgttcaattccagtaagtgcaagggcaaggaggcgcctcctggctgccgcactcccatgtacacgccaaattcgccgatatactcgcccagttcgccgcagtatgtgcccagctacaatattccaacaatgcccacctataagtatacaccgaaaccaactccaaattctggtagtggtaacggaggctctgggagctatctgcagaatatgttgggaggcggaaatggtggatctcttggcggattattcccctcaccgcccaccaagtcggatcagaatactaatccagctcaaggaggaggaggttcatcttcagctactcaaagtggaggtaataatggcattgtgaataacaatatctatatgcccaatgaagatgcgcccgaaaagcagcaggtgaaggtcaagtctctgctcaactcgtgcaacatcaatattccctcctcgctatcgatcaccatctctcgggataatggagattcttcatcacccaataacggacagcatcctaagcacaaaagtccggtcaacaattacattgagattgttaagctgcccgatcagccgcaggatcaggtccaggctgccaaggaggctcagaaacggcagtcaccacctgctgccgttccaggacatctagccgcaaagttgcccccgccgccaccatccaaagctattccttcgccgcagcatttggtgtcgcgtatgacgccgccacagttacccaaagtggccactccaccgcctccaagttctcctcgcgtgatcacgccaccaaaaacatcaccacctgccaatgccgcaaaggtaacgcctttgaagccagtgctcacgccaacgcaggtggataagaagacacccagcccggagaagcgaaccgccgcccagatgggcagtcattcaccaactgccagtgaaaacaagtcgcccaagggcggacctgcaggagtggcaaattcgactggtggcgctcagaatggcgatccagcggccaagaagttccgacccattctgccccgccagaatggcatgcctgagttggcacccaagctgccaacactggcgcccttcgttggtttcaacccactgcaaaatccagccgctggcaagaaggtgccgcccagcaagaagtcaccgaatgccggagcagctgcccaccagagcggccaacaaaagctggtcaatggtggacagtcgcagccggctcaacagaaaactagcccaccagcccagaagaatcaacagcaggtgaagaaggtgtccaagaatccgactccaccgccaccatccttgccggcagtcggcaaaatgatgccccatcccgtcatgcacagtcagaatgctccactaagcatcgcctccagcgccagtgctgcggcagtcgcctccgggcaattggacctgagcaacttcctcaaggagaacctgaggcgggtgcatgccgcgcaagcggcgcaggctgcccaggtggcggccgctgccaaccagtcgaatatgatgtacaatctggcccaaatgggtcacatgacgccagcgatgtacaactaccagcaggcatatttcagggagcagttgtcgcggatgcagcgcgtcggaaacgaggttttcaacgattacctgcaaaagctgaagactgcagcagcgaccggaggaggtggtccggtagaaggagagcttaagcccatgctgcccaccgtcacgttgcccagtccaggagctactccgccggcagccagtccgaaaacatcacccctgccagctggaaaactcacggcagcagctacggcaccccaaaccaagggaaacagcagcagtggagcggctaatgcacggcagcagacggcggccaccggcaacaacggagcaacagtgcccgccgcctccttgccaccggccaccaaaagcaagtgaaggagtcgtcccagcagcccctcgtagatcgtagctctaattaatttttaaagaccttgttttagttattcatttacgttacccgttcgttcgttggcgctttggcagagtccacgaccagaaccaattcctcgccctaattacggtggcacggtggaatccaacccctgcatctgggggtggattctcctcacccaaaaaaaaaaaa

SEQ ID NO: 7536 - protein, 1601 aa, DROSOPHILA
MMTPESKAIQPAAATTKQTAEATATTTMAHTQQKSQLSTLAKTTTTTATNKAAKSVVSNANSSGNNSSKKLALSQSQKTTTTTTPPTTTTTTTAAAAAEATTNADKMQKQQQLKQQLFAACSIKVKSENTLATTANAALAAATTTTTTATPALATGKAAKTILENGIKKESTPPAVESVEASSSSSSSSSSSSSSSSSWPTTRRATSEDASSNGGASADEEKSEEDPTAAVAASSTATTTSDLATTSRPRPVLLTAVNPHIICHLCQGYLINATTIVECLHSFCHSCLINHLRKERFCPRCEMVINNAKPNIKSDTTLQAIVYKLVPGLYERELMRKRAFYKDRPEEAALATPEQRGDDTEHLIFSPSDDMSLSLEYAELGELKTDSEPELVDTLRPRYLQCPAMCRVSHLKKFVYDKFEIDAQRFSIDIMYKVKTIVLLDYYTLMDIAYIYTWKRDAPMRFYYRVYESPQPLVKPAPRRVLPLKLEKQERENQEQQLAVEVASSKVEPVSLPEDQKAEASIKVEEQESTREIVKEVIKDVAATPPTETLKLVINRNMLDKREKSHSPQMSSKSSSKSSPCTPVSSPSEPNIKLKIDLSKQNSVTIIDMSDPERREIVKPLKPEKESRSKKKDKDGSPKSSSSSSSSSSGERKRKSPSPLTVPPLTIRTERIMSPSGVSTLSPRVTSGAFSEDPKSEFLKSFALKPIKVKVESPERTLNNRAITPPSPSVQQSASPKSKGNNLDDSILMKPPSCMPPKSIASSKRKSKEPVKAVSKKQKLSPPLPTVDFKIRLPVTNGNSSGTASPKIEKPLMPPPAKPPMLAPRKLQPSAQFAPPPSPIHHHAGVQMSAPGNRTPIAKRYQPILPKASRPNPFANIPNDVNRLLKDAGTEIKSIGGGSVENNSNAAQKPHLYGPKGESKMGPPALPATTPSQGNKNVGKQAGNLPMSAPPNKGNSSNNYLNLALFNSSKCKGKEAPPGCRTPMYTPNSPIYSPSSPQYVPSYNIPTMPTYKYTPKPTPNSGSGNGGSGSYLQNMLGGGNGGSLGGLFPSPPTKSDQNTNPAQGGGGSSSATQSGGNNGIVNNNIYMPNEDAPEKQQVKVKSLLNSCNINIPSSLSITISRDNGDSSSPNNGQHPKHKSPVNNYIEIVKLPDQPQDQVQAAKEAQKRQSPPAAVPGHLAAKLPPPPPSKAIPSPQHLVSRMTPPQLPKVATPPPPSSPRVITPPKTSPPANAAKVTPLKPVLTPTQVDKKTPSPEKRTAAQMGSHSPTASENKSPKGGPAGVANSTGGAQNGDPAAKKFRPILPRQNGMPELAPKLPTLAPFVGFNPLQNPAAGKKVPPSKKSPNAGAAAHQSGQQKLVNGGQSQPAQQKTSPPAQKNQQQVKKVSKNPTPPPPSLPAVGKMMPHPVMHSQNAPLSIASSASAAAVASGQLDLSNFLKENLRRVHAAQAAQAAQVAAAANQSNMMYNLAQMGHMTPAMYNYQQAYFREQLSRMQRVGNEVFNDYLQKLKTAAATGGGGPVEGELKPMLPTVTLPSPGATPPAASPKTSPLPAGKLTAAATAPQTKGNSSSGAANARQQTAATGNNGATVPAASLPPATKSK

SEQ ID NO: 7537 - DNA, 3848 bp, DROSOPHILA
tactctttgcgcttttcgtccattcgcttgtctatcgaatcgtagatagcgtccgcctcctcgtcatccttgtcgtacggatccttggagaacagggagccgctgtaaccactaaactcgtcatagtttgagtcgttcaagtcttcgtcctcctcctcctcttcgtcttttttcttacgtttggtggccggcggagcatggcggtcgtcggatacatcgtttgcatcacgggcaggaccaatatcggaccgagtggtgaatcctgtcgctctaaaatagaaaatataccattagcattaagttttgctttgcgagatgcgcgtttggtagtacttacccacgaccgacgccggcaacatagcccaatggggctgggacgcccaggaaatgctttttgttgcggttggctataaccgccgccgttatgttggacatcgtggcttagttctatattaatattatctactttatttaataaatttcacaaacaattgaaagttttctaatgcgtggtgcgcttcttcttctgaaattagggatgggaaaaatatatcaatttatcgatatattaaaataaatgtaaatatttatatcgtgatagtttttctatgatatatcaaatatcgctctttctgtaaaatattttattggacacatgtggattcataaaaaactgaaaactaagttattattcttaaaggatcactaaattattatatttatgatgaaatatctgatgataaatgataatatattatgaaatgtcaagaataatttgtttgggtactttatcattttgataatttttttaaatgaaaagtgtctgataacgacctgtagtcgcggattataaaagtatttgatatcggaacttagcctaaaaccaactatctttgttaaatatttttaaactgatatcagtgttattttttgttatattatttgttggaaaagtggaaaatggtcttctaccatacagttgtcatctatcgatcaaaagcgttgttcacattgtccatctctagattatcggtgtaaaataatttgcgaatcggaaaaattaattgacgaataaacaaaaacgtagcttaaatttttcattttccctggactttcgttgcaaatagaagcaggatgcccgtgctgccgatgccaccactcatgcaggtaaaaagtaaccaaaaatgcgttatctgaagccatataatcagcaaaaatcgcttattactccaacaatagaacgccgtggagccgatgcaagtggacatcgcgccgccgaacgaggacaacgaaaacaacgaggagcagcagattgtggtggagaaccccagcatcgatctcgaagtgtacgccaaccaatatgccgggatcgtgcggctccatcgcctaatttatgtggcggacgtctgcccggttttagccgtggaggctctgaaaatggccattacttacgttcaaaccacctacaacgtaaatctctaccaagtgctgcacaagcgcttgagtgatctaaacgctggaaatgcgcctgcgccaccagcaaatgctggcggagatcaggcaggagcagcggctcccggtcccctggcagctgctccccttccggatatcgcggcacaacctgtggctcaggctcaaggacaggctcaacccgctgtcgaaaaggatgccttcgcctacgatgccgcttgggtagacaccaagatgaagaaggcggctcttaagctggagaaactggactcagacctcaagaactacaagtccaattcgatcaaggagagcatccggaggggccacgatgacctggctgaccactacctcagttgtggcgacctcaccaatgccctgaagtgctattctcgggccagagactactgcactagtggcaagcatgtggtaaacatgtgccttaacgtgatcaaggtgtcaatttatctccagaattgggcccatgtgatgagctacatatccaaggcggaaagcaccccggacttcgccgagggctccaaggaggctaatgcccaggttcatactcgccttgaatgcgctgctggtctggcggaactgcagcaaaagaaatataaggtggccgctaagcatttcctcaatgctaacttcgatcactgcgactttcccgaaatgatctccaccagcaatgtggcggtctatggtggcctctgcgccctggccacctttgatcgacaggagcttaagcgtctggtcatcgcctctacatcctttaaattgttcttagaactggagccccaactcagggatattattttcaagttctacgaaagtaaatacgcctcatgtctgacgcttctggatgagattagggacaacctgctggttgacatgtacattgcgccccatgtaaccactctgtataccaagatacgcaatcgcgcgctaatccagtactttagcccctatatgtcagctgatatgcacaaaatggccatggcatttaactcgtcggtgggcgatctggagaacgaggtgatgcagttgatattagacggacagatccaggcgcgtattgactcccacaataagatcctgttcgccaaggaggcggatcaaaggaacagcacctttgagcgggctttgatcatgggcaagcagtaccagcgtcatacccgcatgcttgttcttcgtgctgcaatgctcaagagccacatccacgtgaagagcatttcccgggagggtggaagcaaccacggcgccgaactttgcgtctccgccggatcctcgacaactgctcaactcgcccgaatctagagcaatttaaaagcaccacttaatacccaataaattttttaagatatgtatatcacaagctggcaaaataaataattatagcaaagctaatgaatgattttaaaaactagttggttcctcaaaaacgaaaaagcaccatacttcatcgtgtaaatgaaatataaattaaattagaattttaaatatgacgatacaaattgataaaaatttattggtgggttttacaaaactaattctaccgcctggaccgatctctgcgctccctctcccttcttcggtctctgctaagcgatcgcgagcgatctctggagcgggatcgatctctccgatgcctattttcattgctccgccgttggtagctatgatccgagtccctagtcctttgatgtccatttcttttgtcgtccctgtgattgcttttgtgattgtcctcggagtcgctgctgtccgacgatgaagaggagtctgagctattgctaactgagccctttttgtcttttctgctcgatttgtccttcttggatttctttttcttgctatctttttcgtgcctttccttttttgatttcctttttgtgggcttcttgatgccctcgcctttgcgcttcattcgttcaatcttctccagtttcttcaacagctttagcttttgtttcttggacagggatttgagaaaaactagttcgggattttggtcatcggcatgagcgtccttctcgccatcgctgggcaccagttgatgttgctgttgaatggcccttatgctctgcagctcctgtgccgatcgcttcatcatgaggccatcctccttcatctgttcctccagcacgtttttggccatgatgtcgctggcctctgtttctgcgtgcagtttccgtgcctcgctcatggaaatgctgtacatggtgcactccttgtccgtgttgatgtggccccacttgtggcacttgagacaacgcacatttctcacctggatgccgaagggctggtccctgatctcggtgtcgcccttgcagtacgactctctaggagcgttgtactttcgctgccactcgaacttgtac

SEQ ID NO: 7538 - DNA, 1776 bp, DROSOPHILA
cgttgttcacattgtccatctctagattatcggtgtaaaataatttgcgaatcggaaaaattaattgacgaataaacaaaaacgtagcttaaatttttcattttccctggactttcgttgcaaatagaagcaggatgcccgtgctgccgatgccaccactcatgcagaacgccgtggagccgatgcaagtggacatcgcgccgccgaacgaggacaacgaaaacaacgaggagcagcagattgtggtggagaaccccagcatcgatctcgaagtgtacgccaaccaatatgccgggatcgtgcggctccatcgcctaatttatgtggcggacgtctgcccggttttagccgtggaggctctgaaaatggccattacttacgttcaaaccacctacaacgtaaatctctaccaagtgctgcacaagcgcttgagtgatctaaacgctggaaatgcgcctgcgccaccagcaaatgctggcggagatcaggcaggagcagcggctcccggtcccctggcagctgctccccttccggatatcgcggcacaacctgtggctcaggctcaaggacaggctcaacccgctgtcgaaaaggatgccttcgcctacgatgccgcttgggtagacaccaagatgaagaaggcggctcttaagctggagaaactggactcagacctcaagaactacaagtccaattcgatcaaggagagcatccggaggggccacgatgacctggctgaccactacctcagttgtggcgacctcaccaatgccctgaagtgctattctcgggccagagactactgcactagtggcaagcatgtggtaaacatgtgccttaacgtgatcaaggtgtcaatttatctccagaattgggcccatgtgatgagctacatatccaaggcggaaagcaccccggacttcgccgagggctccaaggaggctaatgcccaggttcatactcgccttgaatgcgctgctggtctggcggaactgcagcaaaagaaatataaggtggccgctaagcatttcctcaatgctaacttcgatcactgcgactttcccgaaatgatctccaccagcaatgtggcggtctatggtggcctctgcgccctggccacctttgatcgacaggagcttaagcgtctggtcatcgcctctacatcctttaaattgttcttagaactggagccccaactcagggatattattttcaagttctacgaaagtaaatacgcctcatgtctgacgcttctggatgagattagggacaacctgctggttgacatgtacattgcgccccatgtaaccactctgtataccaagatacgcaatcgcgcgctaatccagtactttagcccctatatgtcagctgatatgcacaaaatggccatggcatttaactcgtcggtgggcgatctggagaacgaggtgatgcagttgatattagacggacagatccaggcgcgtattgactcccacaataagatcctgttcgccaaggaggcggatcaaaggaacagcacctttgagcgggctttgatcatgggcaagcagtaccagcgtcatacccgcatgcttgttcttcgtgctgcaatgctcaagagccacatccacgtgaagagcatttcccgggagggtggaagcaaccacggcgccgaactttgcgtctccgccggatcctcgacaactgctcaactcgcccgaatctagagcaatttaaaagcaccacttaatacccaataaattttttaagatatgtatatcacaagctggc

SEQ ID NO: 7539 - protein, 525 aa, DROSOPHILA
MPVLPMPPLMQNAVEPMQVDIAPPNEDNENNEEQQIVVENPSIDLEVYANQYAGIVRLHRLIYVADVCPVLAVEALKMAITYVQTTYNVNLYQVLHKRLSDLNAGNAPAPPANAGGDQAGAAAPGPLAAAPLPDIAAQPVAQAQGQAQPAVEKDAFAYDAAWVDTKMKKAALKLEKLDSDLKNYKSNSIKESIRRGHDDLADHYLSCGDLTNALKCYSRARDYCTSGKHVVNMCLNVIKVSIYLQNWAHVMSYISKAESTPDFAEGSKEANAQVHTRLECAAGLAELQQKKYKVAAKHFLNANFDHCDFPEMISTSNVAVYGGLCALATFDRQELKRLVIASTSFKLFLELEPQLRDIIFKFYESKYASCLTLLDEIRDNLLVDMYIAPHVTTLYTKIRNRALIQYFSPYMSADMHKMAMAFNSSVGDLENEVMQLILDGQIQARIDSHNKILFAKEADQRNSTFERALIMGKQYQRHTRMLVLRAAMLKSHIHVKSISREGGSNHGAELCVSAGSSTTAQLARI

SEQ ID NO: 7540 - DNA, 29596 bp, DROSOPHILA
tgtacatagctacccgttttgactttgactcatttggctaaaattaacaattcctaaccatatcgagaaggtcgctggttgtcagccccatttgcttggctcattcacttgtctggccgacgccgtgcatttgcttctgcctttcgtttttgcatttgatcaggcggaaaaaagggggagtggaattaaaaggcactgccaaaagcaatcctcaaatatgccaaatatttaccagaattatttgctcttccctggtcatgggcgttggtgtgggtgtgcaaggggatcatgagtcactttatttgggttcacgttctgaaaaagggtcgggatttgagaattccagggcttggcccccctatatatacgaatataactacatacatatatacgaatggtaatgctgccgactaaaatagcaaatatttttaaacattaccaatggcttttgtgcactaaaacgaataaaatgaatcgttttattctatgactggtttattagtcactgatttactgggtaatattattatcgctccgagcttacgcttatgctactaatgttgttttgatggcagattaatattgggtgttttttaaaattttaaataaatataaagtaaaaaaaaacataatggaattgaaatagaaaaattgaatggaatggaataatgtcgtataaacctgttatattttaacaaaaaactttattttgggtaaccactctttgaaaagccgattattattggtgcatactttggggcatatcgaagttcttataagttataaaatatacatatttaactttacgctctcacactgaaactgaacttgaatctgttaataattttctttcgaaaactggttttgtgtgctggctgagaaaaagacatttttaagagaacacaattctcaaaatgttaaagagaaagaaaatgctctcttgttttattttttgtttgccgctctctcgcccctctctttattcagcaaatcagctgatatggcggatccgaatgccggtgatcggcgacaaacttcaacgtttaaaaataagaatttatttaacggtggtacgtgctcgagtaacaacgctgacggtcccggatcggcaaatttaacgcacggcggtgaattggtgcaaaacgcgaattatacaaacggtcaaacgacgcaggcgaccatattcctcagcaacaataacaacagcagtaatacgggcaaccactactacaacaacagcaacagtcacggcagaaagaacgcgccaaattcgcagcaaaatcagcaaaacgcgtgtgtttatacgaccagcaatagcaacaataacaatttggagcacaactttagcaacttacatttctacgcccaacagccagccgcacactacgacgtttgccatcaacaggtgtgtgtgtgtgtgtgtgtgcgaatagagtgcggcagtgtgcgtgagccacaggcgaacttcactatgatgaagtttcaggaaactcccggtcattcgaaaattgattgtcgcgaatcaaattcaaaaatcaaattcccttaatcgaagtctttaaaatattcccttattttacgtttgaaaagaatgaaagataaccgtagatttttaggaattcctaggagtttatcattctgagaaacaccttttttttaaaggattgaatgctacacattagaagctataaatgcagaactggacaattcaaatttagtgataatagagcagttaactttttcaaccaactactatgtacagaaattagatatatgatttatctaagcaccgtttcactgtagtttttgtaagtgctgcagttcacactgcgttttgtcgcggcatttcgcaattaatgaaaatgttaatgaacttcacacgctgcgcactcgagcacttcactctaatttcttcttctagccgtattccccttgttggcctggcccagacagacaattgtgagggggggccgcgggggctctacttctctatttctgttggtttttcggtggtttcctcggtttgtgtgtggcacgcgaactccgctttgctcccttgtccgtcgccttctgatcactccgctttgtgctcgatcttcgcggcgtttctgtctgtatacccttttcgggaacttttcgggcaagttggtggtaaacaatgaattaggcggagttacctgggaacttgtttcgccggctaagagataagggcaactcgcaagcttgacggaaatacggagttcttcaatgtgaaccactcaaatgtttatttacatattatcttcatcatttcatcacttaacaaacgttctaaaatataataaatttcaataaactccagagacaatttaaaagataccacaatcgttactctgaaaaagatatttcagcctcaaaataaaaattgttattcttgaagaaacctaacgtgctgaaagtcatagaaaagtttgacttcaaataaaagttcggaattaccccgagaagcgtattccaaagtcgcctgctctcgaaagttcattgattcttgatagccgcttcgttgcgcgacatgcgtggaaagtggacagtccactccagtgaagttctgcaactggaacaagtcttggcctacgccacacctagtgggatccgatcagatccattcgaatcaatttgcttcttagcaccaggagtggagtttgatggtttttaatggagatcgctcttgcatagttgctaagtgattttcgaagtaacgacgtcccacacgcagtcatcaagacacccatttaccggcacacccatccaaatctagtaaacccggctaacttgatatttgcgtaatcgctaacccacagacgaacgactactaccagccagccagacaggagggccagcaggcggatcagtacgaggagaactttgacgaggacatggaggccgaacgcgatctcgccgaggatgcgcagtggaagaagatccaacagaacaccttcacccggtgggccaacgagcacctgaagaccatcgatcggtcgatcaacaacctggagacggacctgtccgacggcctccgactgatcgccctgatcgaagtgctgtcccagaagcgaatgcccaaatacaacaaacgcccaacattccgcagccagaaactggaaaacgtctcggtggccctgaaattccttcaggatgagggtatcaaaatcgttaatattggtaagtgagacacacatgtgtgtatgtatttgaatttgaaattcccagaattcttggattaagcttgggttgggtcccacgtatctctaatagttttagcaaccgcacaattgcggtcgtaaagcaactttatgcattaattagatgcgctcgcatcgttggccatcgaaaatgtttccattgaaaattgcataatttgctctttcaatggggagagataagtcaactaaagatgtgccgccaacgcctcaagagtctcgggttaacaccagatcccctgatccccgctgaatccctcacgattccatgtggatccgttgtattatttatatgaaatgtgtgcctttaacgattcgcttccagactacaaaacaaaatgatgtcattgccgcgcttattcaaagcgccagcttcatgcgagtcttactttcatttgtatttatatgcataattcaagattgtgctcaccaatttgcagtacctgcacggtacgtaatctactgacttgtgtaccctttaggatgggtatatacggctatttctatataagagtcgaagcaaatttttgcaacgactttgaagtttatataccttcaaacaagagagcaccaacgaagcgtggacaatttggaaggttaatttcattagagtactatcgctttcaaagaccatttccattgccaaatcacgagcgtaacacaacccgatatcaatggtcacctaactgcatcaatgctaattagtttgatttaaaaactatacagctggaggagcatgtgatgccggattttatgactcacattgcggccttaactcaagcatccgtcggtcattgaggcattcagttgatgtatgattccatcgcgtacgggtattacatttcattcacaatgtaatcatctaccctgtgcgcattctaatgaccccgtgacgttattgataagaccaacaatctcggaacgtttgaaatatgtacatactcgtagttaaatcgcccagtgaggacttactgccccatataaaacagataaacaacttcagtatcttaacgttctagaaaaaaaaaactcagtttgtcaataattgacagctaggtaaataatgtttacagatatgtttacagacactttttatcgacccaaaggggagctgccttaaatataaagatacaaataaaatgaaagccaaataaactcgttcgtttaactgtgagcaaagcaaatgcaagtccgagacatttttgaacgaatttcatgtacaatcgacagtttcgaaggtatttttatagctatcagcactttcgtttttttttttttttgcgataaaaaatcgttcattctggacttgggttagcgataaggcgctctcatatctatcccctaaatttttagcgctagcaactcaaatttcgcgatttaatttcgggcttgccaaaacttaattgcaaggagaggtaattcattcatttaggcactcgactctttaagcagcttagtcattaactaagttttgcctaaatagcattattcacgggaatgcaaacattaattgcccgtttattttggcaaacattcccaaaacagataacgcatccaatttcggtcattatcgttgaacaaatgcgaaacttataagaaaacatagtaaattaatttaacaagccccacctattcctgctgtccaattatgtggtttttaatcgatttaaattgggtacagtgaaagcttccgtgtgaaatttctgttctcggctttggaaagcattagcagaccaacatttttgggttcccactgtatcgcacaacagatcatttctgttcggttattttcttccaagccgcttttttcctcttttgtgctgtcaattgaattagcccgaaattttgtggagttatgtttgcgtcgaattttgtgcccaaaaccacgcagctgctggctcaagagcttgtctttcagtccagagctccgactccaagtgggcatgtagatttccatggagcgccgccgttcgtatctacaaatgtttgcgctaaaaaatccacaaaaataataataaagcctctcgggcggtcgcaataaactgcaaaaaaaaaaaaagcagcagaaaaaaacaaataaaaataacaaaattaaaagtacaaaacagagggaagaacaaacctaatacgtgccggataaagtagagataaaatcgctcagttgactctccatgacatcatctggtttttgggtatcgggcttactttggattttggctgaagttgttcggaaccgtattacttcggttttcagcagcgtcaacctaatggttcctataaactcaggctcaatttgtcacagccaattgattgttattgatgacgccatcatcactcgaacatcattaaaatcatctatggagggcgtcgaagatttttccaggcacataaatgcatatttcacttaatggaagccactcgatgatcatccatttgacccaattttacttctgttgtttgcttgttaataatttgttcattttttttgtgatttcacccatgatgtgttgattaccaagggagtcatcaacataattgaaatgctcaacaattcataagtactggtctaaaaaattaaaaaaaaagaaacattcttgataaattgttcatgaacgttgtaatcattccagctaacaatattttgtttttaattagattgcgatggttagcataagtcaaaccgaaaaacaaaacatagaccccaaaataaagattatttaacatttttggaaaattagtcaaacactttgttgtgggtcgtgctaatagcttccgtttcccaagccaaaatgcttaagcttgtgattcagcccatagttaggaaatatgccaagtccagagtgtcagctaaatttccgttgaatttcagctgaattgctcataaaatgacacgaccaaacatcaatatgatgatcacccggcacgtacttcaccggtgtttttataaatcatttgcaatgtctcaaaatgacgccatcgatccggacacgtcaccgttgagccgaggctaaccctctgatccatggactggaaatagcaatgatgcccatttctcgtcacacttcagaggcacttgtgataagattaaggcgttatgaacatcattactaactcggcggaatgtttacgtagattccctgagcgcggcagtcagtcaattatttaaattagcaaaagctggctgttagagagttggtctgaccccgactcaattaccctaaaaaaaaacaagtgaaaattaagaaaaacacacggcgctttcgacggcaaccgaatgtgggacaacccacatcagaaatgcgcccaaaatggtgctttttgagcggcttaaaaactctgagacacacatgctcaggctcccactttccaagcgatgtcaacgatttttgcggcttagccctgcattggctctaatttaattagccgagcaacagttaggcgtctggatgattagcctcggagcgaacggaaactggtttttccgttccgttcggaaaatctttccagacgcttcattgtatcgtggctgcttttccgactccaactcggatttctggtatgcgcgtgccgctcggagaacgtgtctggtgacccaagccggttaaccgggaattgcggcctcggtggactcggtgctgcagcctcagcattcttgttatctgaatgttaaatacttctctgccgttgcacttaacatcataataactctgtggccgcatcgaagcgagaatcgttgcacataaatcatgtcaagtcatcattcgacatggccaaacgattggtggcttctgtagcatcagctctgggttccagattcagcctctggttttgggtggacatatccaattgctgtgcacaatgacagcgaaattatgatggattgtaaacgggggatcgcagatattttccactctttagttctgtaaattaatgaaatttgatgcatcttcttcgtttgaaggagagcaacaccatgtacactaccaatagataaagttatcttatagggatatcattcttgttttgagtctaattatacagattctttacttaaagattatctcttatttgtgcagaacaataagctgaaaacataattaagattgactcattattttatattcaacacaaaaatgccttctattaaccagaaatttgtacacaaagaataataacttcgtcatataattttttgcgacaaaatctcttgtcagataagattaaaatggagaaatagtatgtgtcagtattataaaagacccaactcgagtatgactacgtttgatcatttttagtgacacttgaagagtaataagagtttataattcaaactattccttatctttcttgagaatctagaatcaaataactaaactaaattattttgtatataatatagtccaaaaataacacctaaatcgtgaagtataataaaattatttttactgcaactatgaatctcagtatacaatgcaaaattagtttcctttaacggaatccaagaatgcttgcttcatgtaagcctttaccatattagccagatcatgcatccattctgaatcccaagagctattttctttttcaaagacggattacatttccccattcgaatgaatactgttcttagaaactctttgctcgttctccgcgatcttcacacttatgcatatgtatggatttgaaattccctcgactggagtttgcctggttaatatgcattgcatattcctataacagttatggcatctcgttctcctctccagacattagcatatttctatataatttacaccacattttcttgttcgcgctgccgtgccaaaaacaaacgtttggctcttggagttgacaagcaaccagtttgagctccacaaagacatccagttgatgtggagttttggccaagacagttaccgaggctcgccaatcggcacgccggctgctgcctaattagccaaatcatttctggctatttagttttctatgccgttttaattgctgctttctttcgccttgcaaatggagttgttgcgccagtgtcttcgatgtatttttcataaatatgtcatcgggctgggcttaaagattggcagctaattcatttgtcaaggcatcagtcgaccgtaaaagtattttaaacggccaaacgcaaagatggcctggcaatttgatggcttttaggcgagaccgagcgaccaacaaagcaaagtcatttgaccattttgcttgccaacccatccagccggtttcgctgtccactggcctcaagtggccggctactcaagtaaacaaagccaaattgcaaattttttagcaaaaagtggttattgctgttgcgcgggtgttgggcagtaagtggtaagcgagctggctctatcagcaatcgtttaacggctcgttgagcaggccaaaaagcaccaaacgatcccggagtctactagaaagccccagcgggtaaagacaaagaaatgtagaacatctagtacgtcagttaacgacgtagttgtccgtcgtcacttggcatattcggttaccattgctggccaccgagttttccctgtggcaactttccccacgatggaggaggaattccattcgcgtcatggttcagtgcgtgtcaaatgcatttgccgagggccaaggtgttgactaatcggtgataggtaatcagaacgatacccacgcctttcaccttgcggtgttacgctattaaaaagatcccattatcgtaagttcaataaactccgactatctctgaacggtttagcatgacaaaagaagagccgtccgaagcgcaggctttgttggccaagtttaaggtcgacggcggtgtttaagaaaaccggcaagacctgttgattgcgtgtataataagccctgaacttgaccaggaggcaaagtagttgtaacagttagcagacatctctgaccataattggcgagttgtcgaatggcaacaggtttgcagcagccccatcaaagtgttgccagtgacagatgaggcatgcagtcgttgcagtggctgccacaggttgtcgggacaattaatagacacattaggtacatgcgactggtaccggtgcccgttctggtttttccacccgaccaacaaagtaatccaatctctgttcttgcccccgttccgcagactcgtcggacattgtggactgtaagctgaaactgatactgggtctgatatggacactgattctacactactcgatatcgatgcccatgtgggatggcgaggacgacaagcagctcaacggctcgggccacactcccaagcagcggtaagtgacgcctacccaattggtttattgcccagcactaaatcactcttccgctggcagcctgttgaactggatacacgccaagatacccgacttgcccatcaacaactttaccaacgactggaccacgggcaaggctgtgggcgcccttgtcgacgcctgtgctccgggtctctgtcccgattgggagctgtgggatcccaaggatgccgtgcagaacgcctccgaggccatgggcctggccgatgactggctcaacgtgcgccagctgatcaagcccgaggagctggttaatcccaacgtggatgagcagtctatgatgacctatctgtctcagtaccccaactccaagctcaagactggagctcccttgaggcctaagacgaatcccaacaggtgagtacaagtgccttttagatcggtgtttctctaacttgaacaatttgctctgacatatttcaaaacaaacgttgaacatgattcgttcaaacgaagttaattcagaaaacgatataaaatcggttctctgtatctgaaatgtggcaggttacggttcgagctagaaaagttttacttcctcgttcgatctataagtccagctttgtacttattccgaactctattccaaattcaagttgtaccttatactatcttcgtgtgttcttaaggctaatgcatctatctggatctgttctcgactctatctatctttcttctttctctttatctttctatatcttttttctccgtgtattattgaacaacatatttaatgtatggatattgttcttgttttccctatccgcaccgtatacatataatgtatataaactacctacccacatatatatatatatttattaaacgcctcaaaatgcaaaactcagcattcctccgccgcggtaagtttcttcggcatgtctcctctcgttcttttcttttccgttccgatctgttttgccacttctttttggccaacgttgttatccgcttgattgtcggtttttaatttattgacttcttgtggtatttgtgatttaaatgttccaccagtttcggctacttttgttttgttgctctccgctttttgcgctagcccagagcgatccgtatctaatggatacttcaacgccgctgctttcctgtttgtatatttcttgttctggctgccggcttttattgctctctacaattagcgctcactaaacgcattcatcttggccgacgctgatttaatttactgctttttgattacaagtcgggaagctgtgtggtgatcagacttgatttttccgaaacttgtttgtattaattacagttttgggaattgtaaatagttttgccttcttgtaattaaccgatatgtttatatatttgtgatataaaatatatataatacaataaagcaatatgtagatgagtccaaatataataatgttatgtatttaaaatttgatatgatatatggcttcaaaaacagctacatccaaaaagtatacttcaataaacatttttgaaattagttctgtaatataccgcttgtagaacacagtggcgccacccacaagaatgttttcaaaatatttataaaactgtgtttgctagtgttgttccttaataagattatttgcccatgctcaatgacgttaatacttattctgcaaaagcctttaaacgctattcaatggtccagtgtatcataattggctatgtagagctcttcccagaatcagtaaatatatagtgaccaaaatcattctcattccacagagtgcgtgcctatggtcctggtattgagcctattggtcctgtggtgggtgccccagccaattttaccgtcgaaaccttctctgctggcaaaggtaagttttcagaattccaattgagttacaacattttaagaataatttatctgcaggttctgtggacgttgacattcagggacccaatggagagatcgagaaggctgatgtgcgcttcaacaatgacaagaatctcacgtatacagtttcgtacatacccaaatccgagggttcgcacaaggtggccgttaagttctccggtcgcgacattcccaagtcgccgttccccgtcaaggtggaaggtcatgctggtgacgcctctaaggtgaaagttaccgggcccggaatacagcccaacggtgttaccatcaaaaagccaaccttcttcgatattcttgccaaggatgctggtcgcggagtgcccgaagtgattatcatcgatccggctaaccacaagacttctgtggccgccaaagtccgtcagctggaaaacgatacttggcgatgcgagtacgtgaccgctctgcagggattgcactcggtgaatgtcttctatgctggaacaccgatccccaacagtccgttccctgtgaaggtggctccgttgtccgatgcgcgtaaagttcgcgcttctggacgtggtctccaggcaacgggcgttcgcgtcggggacgatgccgacttcaagatctataccgagggagccggcgagggtgagccagaggtgcgcgtcattggtcctggtggcatgaaccagaacgtcatgcagtcgaaggtggatggcaatacctacgagtgccactactatcccaccaaggaaggccgttacgtcatcatggtgacctttgctggccaagaagtggccaagtctccgtttgaggtgaaggtgggtcccaagaaggagtcctcgattgtggcctatggacccggactgagcagcggcgttatcggctacccagctgcttttgtagtggagaccaatggcgagactggcgccctcggtttcaccgtggccggtccttcgcaggccgagatcgagtgccacgacaacggcgatggttctgccctggtcaagtatcatcccaccgctgtgggagagtacgccgtgcatatattgtgtgacaatgaggacatccccaagtcgccgtttatcgctcagatccttccacgcaccgatttccatcccgagctggtcaaggctagtggtcctggactggaaaagaatggtgtgaccattaaccagccgaccagcttcaccgtggaccccagcaaggcaggaaatgctcccttggacgttgtcgttcaggatgtgttcggcaccaagttgcccgtggagctaaagaacaacccagatgggaccaagaaggtaacctatactcctacttctggagttccgcacaccgtcgaaggtaagacttgttaaaagcaagtaatgagcaatagcaaaacgtaatataaacatttcagttaactatggcggagtttctacgcccaattcaccccatcgtgtttacgtcggagttccggttgatgcagccaaggtgcaggcctttggaccctggttgcagcctggagtgcgccccaatgcagccacacacttcaatgtggacgcccgtgaggctggagacgccgagctgaaggttaagatcattcatgaggaaactaagatcgaggtaccgtgccgcatcatcgataacgaggacaacacctactccgtggaagtaattccgccttccaaaggtgcctacaccactacgatgacttatggtggccaaagggttcccctgggcgagaaggtcgtcgtggaacaaacggtggatgtatctaagatcaaggtggacggacttgagccaagtaagtactcgtaggataggaacctaaattactatatacaaaagtgtacgtctggagtgcgtcatggtctaagtccatatcataatttcattcatccaaaaccaaagccgcgcccttgaacagtttgcagcagtttcggattataacacatggcctgccgaaagctgacttggcggtaaccatcaccagtccatcgggcaatcgcataaaggcccacattataccgaccgcagagggatttctggttaactttacgccaacccaactgggcgagtacctgttaagcatctgctttgggggcaccccgatcactccacggcccttccggctgcagtgcctcacgggcagtgattcgaataaggtgcaagcctttggacctggcctggaacgtggcattgtgggccagccggccgagtttatgatcgatacgcgtggcgccggacagggcggattgggagtgacagtggaaggtccatgcgaggcggccatcaattgccgcgataatggagatggtacttgcaacgtcgcctatttaccgactgaggcgggcgactataccgtcaacataacgttcaacgagcggcacataaccggttcgcccttccagccactaatagttccggtaccgaatctgaagaatacccgcgtcagcggcatcggcatccagccgcatggtaggctataaggagttccagttgccagttgccaattccgagtgtttccgctgccgaacatctctaatcctctgcgctctactcacaacctgaccaaggttgcctgttgcaatcgcctcgccatgcctttttgttgttgtgctgtcccttgtgtttgtttgatttgaactaaaccataaaccactaatttgaaatgatgggaagtgcctgagggccaatcgatttactgttcttctttttcctatcaaacaaatttaagttaccatatgatttgccccaaaagaaaaattaatgaatgctgctttatcaattgggaaaatttactttttctatttttttacgtaaaggtaaaaaaaaataccttgctccatcataactaactgcacattattgttgttgatgttataccttaacgtatataattttgccgacctattggacctttctaactttcgatattccttaggtgtgatcatgaatgcggccacggacttcatggttgatatgagcaaggtgggcagcaacatcgactcaggaaagctgtcctgtgcgatcttcgacccaatgggccatgtgttgccaagcaagattgtccaaggtccaaccgacgacatcttccgcatcatgtacactccattcgaggctggccgccacaccattgaactgatgtacgacaacatcccagtgccaggatctccgtttgttgtgaatgtgaagagcggctgtgatcctgctcgctgcaaggcctacggaccaggcctcgaaaaaggactgaccaatcagaaaaacaaattcaccgtggaaaccaagggtgcaggtaatggtggcctttcgcttgccatcgagggtccttcggaggcaaaaatgacgtgcacggacaatcgcgacggtagctgcgacgttgactatttggccactgatccaggagagtatgacattaccattcggtttgcggacaagcacatacccggctctccattccgcgtgctcgtcgaggagactgtggatcccagcaaggtgaaggtgtacggtccgggcatcgagcacggccaggtgcgcgaaagtgtgcccaccttcttcaacgtggatgtgggcgaggctggtcctggccgcattgccgttaagctgaccaactccgaaggtattcccgtggacaatctacgcgtggaagacaagggcaattgcatttacgcggttcactatgtgccgcccaaggctggctccgtgctcacctgccaggtgaagttctccgaggttgaagtgccatgcaggtgagtggccaatcgagcgattattttaataagtatttgtagacttgtacattccgagaacaattaaattcaatttgttaaatgacttttctccttcagtccatttgtgatgaccgttttcccgaaatcagaacccaccaaggttaaggtaaagggtgtcaatgagaagaagaaaacgcctgcttccctccccgcagagtttgaaatcgatacaaaacaagccggtcaggctgatatcaatgtggccattaagaaccccaagggcaaggcgatgcagccgcgcctggaggaggtgtccaccggcacgtacgtggtgtcctttgtgccagatgagtgtggcacctaccagtgcagcatcaagtacggcgacaaggagatcgagggctcacccttcaaactcgaagcattccccaccggcgaagccaagaaatgcaaactggtggagcaggcgcccaagattcagacctcgggcagtcaatcgcacctaaaagtggatgctcgtgaggccggagatggagcggtgacctgcaagatcaccaataaggcgggcaggtaaggattgcatttggttatggtgttatatgtccgtttgcctaacgtaagtccattgactctagcgaaattgtggacattgatgtgatcgaaaaggatggtttctttgacattctgtacgcccttaacgatcccggagattatgacatcaacgtaaagttcggcggcaaggacataccgaacggcagcttctccatcaaggtagcctgaactacattttctttcgaaactcttgatttaatcaaaccaaaacagacacagccaaatctagtctagtcacaaatgggatttgttgaaaattagcaattattttaattcttatatatactttaacgtttttctagtcatttaagtcaggctgaagctgtttagagctcagccgcctcttaataattatatttatagtcaagtccattgtcattgttttgtgtttgtgtttcgtgcgactcctcaaatcgtctttaaattgttgtgtaaattttaattgggcttccccaaacaacacacaaacaaatttcacataagaactaagagtgatcagaagaagaaacaacagaatacgatttaagtgcaacattgtaaaacatgacttccaaaataataaaaaaaaaaactaaaacgaaagaaacaacttttggtttgcccaccaaatacgctcaaaaacctttatggcaacaaattttaaattaattgcatgaaaattgtttcgttcccaaaattatttctgctatgctgcactgccaaatgcgctttgttttacattatgcatttaatgaacaattattcttaacgcttctttgtttgtaagctagctagccatagtctgtgtaagttgtttgtgtgtttctgtatttcattgaagactgattcgaatgcacttaacacagcgaacaaaacgaaacgacaacgtcttgaaaaccacatacttcaacttaacgcttaagcacaattttaccaacaaatgttaattaatctctaaataattgctaatttaacaacaatattcctaaccaacgtagagcctatactttgcacttgcctacaattttctttcagccagaagtggtttgttctgtaagtaaaatgctgaatccattcaccatgcgctacctgcgttgacaacctgaaaaatgaagtgtcataaatactgggccaaaatcatgggacctgacatccacaagaacaatgcgcacctcccaatgggattgaaatggtcggggatttcgggcatggtgcccaaaatgaaataatgttggtcgagtcgtgaacccaagattaattgagttgtctgttgttttcgcgcagaattgatgtttaacagatttgcacaattagctggctgcaaaattaattttttcccacattgttcaatttgtgagaagggcaactttgttggcgtctatttccgccaaaagtaacttctttatggaatatgtcacctttttttttggcgcacacaaaagaacattaatgtttgttggttttaaactttcgaaaccacacttgctattaaatagaagaaatgtagtataaattgtggcgacacggcaaagttctgtgtttttatcaatctaaatatgatttatacatgttagtgatgaaattttattgcaggtatatgttagattgttgtgtcccagttctatatttgcctgcaatattaaaatagctcagaaatcattccaaagtagccattaaaatagcagtcttttaaggtatttagaaggaataaccaaatccaaaacatcttagacatctttgttgatacagggtgttccgtaagacttaaatttagactgtggcgtcgaaagcgtaccaatgccttttcatctacgccactgcagtctataaaagcagcatcccaataatctcgggaagaggggcgacgatgacatcccacgctgaatcagcatgttctacccgctgtttctgtgatagttgctctggtcggccgttgatgctttcggcaggttgcaacaaaatcaagtatacgccgcctggcaccacgactgcatatatgcatatgaaaatgattttgtatagccagcccagctagcgcgcacaaaaatcgcaagtaattaaaataggaaaataaaattatgtataatgaaaatggcgcaaagtgtgctgtgctgatttttgctgccaacgccagtggaagcgccataaagtgtggctagaagaagaccggaggcccgacactagtggcagcagctagctagccgatctagtctagtcttagtcatagattgtcctgtactggtcgttgtcgtgatcgtgtcgcatcggtaactggaagtgatggaactcagtgcgcccacatcattccctagcccacaaacgaattgatggcaaagatggatttcccgtcaatgggctacatatacaacactatactatatggatagatagatggattcagaatcatattcatatacagatgtagaggaggagctgcaaactgtcgcccactggcaattcgattttccttgctggtctattgattggccgtgcattggcgtacttcttattaatagctcaaatattttatagcgatttgtatctttgactttttcgatttggccacggatacgaaatgatttcgatatatacaacgtatataaatataattatttgcttatgtaatagctgcaattgtggaaattcttttgcacaatcgtgcccgcgtcaatcaatttcacttcctctccaataatttcatttgtgtattgctcccatagtttcacactttcaagtttccccatatcactcagtgcgtccagttttaataataagcagatctcccctatatgcggtagttcttcaatattcacaagtgcaaagtaaatggacccgaagtattgtagtaacccatttcggaaattcttctcattctccagactgccacgcaaatgatctattggctgctggttttgagtgtgtgtttgttttagatatttcgagtttaccatcgaaacaagactcggcgatcttaatattcaattttattttcattgacctcaggctgtcgaaagtatcgagcaatactcgcattctgaatacatcgaggagcacacgaccaaagtggtgcagcaaactacgcaggtaagtgtttagtcttagtataagttttaaaatttatatgaattttaatttctgctattaaagcgcaatcagtattgatagatttctacgtttcttaataacttgaatgtaaattaatgttaaataaaataggttatctggaacaaagcattactacatcatgactgacgatcagcattgagttttaaactttatttgcgtaaaatcatatcacattagaactttattaagctctaatacataaatataatagcataatactaacattttcagagcgagcttgtcaacggaaaatctgagatcacctatcgcagtgtagcatttgagaaattaccactacccacaacaggcggcaacgttacaggtatgtgcaaaccaaaagcaaactgaatgtatctttaaaataatattaaaattataaactaaagccttgcaagcagagacacctagccgtgcatagcgatgcatttaattaaaccacaatgtatattagtttatttaatctaaaaaacatttatgcgccatttaggcgagcaacatgtatctcatatttgcaagaatctagcgcagccaaggaaaatacgtatgcatatcagatagatgctattgtcagacaaaaatattcgtgtgtcgtaaatctctgaaatgtatacagatatataaatatccaactacatatttgcgatgcggcgcatttggatgggacaccatggacaagtggcatcgcacccaaatcttggatgggggaaaatggacgggcgagtgacggcttatcaggctaaacgctgacaggcgacaacttaattagacaataccacttctctgagcgctgatctctgaattctgggaggtctttagtattttggctgcatttcttggcatttttcatctcacttttcaaggggggattttcttttgttttccattccgacacgttcattgacttggccacttgtgactcgtgggaaagtaattgggtattcaacttgtgtatataaatctgataattacctaaatttatttggccatttttgtacccacgagcgatttacgagttgcaaatcgctgcaccgcaatttaatgaacattttcaacatgattaatgaggtttccaccctctgcatgcaaatcaatgaacatcactttgcactttcctctccgtgcaaatatttggtcgatttttcacgcttccatgcaattttcaagcatttttgtcgcttggctaggctgggctggtctaggctgggctaggatgagcaactggggggtggcagtggctactcccgatcatcattaagatcacaagccgcgccacgtttcatttggtggtggctcttgccctgtaccatacgaatctggaccacgcctcgttgtgggttttagctttctgtgccgcgctccatttgctttgaagatggtttattgtaaatgattcgttttggccaaatgacatagatttgttgcgcatttgttgcattgatttttcattgcccgtcaaatgaaaggggcaagagtatttttaattaacagctaacgaccaggttgattcgaaatcgacagtctctataaactggaaatttcgccaatcgcacacttattttcgctagcgtgtgtatgtagattttgattagtcaataatcgctgccaagtagtcatctgaaagatcaacagaaatttgattgattttgggcaattgcttcagttgtgtccctagctggctagctggctagctggccatttgcaatttgcaatttcaaaacgatttgccattgccaacagccattacataagtattggataaacgcgtgcggctcatcgaaaggaatgttttgcactttaacgattaatacgacataatacggatatagaatcgaaatgattaacacattttcggcataccaacaagactatatttgtattctatgggttttatggccggatcgctgctttcacgcccataaaataaaatatagatctgtctatatgtttgttcgttttatttttaaatgcttcccgccgatttaatggtaaaatattaataaattctatgtcgtctgagctgcaataagtaataaatttcatttcgccagccatcttccatgcacattcacaaccaaagagctataggtgctgctgtatacctatgattttgacccaaagtcgccctgtttttttgcacctttcgagttcgaatcgttcgaagtggcaaatgttaaacccacaccaagatcgagcagaaatttatgctaatacttgtatatgaaatatgtacatatgtacaccacatagattcgggcgtatggcaaatatttccaattttctatctttttatctttcatatgtcgtccattggtcagatctctcctgccgccccatagcagtcggccatatttttgaaaatcccccaaaaatattggtatgtgtgtgggatgctgcgctgcggctgcgctgcttttgggccacggcagcagacgcatctcggtggtaggaaccgatgtgctttcatattttggccttaatttcgatttggaactgtcgatgttcacttgaaatcgggacgtggagacgcgtgtacctacaaaccgtcgctgaccaattagcaaacagcaaaagaaaacacaatccgttcgcagtcgaatgacatcgaattaataaatcgaataactcaagtgcacagcaatcgatcggcaggactctctctttttggcagtgcaggacattcgctcaaaagagccccaaaatttcgcttgttaatactattatataacccttctagtcgattgcccaagtgtgagtgtccaaatcaataattttccaattcaattcgaatatctcagtcttccaactcttggccagcaaggatatgtaacgaatttgatgcgaatatcgcttgtcatttgatcatttccggcatatccttgctgtttgctcagccaacagtcgaacagaaagtttttgtttcgttgttaaattaaattgttataaattttaagtgtctttttttgcaaaaccaaacgcgtgcgcttgccgattaaaatcgaaacacttgatatttgtccaactcacaccgaattacgggaaaatgcacttcagttggctgtcagagaaagcgcccacgccgccagccacctgggccgatcactcgtacttcttccgtccgcaatactataaggtgaccgtatccgagcgcgatcacccggaacggacgcacgtttacttcaatgagacgatcataccggagaaccaaggactaaatggttcagattttatgccattgaatttcaaatcatcgttttcaattgtaacacatcaaggtaatagccgctagtaagagaacatacgtacttttcctggaactcaaagggagacccctgtgtttcttgacgctttgccaaacgtaatgacgtccatgatgtcacatgcagccaccgccaaatcctgactacatccccaagaatttttcatttgtgctaatgacaaaactgacaccaaatttttattcaaactcgcattcacattcatatttttaattcaattcaattcaaagcgcggtcaagcgccaggcgggcccacacagaaagcacttgcaggctgggcaaagaatttgaattattacccaaaagtcccccggatggatgtcgtcctcctcagtggccccgcaggccgtttgtctgcaaattattttctatgatttattatcagaaaatgcaacaaagcgtaaaattcgtttggctcctccacatgcaatttctcaatggttgcgtacgagtagaagaaggcaccgcgatgatgatggcttacactgatcatcgcgggttttcagttgccaagttttgttcacctcttcttgggttgtaaatagatatcaagtggttatatgcgcctttcttaaagatttaatatagatgcatatttaattgatatcgaataaaagcaaacccaatcactaaaaagcagttgaaccctttcaattcgaaatgttaataaaatattattaaataataatataaaataatttaaataatgtggtaatataatagtgaaactacttaacacgtatctaccaggcttcgtaactttaaattatagccccaaaggatttggctttgcaagtcgttctttattatcgatttgagtttgagttcatagttcgatgttcaaaatcttatggaagtcaatactctgcgattgggagtattagttgcctgctggcctgtgtaaaagtgttatttgttatgcgcaaatggcaaactctcgctgatgtatcgaaaatatcgttggcctgcccgttgcggcccgagagtcattaaatctttcatttgtattgccagcgtccattagatgcgaaagatgtgcgagtcttcgtggtcaccgcctcatcctcgtcctcccattcccattcccattccgattcccatcctctgtcgcagtcgtatctcatgcttcaatgggcggcgctggcaggtgatctgatcgagggcagcggaggaggggagttgcgttggacgacggacagcagcaaatgttcaaacataaataatcatattttcattttttttttcgcgtgatcggggtgcttgtgagtgaataaagttgtcttggcagccactttttaatacattctattcgaaaggaatttctttttattaaatgcccgcactcgacactatattttatcgttgatttgaactattttgcgtttcctttttcaattttacaaatcattaaattcaaaaaggcgaacaacagctgagtacgaatgcttgagtaattattcaaagtatctatttgattggaatatgcgttttttgcatattttccatagttgttttgcattctttacctttcgtcgcccataagttggctataaaatgcagatttttcacttggcagattcttcaaagacatgcccacatttttccttggcaaccattgtcttgggttttttgaaatgtttagtttgcttgtttagtgccttgaactaaattttcgccaggcacgcgacacttttctctgatttatctgtatttttcgtcattgtttttgattaggcttttggccgcaaaaatacacattaattctgattgatcaaagctaagcggaatataattcggttgaaaatttgaggcttagtgggctctttgaacatatttatgatcggttcgacatcatatgttcttggaaaataaaatgctctttaaataaaacataatatacgacaatgtttatgtggggtgtcagcaaatatctataattaactggtaataaatttgattgtactttaaataattcaggtgactcactgttttctttattcacttaagtaaactgtttatttgtcaacaacaaactcttctcttctaactaatgatccatagtatgtatatactacttgatgacattttgacagcaagaaaccattggaatttcgtttgtatataagacctcttcccgattttaaaaatatcgggaattaaatacaaattcagacacgtgcgccactataaagttcgtccatattgatagttccagcacataggtagatagatatggatatataaataggttttatgcatttgtgacatatatatgtacttctggatgggtaagagagatgtgaaaactaatggatgtggtatgctatgttctatgtggatcccgtacatacatatgtatgtgagtgggaaatacataagaagagtgtcctatatttgacctcagcggaattcaggaacgatgttgtttttatttttctagcttgatggcgtgggaaagtataaaagcaattgtaggcgttggtggaaatttctttggaaagccaaaagattactggccactcagtcgatgcgcagcattcgttcagttgagaagtgatttggactccaggtctcgaccaagtggaaaaggatttttaaacaaggatactcatccaaccgagaatttcgcttacctatatatttgtgggtgtgtctctctagcagaggaaaagtatgtggagtgctgtgaaaatacgaatgattaattgtctaataagctagaacgttccatagttatatgatatcctgcttgaaaacttataaaaacttttggaatttctcgaggaaaagaacattcggtccaattaatttacttttcgctgggacaacggcaacaagaacaacacgatcttcgatctgtgcaaaaaacagaaatagactttgtggaataaaaaatggcacaaatattcgaagaacataaaaatgaaattatgattttttcaaacttgtggcgctcgcccacgcaagttatttaaaaaatgcttcagtgacataattcagagtatacaaaacacatccattaaattgtatccaatacagttttcgatcggctgtatttttaagtctactgtacttttttttggaataatggaagtggtttgaaaatttggattcctttactagctcttcgtaaattatcctagtagttttagatgattttctcccatttatcattatagtttacaaaaagaatgcttatttttattataatataatataataataaaataattttaataaataagacaactaacaatgatttgcttacttgttatccccttctagctgaagtcagaatgcctagcggtaaagtagacaaacccgtgatccaggacaaccgtgatggtaccgtctcggtgaagtacgatccccgtgaggagggatcccacgagctggtggtcaaatacaacggagaacccgtgcaaggtaaatagatagtaaatctaaggtattaaaaatataaatatgctaattttcgttttccaacaggatctcccttcaaattccacgttgactcgatcacctccggctatgtgactgcctacggacccggcctgacccacggagtcaccggtgagccggccaactttaccatctccaccaagggagccagcgccggtggcctgaccatggccgtcgaaggacccagcaaggctgacgtaagagatatccttgccaggacacaaacattttacttataaataccaactttgcagatcaactaccatgacaacaaagacggcactgtatctgtgcaatacctgcccactgctcctggcgagtaccaggtgtccgttcgcttcggcgataagcacatcaagggatcgccgtacttcgccaagatcaccggcgagggtcgcaagcgcaaccagatctcggttggctcctgctccgaagtgaccatgcccggcgacattaccgatgacgatctgcgcgctttgaacgcctcgatccaggcgcccagtggcctggaggagccctgcttcctgaagcgcatgcccactggcaacattggcatctcgttcacgccccgcgagattggcgagcatctggtgtcggtgaagcgtctgggcaagcacatcaacaactcaccatttaaggtgactgtctgcgagcgcgaggtgggcgacgccaagaaggtcaaggttagcggaactggcctcaaggagggtcaaacccatgccgacaacatcttctccgtggacacgaggaacgccggcttcggtggtctttcggtctccattgagggtcccagcaaggctgagatccagtgcacggataaggatgacggtactctcaacatctcgtacaagcccactgagccgggctactacattgttaacctgaagttcgccgatcaccacgtggagggttctcctttcaccgtcaaggttgccggcgagggcagcaaccgcaagcgcgagaagatccagcgggagcgcgatgctgttccaatcacggaaatcggaagccagtgcaagctgacattcaagatgccgggcattacctcgttcgatctggccgcctgtgtcacctcgcctagcaacgtgaccgaggatgcggagatccaagaggtggaggatggcctctacgcagtgcactttgtgcccaaggagttgggcgtgcacacggtgtcggtgcgctattccgagatgcacatacccggatcaccgttccagttcaccgtgggaccactgcgcgactccggcagccatcttgttaaggctggaggctctggtctggagcgaggtgttgtcggagaggcggccgagttcaatgtgtggacccgcgaggcaggcggtggttccctggccatttccgtggaaggtcccagcaaggctgacatcgagtttaaggaccgcaaggacggcagctgcgatgtgtcgtacaaggtcaccgaaccgggagagtaccgcgtgggcctgaaattcaacgatcgccacatacccgactcaccattcaaggtgtacgtctccccggatgcgggtgatgcccacaagctggaggttcagcagttcccgcagggtaacatccaggcggacgctccctaccaattcatggtccgcaagaacggtgccaagggtgagctggatgccaagattgtggctccatccggaacggacgatgattgcttcatccaggtgatcgacggcgagatgtactcggtgcgattctatccacgcgagaacggaatccatgccatccacgtcaagttcaacggcgtccacatacccgactctccattcaggatcaaggtgggcaaggatgtggccgatccagctgccgtgcacgccagcggcaatggattggacgaagtgaagactggacacaaggccgacttcatcatcaacacctgcaacgccggcgttggcacgttggccgtctccatcgatggaccctccaaggtggccatggactgcacagaggttgaggagggctacaaggtccgctacaccccgctcctgcccggcgagcactacatcacggtcaagtacaacaacatgcacatcgtgggctcgccattcaaggtgaacgctaccggcgacaagttagcggatgagggcgcccaggagacgtccacggtgatcgtggagaccgtgcagaaggtggccaaaggaggcaagaacacgggcgtccatctgcccacctttaagtcggatgccagcaaggtggtgtccaagggtatgggcctgaagaaggcctacattggcaagcagaaccagttcagcatcagcgccaccgatgcgggtgagtaatattcatacccattttaaacttgatgttataatatatcctgcttttgttaaaaggcaacaacatcctgtacgtgggcatgtacggaccaaagggaccctgcgaggagttccacgtgaagcacgctggccacaacaactataatgtgcagtatctggtgcgcgatcgcggccagtacgtgctcctaatcaagtggggcgaggagcatatacccggctccccattccagatcgatgtgtagggcgctatatagccggccaggcatatgtgtacgtgtagatatatgcttcgcatgtgtatgtgtgtgggcgcgcatgttccagggtcaaaagtcgtgtgtttcttgttttcatcataacgctctttgtttaattttaatttcttgatttatcatcatattttaggtaagtttttgttatttgtacatacatggaaggaagaagcttctgtttttcgacgcgccattttcactctttaaattgatcttacgttttatttgttttcttgtgaatacataaaattaacaattgccgatatgaattttgatagacttcatggaaacgaactaaagcacaacttcgacacacaagaattactattgcaatgcgaataaatctcttaaacaattatttaatacttaagcgaaaaatttatgatgattaaaatgattatgacgtattatgttttctattatcactatcgatcatgtaatttacgtgaaataaatcaaaacacaaaaaaatgaactaaatacaacttttcttatataatttcttttgcaaggacgtgtttaacaccaccaagaaatccgtcatgtacaaccaaaacatgaacctaatatatttaaaaaataggtctgaaatatgaaacctaactacttaattacttgtcaccggaattattctcgagtatgctgtacaccgttccatatcgattgatttgctcgaagatgtcatcatcgcttgcacttgagcccgagatgttcccgatgttctgcgcatcctgcggtgcactgagagctgcggcgagttggggagtcggctgatagtaaaccgagtgtcggctatcaaagctccgactgccgatgtggtacttcaggtacttgcgggcccaacgttctccaataatctttccgagtccctgctcggtcagtgtgaagctggcgccttccggcgcggaagggctgtgcagcagaatgccgcgcttggtgatcttgatggtcgctggaatctcttgtcgttcacttgcaggcggttcgcagccagtggtagatgtaactacagtgcagtcaggatccccgcctgtggggctgcccatctcttccaaactgctcgttggggagctcgagctgttcgtcgctgtcttctcctccgtagtgctaacagcggctgccctcttgactcctcgtctcttgggaagcacgcggtagcaagccgtgtcgttggccagagctgtggagttgcacgctacgctttgattgttgaataccgtcattgatttctctgcaggtgattggggctgcttattagatggctcccttttcgtttttttgcgcttctgttgttcctccttgtaggtggccttcgacatagccagggctatttgcagatcatcctccgagtttgatgccccatcaccaccttgctttaaaatgcttgccgtagttgaacattgtggtttaggttttgccagtacttctgatgatacatcggactcctcttccctgacttgctct

SEQ ID NO: 7541 - DNA, 7607 bp, DROSOPHILA
atggcggatccgaatgccggtgatcggcgacaaacttcaacgtttaaaaataagaatttatttaacggtggtacgtgctcgagtaacaacgctgacggtcccggatcggcaaatttaacgcacggcggtgaattggtgcaaaacgcgaattatacaaacggtcaaacgacgcaggcgaccatattcctcagcaacaataacaacagcagtaatacgggcaaccactactacaacaacagcaacagtcacggcagaaagaacgcgccaaattcgcagcaaaatcagcaaaacgcgtgtgtttatacgaccagcaatagcaacaataacaatttggagcacaactttagcaacttacatttctacgcccaacagccagccgcacactacgacgtttgccatcaacagacgaacgactactaccagccagccagacaggagggccagcaggcggatcagtacgaggagaactttgacgaggacatggaggccgaacgcgatctcgccgaggatgcgcagtggaagaagatccaacagaacaccttcacccggtgggccaacgagcacctgaagaccatcgatcggtcgatcaacaacctggagacggacctgtccgacggcctccgactgatcgccctgatcgaagtgctgtcccagaagcgaatgcccaaatacaacaaacgcccaacattccgcagccagaaactggaaaacgtctcggtggccctgaaattccttcaggatgagggtatcaaaatcgttaatattgactcgtcggacattgtggactgtaagctgaaactgatactgggtctgatatggacactgattctacactactcgatatcgatgcccatgtgggatggcgaggacgacaagcagctcaacggctcgggccacactcccaagcagcgcctgttgaactggatacacgccaagatacccgacttgcccatcaacaactttaccaacgactggaccacgggcaaggctgtgggcgcccttgtcgacgcctgtgctccgggtctctgtcccgattgggagctgtgggatcccaaggatgccgtgcagaacgcctccgaggccatgggcctggccgatgactggctcaacgtgcgccagctgatcaagcccgaggagctggttaatcccaacgtggatgagcagtctatgatgacctatctgtctcagtaccccaactccaagctcaagactggagctcccttgaggcctaagacgaatcccaacagagtgcgtgcctatggtcctggtattgagcctattggtcctgtggtgggtgccccagccaattttaccgtcgaaaccttctctgctggcaaaggttctgtggacgttgacattcagggacccaatggagagatcgagaaggctgatgtgcgcttcaacaatgacaagaatctcacgtatacagtttcgtacatacccaaatccgagggttcgcacaaggtggccgttaagttctccggtcgcgacattcccaagtcgccgttccccgtcaaggtggaaggtcatgctggtgacgcctctaaggtgaaagttaccgggcccggaatacagcccaacggtgttaccatcaaaaagccaaccttcttcgatattcttgccaaggatgctggtcgcggagtgcccgaagtgattatcatcgatccggctaaccacaagacttctgtggccgccaaagtccgtcagctggaaaacgatacttggcgatgcgagtacgtgaccgctctgcagggattgcactcggtgaatgtcttctatgctggaacaccgatccccaacagtccgttccctgtgaaggtggctccgttgtccgatgcgcgtaaagttcgcgcttctggacgtggtctccaggcaacgggcgttcgcgtcggggacgatgccgacttcaagatctataccgagggagccggcgagggtgagccagaggtgcgcgtcattggtcctggtggcatgaaccagaacgtcatgcagtcgaaggtggatggcaatacctacgagtgccactactatcccaccaaggaaggccgttacgtcatcatggtgacctttgctggccaagaagtggccaagtctccgtttgaggtgaaggtgggtcccaagaaggagtcctcgattgtggcctatggacccggactgagcagcggcgttatcggctacccagctgcttttgtagtggagaccaatggcgagactggcgccctcggtttcaccgtggccggtccttcgcaggccgagatcgagtgccacgacaacggcgatggttctgccctggtcaagtatcatcccaccgctgtgggagagtacgccgtgcatatattgtgtgacaatgaggacatccccaagtcgccgtttatcgctcagatccttccacgcaccgatttccatcccgagctggtcaaggctagtggtcctggactggaaaagaatggtgtgaccattaaccagccgaccagcttcaccgtggaccccagcaaggcaggaaatgctcccttggacgttgtcgttcaggatgtgttcggcaccaagttgcccgtggagctaaagaacaacccagatgggaccaagaaggtaacctatactcctacttctggagttccgcacaccgtcgaagttaactatggcggagtttctacgcccaattcaccccatcgtgtttacgtcggagttccggttgatgcagccaaggtgcaggcctttggaccctggttgcagcctggagtgcgccccaatgcagccacacacttcaatgtggacgcccgtgaggctggagacgccgagctgaaggttaagatcattcatgaggaaactaagatcgaggtaccgtgccgcatcatcgataacgaggacaacacctactccgtggaagtaattccgccttccaaaggtgcctacaccactacgatgacttatggtggccaaagggttcccctgggcgagaaggtcgtcgtggaacaaacggtggatgtatctaagatcaaggtggacggacttgagccaagtgtgatcatgaatgcggccacggacttcatggttgatatgagcaaggtgggcagcaacatcgactcaggaaagctgtcctgtgcgatcttcgacccaatgggccatgtgttgccaagcaagattgtccaaggtccaaccgacgacatcttccgcatcatgtacactccattcgaggctggccgccacaccattgaactgatgtacgacaacatcccagtgccaggatctccgtttgttgtgaatgtgaagagcggctgtgatcctgctcgctgcaaggcctacggaccaggcctcgaaaaaggactgaccaatcagaaaaacaaattcaccgtggaaaccaagggtgcaggtaatggtggcctttcgcttgccatcgagggtccttcggaggcaaaaatgacgtgcacggacaatcgcgacggtagctgcgacgttgactatttggccactgatccaggagagtatgacattaccattcggtttgcggacaagcacatacccggctctccattccgcgtgctcgtcgaggagactgtggatcccagcaaggtgaaggtgtacggtccgggcatcgagcacggccaggtgcgcgaaagtgtgcccaccttcttcaacgtggatgtgggcgaggctggtcctggccgcattgccgttaagctgaccaactccgaaggtattcccgtggacaatctacgcgtggaagacaagggcaattgcatttacgcggttcactatgtgccgcccaaggctggctccgtgctcacctgccaggtgaagttctccgaggttgaagtgccatgcagtccatttgtgatgaccgttttcccgaaatcagaacccaccaaggttaaggtaaagggtgtcaatgagaagaagaaaacgcctgcttccctccccgcagagtttgaaatcgatacaaaacaagccggtcaggctgatatcaatgtggccattaagaaccccaagggcaaggcgatgcagccgcgcctggaggaggtgtccaccggcacgtacgtggtgtcctttgtgccagatgagtgtggcacctaccagtgcagcatcaagtacggcgacaaggagatcgagggctcacccttcaaactcgaagcattccccaccggcgaagccaagaaatgcaaactggtggagcaggcgcccaagattcagacctcgggcagtcaatcgcacctaaaagtggatgctcgtgaggccggagatggagcggtgacctgcaagatcaccaataaggcgggcagcgaaattgtggacattgatgtgatcgaaaaggatggtttctttgacattctgtacgcccttaacgatcccggagattatgacatcaacgtaaagttcggcggcaaggacataccgaacggcagcttctccatcaaggctgtcgaaagtatcgagcaatactcgcattctgaatacatcgaggagcacacgaccaaagtggtgcagcaaactacgcagagcgagcttgtcaacggaaaatctgagatcacctatcgcagtgtagcatttgagaaattaccactacccacaacaggcggcaacgttacagctgaagtcagaatgcctagcggtaaagtagacaaacccgtgatccaggacaaccgtgatggtaccgtctcggtgaagtacgatccccgtgaggagggatcccacgagctggtggtcaaatacaacggagaacccgtgcaaggatctcccttcaaattccacgttgactcgatcacctccggctatgtgactgcctacggacccggcctgacccacggagtcaccggtgagccggccaactttaccatctccaccaagggagccagcgccggtggcctgaccatggccgtcgaaggacccagcaaggctgacatcaactaccatgacaacaaagacggcactgtatctgtgcaatacctgcccactgctcctggcgagtaccaggtgtccgttcgcttcggcgataagcacatcaagggatcgccgtacttcgccaagatcaccggcgagggtcgcaagcgcaaccagatctcggttggctcctgctccgaagtgaccatgcccggcgacattaccgatgacgatctgcgcgctttgaacgcctcgatccaggcgcccagtggcctggaggagccctgcttcctgaagcgcatgcccactggcaacattggcatctcgttcacgccccgcgagattggcgagcatctggtgtcggtgaagcgtctgggcaagcacatcaacaactcaccatttaaggtgactgtctgcgagcgcgaggtgggcgacgccaagaaggtcaaggttagcggaactggcctcaaggagggtcaaacccatgccgacaacatcttctccgtggacacgaggaacgccggcttcggtggtctttcggtctccattgagggtcccagcaaggctgagatccagtgcacggataaggatgacggtactctcaacatctcgtacaagcccactgagccgggctactacattgttaacctgaagttcgccgatcaccacgtggagggttctcctttcaccgtcaaggttgccggcgagggcagcaaccgcaagcgcgagaagatccagcgggagcgcgatgctgttccaatcacggaaatcggaagccagtgcaagctgacattcaagatgccgggcattacctcgttcgatctggccgcctgtgtcacctcgcctagcaacgtgaccgaggatgcggagatccaagaggtggaggatggcctctacgcagtgcactttgtgcccaaggagttgggcgtgcacacggtgtcggtgcgctattccgagatgcacatacccggatcaccgttccagttcaccgtgggaccactgcgcgactccggcagccatcttgttaaggctggaggctctggtctggagcgaggtgttgtcggagaggcggccgagttcaatgtgtggacccgcgaggcaggcggtggttccctggccatttccgtggaaggtcccagcaaggctgacatcgagtttaaggaccgcaaggacggcagctgcgatgtgtcgtacaaggtcaccgaaccgggagagtaccgcgtgggcctgaaattcaacgatcgccacatacccgactcaccattcaaggtgtacgtctccccggatgcgggtgatgcccacaagctggaggttcagcagttcccgcagggtaacatccaggcggacgctccctaccaattcatggtccgcaagaacggtgccaagggtgagctggatgccaagattgtggctccatccggaacggacgatgattgcttcatccaggtgatcgacggcgagatgtactcggtgcgattctatccacgcgagaacggaatccatgccatccacgtcaagttcaacggcgtccacatacccgactctccattcaggatcaaggtgggcaaggatgtggccgatccagctgccgtgcacgccagcggcaatggattggacgaagtgaagactggacacaaggccgacttcatcatcaacacctgcaacgccggcgttggcacgttggccgtctccatcgatggaccctccaaggtggccatggactgcacagaggttgaggagggctacaaggtccgctacaccccgctcctgcccggcgagcactacatcacggtcaagtacaacaacatgcacatcgtgggctcgccattcaaggtgaacgctaccggcgacaagttagcggatgagggcgcccaggagacgtccacggtgatcgtggagaccgtgcagaaggtggccaaaggaggcaagaacacgggcgtccatctgcccacctttaagtcggatgccagcaaggtggtgtccaagggtatgggcctgaagaaggcctacattggcaagcagaaccagttcagcatcagcgccaccgatgcgggcaacaacatcctgtacgtgggcatgtacggaccaaagggaccctgcgaggagttccacgtgaagcacgctggccacaacaactataatgtgcagtatctggtgcgcgatcgcggccagtacgtgctcctaatcaagtggggcgaggagcatatacccggctccccattccagatcgatgtgtagggcgctatatagccggccaggcatatgtgtacgtgtagatatatgcttcgcatgtgtatgtgtgtgggcgcgcatgttccagggtcaaaagtcgtgtgtttcttgttttcatcataacgctctttgtttaattttaatttcttgatttatcatcatattttaggtaagtttttgttatttgtacatacatggaaggaagaagcttctgtttttcgacgcgccattttcactctttaaattgatcttacgttttatttgttttcttgtgaatacataaaattaacaattgccgatatgaattttgatagacttcatggaaacgaactaaagcacaacttcgacacacaagaattactattgcaatgcgaataaatctcttaaacaattatttaatacttaagcgaaaaatttatgatgattaaaatgattatgacgtattatgttttctattatcactatcgatcatgtaatttacgtgaaataaatcaaaacac

SEQ ID NO: 7542 - protein, 2370 aa, DROSOPHILA
MADPNAGDRRQTSTFKNKNLFNGGTCSSNNADGPGSANLTHGGELVQNANYTNGQTTQATIFLSNNNNSSNTGNHYYNNSNSHGRKNAPNSQQNQQNACVYTTSNSNNNNLEHNFSNLHFYAQQPAAHYDVCHQQTNDYYQPARQEGQQADQYEENFDEDMEAERDLAEDAQWKKIQQNTFTRWANEHLKTIDRSINNLETDLSDGLRLIALIEVLSQKRMPKYNKRPTFRSQKLENVSVALKFLQDEGIKIVNIDSSDIVDCKLKLILGLIWTLILHYSISMPMWDGEDDKQLNGSGHTPKQRLLNWIHAKIPDLPINNFTNDWTTGKAVGALVDACAPGLCPDWELWDPKDAVQNASEAMGLADDWLNVRQLIKPEELVNPNVDEQSMMTYLSQYPNSKLKTGAPLRPKTNPNRVRAYGPGIEPIGPVVGAPANFTVETFSAGKGSVDVDIQGPNGEIEKADVRFNNDKNLTYTVSYIPKSEGSHKVAVKFSGRDIPKSPFPVKVEGHAGDASKVKVTGPGIQPNGVTIKKPTFFDILAKDAGRGVPEVIIIDPANHKTSVAAKVRQLENDTWRCEYVTALQGLHSVNVFYAGTPIPNSPFPVKVAPLSDARKVRASGRGLQATGVRVGDDADFKIYTEGAGEGEPEVRVIGPGGMNQNVMQSKVDGNTYECHYYPTKEGRYVIMVTFAGQEVAKSPFEVKVGPKKESSIVAYGPGLSSGVIGYPAAFVVETNGETGALGFTVAGPSQAEIECHDNGDGSALVKYHPTAVGEYAVHILCDNEDIPKSPFIAQILPRTDFHPELVKASGPGLEKNGVTINQPTSFTVDPSKAGNAPLDVVVQDVFGTKLPVELKNNPDGTKKVTYTPTSGVPHTVEVNYGGVSTPNSPHRVYVGVPVDAAKVQAFGPWLQPGVRPNAATHFNVDAREAGDAELKVKIIHEETKIEVPCRIIDNEDNTYSVEVIPPSKGAYTTTMTYGGQRVPLGEKVVVEQTVDVSKIKVDGLEPSVIMNAATDFMVDMSKVGSNIDSGKLSCAIFDPMGHVLPSKIVQGPTDDIFRIMYTPFEAGRHTIELMYDNIPVPGSPFVVNVKSGCDPARCKAYGPGLEKGLTNQKNKFTVETKGAGNGGLSLAIEGPSEAKMTCTDNRDGSCDVDYLATDPGEYDITIRFADKHIPGSPFRVLVEETVDPSKVKVYGPGIEHGQVRESVPTFFNVDVGEAGPGRIAVKLTNSEGIPVDNLRVEDKGNCIYAVHYVPPKAGSVLTCQVKFSEVEVPCSPFVMTVFPKSEPTKVKVKGVNEKKKTPASLPAEFEIDTKQAGQADINVAIKNPKGKAMQPRLEEVSTGTYVVSFVPDECGTYQCSIKYGDKEIEGSPFKLEAFPTGEAKKCKLVEQAPKIQTSGSQSHLKVDAREAGDGAVTCKITNKAGSEIVDIDVIEKDGFFDILYALNDPGDYDINVKFGGKDIPNGSFSIKAVESIEQYSHSEYIEEHTTKVVQQTTQSELVNGKSEITYRSVAFEKLPLPTTGGNVTAEVRMPSGKVDKPVIQDNRDGTVSVKYDPREEGSHELVVKYNGEPVQGSPFKFHVDSITSGYVTAYGPGLTHGVTGEPANFTISTKGASAGGLTMAVEGPSKADINYHDNKDGTVSVQYLPTAPGEYQVSVRFGDKHIKGSPYFAKITGEGRKRNQISVGSCSEVTMPGDITDDDLRALNASIQAPSGLEEPCFLKRMPTGNIGISFTPREIGEHLVSVKRLGKHINNSPFKVTVCEREVGDAKKVKVSGTGLKEGQTHADNIFSVDTRNAGFGGLSVSIEGPSKAEIQCTDKDDGTLNISYKPTEPGYYIVNLKFADHHVEGSPFTVKVAGEGSNRKREKIQRERDAVPITEIGSQCKLTFKMPGITSFDLAACVTSPSNVTEDAEIQEVEDGLYAVHFVPKELGVHTVSVRYSEMHIPGSPFQFTVGPLRDSGSHLVKAGGSGLERGVVGEAAEFNVWTREAGGGSLAISVEGPSKADIEFKDRKDGSCDVSYKVTEPGEYRVGLKFNDRHIPDSPFKVYVSPDAGDAHKLEVQQFPQGNIQADAPYQFMVRKNGAKGELDAKIVAPSGTDDDCFIQVIDGEMYSVRFYPRENGIHAIHVKFNGVHIPDSPFRIKVGKDVADPAAVHASGNGLDEVKTGHKADFIINTCNAGVGTLAVSIDGPSKVAMDCTEVEEGYKVRYTPLLPGEHYITVKYNNMHIVGSPFKVNATGDKLADEGAQETSTVIVETVQKVAKGGKNTGVHLPTFKSDASKVVSKGMGLKKAYIGKQNQFSISATDAGNNILYVGMYGPKGPCEEFHVKHAGHNNYNVQYLVRDRGQYVLLIKWGEEHIPGSPFQIDV

SEQ ID NO: 7543 - DNA, 11314 bp, DROSOPHILA
ttcccctttttcctcctctcggcttgattattatgcaaattaattgtttggatcttgctcttgggttctcgttcacattctgcatttgacgactcattgaaatgcatgaaatgttaccagcctctccaggaaggtacaaaatattatgcaggcccgtcggctaaacatgattatcacagttccacctcatcgcaattaccaggctatttgaggaggagtccatgaccatggctggcccttcggcttcttagttttacgcttcgcatttgagcacagtaacaaatgagcggctgaccaaaaatctggtaatcgaattaggcaacttcgtgttttataaatgttatcataaatattccattttattaattaccgcgcataattcaccaacaagaagcgtagagagatagagactttgttagtggccgcctctctcttcgagtcttgacttggaattcgtctccgaacggggcgactcattagcatacttaatttgtttctaatttattcataattgtatatttgtggcatcctctctctgaagatgactgccttgtttttgatcatgccaaactcccttttcctccattccgctgacccttcacttgctgatttatgggaagaccactgattaatggcaacttcgattccggatctgagccggaatcattccgtactcccaagatcggccggactggctgtgattcagtttcggcgttggcttcccctctcttctcaccagtaggagttgttacgaacattataaaggggcttttgtccattaggtatcggcttatggatcatttgtgggaattaccatgaagacataatgagatgatgaagagttggtgtgcttggtcttctcaaaatggggtaaaagtagttttattttgaactaggtattgcatgaactttattcagttaatttatacttagttcacaaataagctatatttctcctatttgtggctaatatcagtatttgcccaaaacaatatggtgtaattttacttattgaatttatttaaaattggagcttaggtaaatacaattgaataacttattagtttaggactgcagtgaattggaaatctttttgcacttgggtttggggaatcctcgctgaccttcgtatcgtccattgcatccttgaaccttaattgctccaccagctagctgaccacatcgtttccatgtccattctgacgcaacagttccagtttcagttcgtgctctctcgccttcagacgcagtgcggcaatggaggaggtgcgcctgtcctcgggtggcgttgcagctctgggaggtggcggcggagcctgatgcgatggtggaggcagttgtcgttggggagagtgcgacaaagtcagggccaccggggaagtctgggtgggcgatagactcgaggcctgttgggtcaaggcgatcccaaccagatgctggggagaaagctgagcaggctggactccaactggcatttgaggaggcgcctgaggtggcggggggtgagcggttggatgttgttgatgctgggaggcgtgcccggaggcaggcgatgtgggtggtgaggcgagcatgtggttgggcgaatgcagatcgggagatcccaccagtagtgcaggaggttttccaagtggagtcccgcgcggaacggccgtcatattggccagcaaggattgaaatgagctcgagggagagtacataccagccattccatgtggtaacatatggggaggagccctgcaagaaattgcagataaatttaagaatggaacttttacaaataacgtataaatagatctggttattattttaataaaatttttaacgacttttcttaaaaatcaggatagactgattactcacctctggaattggttaaagtagcccgacggaatcatgggggccgcagagaggtgcgggtagcggaaggcggcaaggttcgcggcatgttgggcgtcgaagggcttgcgcagctggaagcccaggtgagtgaagggattgggcggtagggcggccccaactaccgtctgcatggtggcggcgccgccgggcaggtagggattatacggatgcgactgggggccaaccttctcctgcttgcgccacttggcgcgccgattttgaaaccaaacctggaaagtaagggaggaatgggctttatgagttatgtgctgcaagcaggctactgtatctgcatcaagttccgaccatcctgttcatatgtgctccgatcgcggagcatccaattaatgggcgttgttattgaaaacgcccctttaattagtttttaacataacaatctgaatatggagtccttcccaagaagccggctcctgattgcactcggattaggagctgcgaggggagtcccgagcagttgaagtccgcacggaaatggatgtaggcaaataatgttgtttagcatgaacagtaattaaaaagaagccgcgactttccgaccataaaatgaccgaccgggcatgtaatgactggcactaaaacagaattaaatgaatttctccagccgcggatctgcgctggctgtccgtctagtcccgtctcgatttcattagtagctacatgctccattatttttcaattttcaacattgttgggtgcacgtgggccacgcgaattaaccacaaatctgcgcagcatcgagccctgaatttccctctttgcgaaatgctcacctgaatgcgcgcctcggttaatccaattttcatcgccagctcctctctgcaagaaaatgaaagagaaaccttggttagctgggaaaaactgcagagacatggcgcaggcatttaactaaccggcctgcaaactgcttttctatactcaaaatgtttagcgaaccaattttattaccaaaatgcaaagtcatacgttgttaaagcgctgaccttagcttacctcctgcgcttctcgttccaaagcaattgaagcttattcagagatcattgtcgaattgatttatttccttaattaattgctgcatttaaatgaatccgcagcctaatgaattgaaaactgccagcgacacggcaaaaagttgatctaattgtggctgcgattgacattgtaagctcacttttttatttcggtttttgtttcagtcccagcttcgtgcggtctcaattagcgctcactttggcttgtcgactgcaaaagtgcctgactttaaatttatggcaattactgtggctgtctttcaaccacattgctgcatgctaattgcgatcgttagagtctcttagggccgagatgctgctattttggctagctcgggaggagtcccagccaaacccatgggtataaacggctgctccgaataagatcgatcgatccactcagggggtcgcgtcgttatgggcattattattatcacccgatcgttcccatattcgtcttggtatcgtaaaaccaagaatcaactttccagcctttgtcgcgcctcgatgagcgatttatgcaaatttcttttcttctgcggcactcattttgtccggcttcgaccttatcgcatttcgtcatatgttactcacctcgtaaacacgtcgggataatgggtccgcgagaatgccttctccagctcctcgagctgaaagctggtgaaggttgtgcgatagcgccgctgcttccgcttcggggcgtactcgtccgcttcgcagtcgctgtttccatccgaaacggggctattggtgccgccactggccccacttgctccactgggcgctccgcccgagaccgacatcgaaaccgtcagcgctgcgccggcggaggcggccgacgatcctggggcacgatccaccagcactacggcatccgggtgcgctagcttggcttcttgcggtagttcctccagcttgatttcctccgatatgcccataatccaggagggcgatctagtctgatctcgaagacagcggctacacagagataagttacaaattaacaatttaaaaaaaaaaaataatttatagttcttaatacattttcatcaattatatagctaattaagagccgtctagtttcatcataaatattcaagtcgaaatgactaaattatgaaacttgctgcgctataatggctgaagataaaaatcaataaaagtaagcaattctaatctcatttaaaaaaagaattattctatatttgtatgtggtctttttgttttttttttctatatgtaataaaaggggttgaaatatctagttagccgcgcattagaacctcgtaattcaataaacattaaacgtgcaattatcgtgcactttattatgccaatttccgtaatttgccatctagccatgaccaagtcatcgcttgggtcgggacttgctggttgaggctaaccgcggttacactggacaacagggtttggccaagggtgtggggagtaccagagggcacaggagagggagcggcaagagaaccctgacgaaagttaaattctgatcggatcagatcacaactacaaccatttatgaaaaatacattccattttggttgactgcagataacataagtcaataaagaaatatttttagctttctaatccgaatttagtgccgaatttctcatagctgagtgcttattctatacgttagtcagtcgacggggtcttctgcggtttggaagcgtgccttgtggtcatggcctccacttcattttcagattcatcttcgggctgaggtttccgctgcccagttgcagctgctgacgaactcgcctcaatgcaaatcgatgatgaccaccgcatggggctgtccgccagctgatctcttccatcaacacgtctttcatcgggcgctgagttgggcttatttcgcttcccggcaacagcagacttcatgtgcagatcgtttggaattttaattaaattgggcggcaacttcattttcatcatcatcaactcaacggctgcgctgtggtcaccgttcgagacccgtgtccatgtggcttctatcagatcaaattaatatcagatgctagctgggcccgagtttctcttcttcatgaacagctcccgaagtttgagcttgcttggcttgctaattccatgtttggctaattaatatacgatgtctttaaatgacaactaagtggttaggcccggcttgtaaccttccccttctgcttccatctctgagcttcaaaaatcagggccttacctccagacccatgtcccatgcccaaaactccgcttgattgatggccgccgcttctgttgacatctctacatatatcaaaattgtccaaataccttgttaaatggcaaattagtgtggcggtgattgatttagttgcattcttgcgcggaatgaagttgcaactggcaaacaagcaaagccagagaagggaaatgtgcactgaaaaaaaaatcttgacacttggtcttcaaaattgctaaagttttaaaattattatttgaagttgattgacgaaagatcacctaacatattgttagttgcttttgatttattgatttcttttatttccaaagcttttgtttaagtgcactgcaagtggttcaagacgttccccaaagccagaaggttcagcttgagtggcatctttcctcacctcgcccaagcattccgcatgaatcctccttgtcagttaactccagttcataactcatttctgggctcgatcataacttcggttatgagttgccatgtcagttttcaatgttgtcaacaaattccgcgtattgacagctgacaaacttaatttgcggtcagcaaattattaaattagttgtacgaatttgcaattatgctactagtaactagttgcgattgccaccgacttcattacaagaccagcactgattaattcattgcatgtgaacgtgaatgtgaatgcgaatgggaaccgttgagcactttggagctatgcggggaatgtgtgccgttcagctttgttgtggagccgccttataattgtatccgcgttacgactttattatgggccaggcaatcggagcagcaggaataggaatcctccgctgattgacggttcactgggtaattaaaaggcagagactttgctggaaactgtcaagtttttgacgtctgcctaccgatttggcttggtcgcgctggtcgcgttggtcgcatggcttcatttagtttaagtcactggctggtcagcaactaatcaagttaacgctgcacttgctctgcccaaaaccagataggcgaccactccaggaagcctgggatgtggatgtgatgaaatgtgatggtataggaggacgcgaacttctggtgggggcgatttcgtggctaacattttgacacaactactcggcgtcttggccctcttaggccctgcatgctaatcaggccaagcgccagtcaaagtcaaaggcagaccaagtcccattccaaatctcagtcaaagtctggggttttgagttgtgcccgagtccgagtctggcaacttgtttgcggttgcttgttccgtttagagataagctccattagtgtctggggaaatatttaagagcaacattgtaggctgtgtgggtttcctagcccagcacagtcataaagccactggaaaaaaagttgcgccctattggagctatttcactcgtagctaataaacttatcctacatttagcgactttctctcagtacattcatatggcaaatgaagaaattaattcgtaatgcgagacaagtgtatgaagctacatctatttggttgtccaccgtccatccgatgtactccattgcccactgtccgctgtccggcgtccgttgtcgtcacttctgtcatctcgataagcatcaatgtttctgccttgcctggctgctctttccacaactcaaagctgcgcagctcctctccgcagagacgcgacttcggctgggccttcagttggctccttcatgtttggtgtcgtttttatggttgcacttttgtgttttagctccttcggctcccgatcttcccggtgcaatcctcgatcctcgattctcggtgtctggggactgttgggctggcatatttcattaaaagccgggccagagggacggcatcaggtagaacagcaaacagaagctcttttctggcatttcgttaatgcgcctccgtctcgatcctccactctccagactttattgatcagactccagtttccagccagtccccagtctggccggtatctgggctgcttatttatgggtttacattaggctaaaccactttagtcacactttgatgatcggcattgtaatttcgcctccggttcttcgataatggcaagcattttgggtggcttaacttttggccccgagcgaaagctcaatgatcgcccccgataccagtcccttggtggtcccctggagaagttgacggattggccagcgacgttccaagcttggtcgtttacttttggttcgataagaccaattattattttcgaccagctcttgtaagtcacccagaaatgtttttaactaatatcacaagcagctgagctgggccgagtcgagtcaattccgtagtgtttatctcatttaagctgcacctgagccctccattcaccttccagttgttgggttgtttgtttcttggcgccgtcttttggaccaggtgcgataaggcagcattcttgttgttggccaggcgccgtcatcatcgtctgtttctgtacctcttgttctggggtgtacgttatggacctctaatgcacacactcccaattataattagtttattcatatcctgtgtcgaagttgctgcctcatttgttgttcttttccacaatcttaattcaatttactgcctatcagacgaagttgcaacgaagggtctagtacccttcccctacgcctggtgaatgaagttggtcaactaagttgttgatctacttatcctatataatccctaatatgtctacaatttaaggtatacattaaagttttaggtctacaggcagaacacgttcccatttgagactatctattagctaaatacaataaaaattgtatgtacttgaacttttgggtaaaaatgtattgacacatggatttcgagctctccaagggcattcgagattcgctcccaggtagcaaaaattaccccgtgtccaccctaatggatcagagtgccgggacggtagtccaaaggtagacgcaagttcaaattgtgactcagagccaggatcagcaactcaagacccacacagaagaccaagaagttgttgatggtgaatggcgatgctgtagctacaagcttagcccgtgttggtgatgttgatgcggggccaattactcataaaaagcatgttaagaacagcagtcgcagtgaggagctataaattgggaccggaggggatcggggatcggtgatcggtgttcggggatcggggatctggggattggacaactgttgcccgacgccatctccatcttcgactgttccgccctgccctttgtcattgtcttgtgtggtttgataagcgaatccgaggcagacggtgggcaatttgtggacgacgacgttaatttctcatgtttgcatgttccatttagcgaggggcaggggacaagaattaatgaagcacatctcaaagggccctggcgccatcttcccgctggagaagatttctctcggggggtgtgttgccatcaacgatcaacaatcaaccgacatcccttcaaaagacagcgccccaaattgggagctgtcgagcaatcgaacaacagcgaatcaaatcaaatcagagttcgtgttcagatagctgccaaaaattcgggtgtatatctacaagatacagtatctaaggtatctggcaacaagttttaattgtatgttgccgtaattgaattgaactacatttcggtggagaacatattttaattttacgctgtacgggacaatcttatcgaatcttttcggtattatctattgggaatgatgctacctcatagatacaaatacactgcgaccaacttgcgtcacaaattcgtttaaacttgtgctgacaagtcacatgagttataagtattaattaaatcagttggccaagtgcccgattatcaccaggaaagagggtcccggttttcctttgccttatcaggacccacatatctgtctatatttgtgttattttcactatatattcggggccctcgtccgcgtcacgaagctaagtggtcagtggcttttgacaagattatcggcgggtgataggtgtggctggttaatttcatttattctgtaggtacacgggacaagcataagactatgcccccaactttcgaccaaaaccacctctagaagggaaaaacatcagctagacaaaacgtgatttattggcgctgactgcactgctgacaatttgtactctttaatggtgtttaattaaaaccaatcagcgataaacttatcgaactatcagctaaggcaaaggcgaaatctttcgaccctcaaaattgagttaataaaattctattctacagcgatgatacgatttggcttgatatttgtctgatttgatatgtccaggtgggaaattaatcaaatttaatgatatttatgtctcgtcatacgttttatttttccctcttcacattgattgggatgattagacaggtgaattatgaaattcatttatggcttatacttgtagtatttgtctatcatgctgagaagtaggttattcgcaaggtgtgataataagtttatgtgatttggggatcggaagtggcggaaaagggtcaagattagtttagggctaaaacaaaatttatataaattgcttgattaagaaaatccctatctttgatatgatataaggcaatgactacggttgtgataaaaaattatgagttacagtaactaggattccctgtttaatgcacgctctcgatataacaaatcctattctgtccaaagaatgtttcatatatttttgataaaatgtctgagactaaccttccttctcctccttaatcgccagatattgtacggatggtcttgataatgtttggccttctgaatctctctcttcctatttaaccgggctaataagccctgtagctctcaccaacagtaacttttgccgacggtcttttgtccacttcttccaacaaccagataccgagtaccaagcgttcactttgatcgcgatacacctttgatgggtataactttgtactacgcgcaggataccgacacttccgcaatcgtacgcactttaacccggaaacaacaatgtatccccagctcgactattcgaatcggaatcggaaccgaacgcgacgagatgaccgggctgttccagagccggcagcaaactacacggtgagcagttggcgcgcaggtgaaaactctggtgggtctgaaacaacaaccggttggagttgttgttttccaatgttgcgagagtggttttctggcctcccagtgtttttagtgtttcgtagtgccgcagagcgagagggagcgatgcgatcggagcatgtcgatcgatcgtcgcaggtgtcgcaggtgaggcggcaggtggccgggaggcggactccgcctctttctggcggttcggcctatgggaaagcagcattcgacggagcgaaataatggcggagctgctctctaccgctctctgtcgctccgcatggccctctctctcgcgcctcttcgattgggcgtaattgaataagccccgcacaaagtgcaataaatttgattagcaaaatggaaatttatttgccccccagctcaacgcgttttcctctggttgccatagatgcatttgccagttgttgcggctcataaattaaataatttagccaagacatatgggaaaaagagttgcgtgtattggggtggggacttggaaccggccatatagaccgttttggtagtgttaagggcctcgttaatgactttgttggctttattggatgattgtcggactgtagactgttttgcttacccatcggagtgggggtgtcatgcggggaagggcaataacttgagaaaaaggtcaatgagccagctatgtagatgactcaagttaaatttgaatgaaggatgtttggaaaagccgttgatagtttttaaataagtgaatattgatttagattgatacaacgtgaaatacaagccataggcttgtacatcacatcatttttatcacatccatcttcgtaatttaatgtaatccaaggaaaaatgttttccgtccatgatgaaaaactgaactcagcccagctcttgccatttccgagcagacctaacagattccattccttgataaccacttcattaggctttatataagcgggcctt

SEQ ID NO: 7544 - DNA, 1792 bp, DROSOPHILA
gccggctctggaacagcccggtcatctcgtcgcgttcggttccgattccgattcgaatagtcgagctggggatacattgttgtttccgggttaaagtgcgtacgattgcggaagtgtcggtatcctgcgcgtagtacaaagttatacccatcaaaggtgtatcgcgatcaaagtgaacgcttggtactcggtatctggttgttggaagaagtggacaaaagaccgtcggcaaaagttactgttggtgagagctacagggcttattagcccggttaaataggaagagagagattcagaaggccaaacattatcaagaccatccgtacaatatctggcgattaaggaggagaaggaagccgctgtcttcgagatcagactagatcgccctcctggattatgggcatatcggaggaaatcaagctggaggaactaccgcaagaagccaagctagcgcacccggatgccgtagtgctggtggatcgtgccccaggatcgtcggccgcctccgccggcgcagcgctgacggtttcgatgtcggtctcgggcggagcgcccagtggagcaagtggggccagtggcggcaccaatagccccgtttcggatggaaacagcgactgcgaagcggacgagtacgccccgaagcggaagcagcggcgctatcgcacaaccttcaccagctttcagctcgaggagctggagaaggcattctcgcggacccattatcccgacgtgtttacgagagaggagctggcgatgaaaattggattaaccgaggcgcgcattcaggtttggtttcaaaatcggcgcgccaagtggcgcaagcaggagaaggttggcccccagtcgcatccgtataatccctacctgcccggcggcgccgccaccatgcagacggtagttggggccgccctaccgcccaatcccttcactcacctgggcttccagctgcgcaagcccttcgacgcccaacatgccgcgaaccttgccgccttccgctacccgcacctctctgcggcccccatgattccgtcgggctactttaaccaattccagagggctcctccccatatgttaccacatggaatggctggtatgtactctccctcgagctcatttcaatccttgctggccaatatgacggccgttccgcgcgggactccacttggaaaacctcctgcactactggtgggatctcccgatctgcattcgcccaaccacatgctcgcctcaccacccacatcgcctgcctccgggcacgcctcccagcatcaacaacatccaaccgctcaccccccgccacctcaggcgcctcctcaaatgccagttggagtccagcctgctcagctttctccccagcatctggttgggatcgccttgacccaacaggcctcgagtctatcgcccacccagacttccccggtggccctgactttgtcgcactctccccaacgacaactgcctccaccatcgcatcaggctccgccgccacctcccagagctgcaacgccacccgaggacaggcgcacctcctccattgccgcactgcgtctgaaggcgagagagcacgaactgaaactggaactgttgcgtcagaatggacatggaaacgatgtggtcagctagctggtggagcaattaaggttcaaggatgcaatggacgatacgaaggtcagcgaggattccccaaacccaagtgcaaaaagatttccaattcactgcagtcctaaactaataagttattcaattgtatttacctaagctccaattttaaataaattcaataagtaaaatt

SEQ ID NO: 7545 - protein, 408 aa, DROSOPHILA
MGISEEIKLEELPQEAKLAHPDAVVLVDRAPGSSAASAGAALTVSMSVSGGAPSGASGASGGTNSPVSDGNSDCEADEYAPKRKQRRYRTTFTSFQLEELEKAFSRTHYPDVFTREELAMKIGLTEARIQVWFQNRRAKWRKQEKVGPQSHPYNPYLPGGAATMQTVVGAALPPNPFTHLGFQLRKPFDAQHAANLAAFRYPHLSAAPMIPSGYFNQFQRAPPHMLPHGMAGMYSPSSSFQSLLANMTAVPRGTPLGKPPALLVGSPDLHSPNHMLASPPTSPASGHASQHQQHPTAHPPPPQAPPQMPVGVQPAQLSPQHLVGIALTQQASSLSPTQTSPVALTLSHSPQRQLPPPSHQAPPPPPRAATPPEDRRTSSIAALRLKAREHELKLELLRQNGHGNDVVS

SEQ ID NO: 7546 - DNA, 5054 bp, DROSOPHILA
actgcagcaagaaaggctaaactttcaacgcgcccgcgtttttgaggccaatcgcagcctccagattctggccgacacctgggagcacggcggctacccactgcacattaatttggctgtgccgacacccaccgtcccaaaaccgaggcagatgtccgatctgctcagtcgggttcgcgagaagccgccgcttctgtcagacttgtacgaggcgcagcactctcattcccatccgcagttcctgcgtgccatgcccaacttcgtgctcagccagccctcgccggtcagccaatcctcggccgggctgggagacgccgacgtggtctactgacgaatcaatgctgctgcgtacattgtaaatagtgtattattaaacaacttgaactatgtaaagctatacgggattggggtagcggcgcatgtacttgttaagttgcttgtagttcaggttgctgcccggttggacgattccctggttcacggtcttcttcgcctcaaacttacggtccatgtagcacttgtagcagttctggaactggctgatctccttgtggcagtacttctccacgaattcgttgtctttcaagcaggcgaacagcacgcccatctcctggagacaggccacatcggatccggagtccgccttcccgctcacggtgttcttcagccgcagaggcagaatctcctggaagggcacgtccttctcgctttgaggcgctcggccgcgcgcggcaaacagggctccgggtacgcgcatctgaaaccccttggctctgtgagtccggtcatttcagtcaaaaaatacgattttacccacctcgtaatttccaccgactcctggacaactgaacagctgcttcagattacgtcacgaactggttcctgcttttggtggtgattgccagtacgtctgcagccctggtatttcgtttaacataagcatacggtcacacttagagtctccgtggaacaaaaggtaaataatcaacctgcgggcacgccaggagattcttcaaggatcaccgaagaccacgcgcacatggaagccgccgagcagctcgacgaggcggcagcaccagccgccctttgcgcgccttcgcgtgcagcctacgcggccgccgagcaggaagatccagacccagaccaggagcaggaccgaggccgggaatcgcccattggttcgttggagtgcgcccccaccctgagcagtcgcaagcggcagctgagtcgctttcatccataccacgggtccaatatccagttgggcgacgacgccacagtggcctaccggagagctagttttgccgacgccctgacattctcggagcgtccgctggcccctggggacatcttcttggtggagatcgaaaagatagagcgcggctggtcgggccatatgcgtcttggtctcaccgaactagcgcccaatgtgattcgcaccagcagcgagggaaaaaaggcgcctcaggagaatctggtttttctcgcgcaacccaagggacaaggcagcactcaacagagccatcaaggaactcaaggacaagctgtgtaccctacggcaagactccttcgacagattccttgaggagctggaacctggtgacccgcaacataatctgtggcaagtcacgcgtcatatcaggaggcctgcaaagaaggcgtcgccggtgcgaaaagcggacggctcttggtgccgctctgaagccgaaagagctgaagcgtttgcagatcacctccagaatgcattcacaccatttgacagatgcactggcgaagagcgtgctgcaaccaccaggttcctagagagtccatgtcctcctagcctgcccatagagcccgtcaccccagaagaggttgcgcaagagatcgcctccctaaaggctagcaaatccccaggactggatcgcatcgacgccacatcccttaaaatgctgccaccgccctgttcccagttgttggccaacatatacaacagatgcttctcactagggtacttcccgagatcatggaaacgtgcagaagtcattctcaccctcaaacctggaaaacctgaagccaatcttgcctcatatagaccgattagtctgctgacaatcctctccaaaatactcgaaagagtatttctgcgcagagtcatgccagtactggacgaggctggactgatccctgatcaccagtttggcttcaggcgatcccacggaacaccagagcaatgtcaccggctcgtagcacgcatcctagatgcattcgagaataaacgatactgttcggccgtattcctggatgtcaagcaggcgttcgacagagtgtggcatcctggactcctctacaaactcaagtcccaccttcccagttcccactatgccctactcaaatcgtatactgaaggaagagagttccaagtgcgatgcggttcctcaacaagcacgacaaggcctatacgagccggagtacctcaaggcagcgtccttggtcccatcctctacaccctgtttacagcagacctccctatcataccctcccgttacctcacagcagccacctatgcagatgacacgggcggttccttgccaccgcaacaaaccctcaattagcatcagccatcatccagaggcaactggatgcactggatccatggctgaaacgctggaacatcatgatcaacgctgataaatcctcccacaccaccttctctctgcgcagaggagaatgccccccggtctcactcgacggcgacacaatccctaccttcagcaccccccaaatatttagggctgaccctagacagaaggctgacttggggcccccacatcaacagtaagcgtatccaggccaacatacgcctaaagcaactccactggctcatcggtaaaaagtcaaagctgcgagagaaactaaagattctcgtctacaagactatttctcaagccaatctggacgtacggaattcagctgtggggcactgcttgcacatcccatagaaggaagatccagcgatttcaaaacagatgtttgagaatagtctccaacgcccatccctaccacgaaaattccgccatccacgaggagctcgggattccatgggtagacaacgaaatctacagacacagcgtgagatatgctagcagactggagaaccaccacaaccacctggccgtcaaccttctagaccacagccaatccctaagacgcctgcagagaacgcacccgcttgaccttactcaacatacttaatcatacttaacccctacccaagtacactcgatgtactccccttaagttaatgtttccctccaaaaaatttaattattgtccactaggacagattttaaataataaataaaaggctacacaaaaaaaaaaaaaaaaaaagcgagggattaccccatttcgcacttcccgacctcgcgaacctaggcaacagctggatctacccaatctccaagttcgaaatgaaccagcgccaggatgcaaacgacatcatcgagcctgagacggacgacgcgccccacagtatgtacagtctttaataccatgcgcccctgtctatagccagtctttggcaggaaaccttcttggcgacgctacgcacgtgagaacgccccgcggccttctaccaaagagacttctacgtccggcgatgggcaacggcaatgactcagacatcctgctcacggacaagggctcccgcatcggcattatatacgtgcccactgtgcaaagcgactcgaagggcgagctgcactttatcatcaacggggtggatcgtggccccgtttcccgagacattccgctcaacagagcgcctctgttcgtagtgatcgatgtgtatggcaccaccaaacagattcgaattatccagctagagggcagtaagtgaaatagatcgggatgtgagatggacttctttttatttaatccatcccccctttctgcagttttgtccctgcagagcgcttgtcgcaacgttatcctggagagctttgcggaggacgcgatcagcgagctgccactaccggagagcatcaagcgatttctgctgcgccgcgactagggctctggaccatgagctctatgaaatagggcccagtgagtgtgaatgagaaatgcgtgtttggggaagtgtgcatgagcttgggtcgtgatagtctgtttacccatatatatattgtatacgcctgcagcgctagtgaagggccctttcattgacgcccgactccggaccctaacagatctacggatctggccgatctccgctagagggcgcttatatttgtaatttctgtagatatattttatactttggttctagttaccaatacactctttacctggacgacctatgttgtagatcataatcctcgccatcgtttgtgtatgtgtggatcaccaacaccagcggaggtctcctgggcgccccgacttttagcgtttcggtccccaaggcgatgcccgtttccattaccgcctaagcgtattgttgctatatgtaagttaagtccacttaataaaggatcgatcaaagtcgctgtaactgctaaaatcttactttgatctaatccgtttattcaaaagtggatatgcatatagaatgtgtggatataaaacaaaacataatagagccgccgcctacttgccacggttttctgccagcttggccttgaagatgctcttaagctcgtcagcgccgtcgccgtttacctcctggtagtagggtagctctgccagacgcttcagccaggcgtgcatcttgggaaacttaaattcatcgatgggagcggtgtcgttcaccgaggttacggtggccacggcgcaaaagtctgcgatggttagatcagaaccacacaaatacggctgatccttgaggaatccctctaggatctcccagcacttctggatgtatgcgatcttgtcgatggagcagtccgtcgatccataatacaggatgggctcgtaaaggaagcgcaggcgcgcgaagaggtggccggagtccagatggagccgagcatccacgttggcgcgctgcaccaattccttcggatagagctgctgct

SEQ ID NO: 7547 - DNA, 1008 bp, DROSOPHILA
ccaggagattcttcaaggatcaccgaagaccacgcgcacatggaagccgccgagcagctcgacgaggcggcagcaccagccgccctttgcgcgccttcgcgtgcagcctacgcggccgccgagcaggaagatccagacccagaccaggagcaggaccgaggccgggaatcgcccattggttcgttggagtgcgcccccaccctgagcagtcgcaagcggcagctgagtcgctttcatccataccacgggtccaatatccagttgggcgacgacgccacagtggcctaccggagagctagttttgccgacgccctgacattctcggagcgtccgctggcccctggggacatcttcttggtggagatcgaaaagatagagcgcggctggtcgggccatatgcgtcttggtctcaccgaactagcgcccaatgtgattcgcaccagcagcgagggattaccccatttcgcacttcccgacctcgcgaacctaggcaacagctggatctacccaatctccaagttcgaaatgaaccagcgccaggatgcaaacgacatcatcgagcctgagacggacgacgcgccccacagaaaccttcttggcgacgctacgcacgtgagaacgccccgcggccttctaccaaagagacttctacgtccggcgatgggcaacggcaatgactcagacatcctgctcacggacaagggctcccgcatcggcattatatacgtgcccactgtgcaaagcgactcgaagggcgagctgcactttatcatcaacggggtggatcgtggccccgtttcccgagacattccgctcaacagagcgcctctgttcgtagtgatcgatgtgtatggcaccaccaaacagattcgaattatccagctagagggcattttgtccctgcagagcgcttgtcgcaacgttatcctggagagctttgcggaggacgcgatcagcgagctgccactaccggagagcatcaagcgatttctgctgcgccgcgactag

SEQ ID NO: 7548 - protein, 322 aa, DROSOPHILA
MEAAEQLDEAAAPAALCAPSRAAYAAAEQEDPDPDQEQDRGRESPIGSLECAPTLSSRKRQLSRFHPYHGSNIQLGDDATVAYRRASFADALTFSERPLAPGDIFLVEIEKIERGWSGHMRLGLTELAPNVIRTSSEGLPHFALPDLANLGNSWIYPISKFEMNQRQDANDIIEPETDDAPHRNLLGDATHVRTPRGLLPKRLLRPAMGNGNDSDILLTDKGSRIGIIYVPTVQSDSKGELHFIINGVDRGPVSRDIPLNRAPLFVVIDVYGTTKQIRIIQLEGILSLQSACRNVILESFAEDAISELPLPESIKRFLLRRD

SEQ ID NO: 7549 - DNA, 3837 bp, DROSOPHILA
aaatgctggacgagggtgaactgctgctccagcttttccagcactactgcctggtggtcgcctggctgggcgtggcctttcaggatatagatatcacgtgcgtgccagtgtaaacattcgtgcctaaccgacagcggtctcttgcgattcccgtttaatcaacatgattttttctttcctctatttccatgcagcgtcgaagagttaatgtcctcgctgaacattgactaggagtgagtgaaggtggaagggatagagagccaacctacttggatgcactatttattgactctgctcggtttggaggaaggccatgccaaaatattttgcttctcaacgtgttaacctaaacagcaagtaattaaagagaaaccatcgaaatcaaaacatgtttagatatttatcctacacagagacccactcacaaatgatctaatttgtattaatttagttgttccttatatttttttctcttgttacatttttattatttaatcgcttaatatttactattttatcaccgagttgtggcacaaaatattgataggtgatcaatatgccattcattcattccccaatttaagtgtgcgtttaaattgtaaatgtattttgaaattattaaaaaaaaaaccaacttaaatgcaaaaagggccgttgtgtgtttaattaggtgtcaatgtatctggtgttagcacgaagcatttacatttgctgagttataatttcaaactgattttattgtgaataagcccttggaattatctacagaccaacttgtcgcaatctagtgaaccatgcgtgggagttctatgaatagcgctcatctttaaaatatgctgcaaccgctcacaggagtttcaattgagtgtttcaaagtgtacgcataatttggtgtcacaaattacaattgttatttttaaatctacattgtgagtcaaacaattattatcttttatacaatgtcattttcatgtgtgaacacatttcccaatttaagtgtgcgtttaaaaagtgaatttattttgaaacttattaaaaaccaatttaaatgcaaaaagggcagttgtgtgtttaattaagtgtaaatgtaaatgtctctgggataaaattttactgcgcactgctatttatacatttttgtcaaccaacatggtctaatcctgtttggccttggccatctcgcgagttctgcaaaccaaaaatttagtacaatagtaagctaataataataatatgcatgactatagcttacatcgctctcagttcttccaatgttggcactggaacacgtgaagattcggtttcatcctccttggacgccagttccggatgttttttccatttgtgggagcgacagttggtgttgctggcgaacgcctttccgcagtacttgcatacgtagggtctgaggccggtgtgtccaaggagatggatcttcaaggccgtggagttcttacagccgctgccacaaacctcgcacttgaagcgccgctcatccgtgtgcacatacttgtgcttgttaagaatcgcccgtgtctgcagctttttgccgcagacattgcactcaaacttgggctcaccatgtgtctgactgtgcacctggaaattgtatacaaatttcaagatttagttggtccacaagattattcgatgacttactctcagcctagctttgttcttaaaaccagcattgcagacggggcatatacagggcttctcttccgtgtgaaccagctggtgctccaccagcgatgtgaaggtcttcaaaccctttccgcagtgatcgcaaacgtatttcttcggaccgccgtgcatgtcgtgcttgtgcctgcgcagagccatgaaggacataaaggtttcgttgcagattttgcagggataatcgacgaaattcgaactctgggagccatggggtgacatgctcaattcggatgtcttgtcatcttgtttggatttagcattgtcgtctggttcgcgggaagttacgttatcgctgtcgtccacgtttttctgtttgcctgagcccttgggtctgcctctttttcgcttcaaaggcggcggggatacggcctcgtcttcgtctagaatggcctcctcatcatccgactcggttgcagtgtacactttggaatttcgcttagccgcaaactgctgtcggcgacttcgttttgtttcaacttcaggaattgatgcagtaggtgaggctagcactttgggatcggaattacactgtttgagattagctcgtgttcgcacggtctgtgcttcaaaatcgggtgacggagatgtggaatggtctgatatcgttagctcctctaccaaggaacacctatcctccgtatcgtctatgtccaggaactcgaggtcctgcttgcaggccggcggaaggccgtattccagacgcagggcgtccaagtcctggctatcctgcggctccgagtgtcgcagaagctcaaaaatggcttgtactttggaaacgctatccgagaaggtgatcagctggccaatcaccgagtagcactcctcgcacaacatgctgcccagttccggttcctcgagggtcatctgcgtgtgtggaaaactaatgtataagctatctgtaggctgggaaaacgaataacatacctccacatcaaagcatttgctgataatcctaaccagatcgtcgtcccgctcgcgcactttgtatacaacgtcgtcgcgggcgcacaggcgacaccagtatatccaatcgcttgtgggaactcccatggctaatcctcaacagaagccccacagtttggtacagtatgccctcgggttttgactaaattctattgccaaagcgctgattaaaatcagctgtatggagcggaattccgaatcgattaattggtatgcgcactccgatgatttttggaaatatcgataagtgcaaaacaacaagttgttgccgccattttcaaaaagtattcagtttaaatttggaattgaaaattgtatttattttacttttttttctcaatcataagaagtattactaacgttttccttcctgcgtgtcgatgtttattaacatagagatgtattatcatcatcatttggatgtggtttcccagggatataatgttgtttttaaaacatgcgaccgagtttttactctggtatatatatataaacaatataataatttattttcgacttacatataagaaaaactgtgtataacaaaaactaattttagcacatttgcttaatataacaaaatggaatgataaactacatctcaacgtcttccatatcgttcgccccactctccacccaattctcgatggtgtaataggcttttagagccaattcgtcgtccagcgtcggctcgccaagcaccaaagggcccaattgcttgtcgaccataacgtcttgccagaattcgctgcgattcttggccagcgcgatcttcttcagctcctcagcgaacttgtcgtattccaaaaaggtgttgaagtctatacagctctgtcggtacagggtgatgagctcgcccagttgcccgatgttctgtttcctgcgctgcagcagtgtgatgatcaccacgcgggtatcggcagccagcgcctgaaagcgggcatctcgctcagtggcattactgattgtgtgaacgctagccaggactcgcctgaaatcagagattggatcaattaagcccacaccgtctgatggcaacgggatttccttctccgctggttccgacttgactgccacaccattctctgcctgctccttggccaacagcttttcctgccaggcgcgactatagcgcaatggaaatagcttctttacgatggctgccgctctctt

SEQ ID NO: 7550 - DNA, 1653 bp, DROSOPHILA
ttttaatcagcgctttggcaatagaatttagtcaaaacccgagggcatactgtaccaaactgtggggcttctgttgaggattagccatgggagttcccacaagcgattggatatactggtgtcgcctgtgcgcccgcgacgacgttgtatacaaagtgcgcgagcgggacgacgatctggttaggattatcagcaaatgctttgatgtggagatgaccctcgaggaaccggaactgggcagcatgttgtgcgaggagtgctactcggtgattggccagctgatcaccttctcggatagcgtttccaaagtacaagccatttttgagcttctgcgacactcggagccgcaggatagccaggacttggacgccctgcgtctggaatacggccttccgccggcctgcaagcaggacctcgagttcctggacatagacgatacggaggataggtgttccttggtagaggagctaacgatatcagaccattccacatctccgtcacccgattttgaagcacagaccgtgcgaacacgagctaatctcaaacagtgtaattccgatcccaaagtgctagcctcacctactgcatcaattcctgaagttgaaacaaaacgaagtcgccgacagcagtttgcggctaagcgaaattccaaagtgtacactgcaaccgagtcggatgatgaggaggccattctagacgaagacgaggccgtatccccgccgcctttgaagcgaaaaagaggcagacccaagggctcaggcaaacagaaaaacgtggacgacagcgataacgtaacttcccgcgaaccagacgacaatgctaaatccaaacaagatgacaagacatccgaattgagcatgtcaccccatggctcccagagttcgaatttcgtcgattatccctgcaaaatctgcaacgaaacctttatgtccttcatggctctgcgcaggcacaagcacgacatgcacggcggtccgaagaaatacgtttgcgatcactgcggaaagggtttgaagaccttcacatcgctggtggagcaccagctggttcacacggaagagaagccctgtatatgccccgtctgcaatgctggttttaagaacaaagctaggctgagagtgcacagtcagacacatggtgagcccaagtttgagtgcaatgtctgcggcaaaaagctgcagacacgggcgattcttaacaagcacaagtatgtgcacacggatgagcggcgcttcaagtgcgaggtttgtggcagcggctgtaagaactccacggccttgaagatccatctccttggacacaccggcctcagaccctacgtatgcaagtactgcggaaaggcgttcgccagcaacaccaactgtcgctcccacaaatggaaaaaacatccggaactggcgtccaaggaggatgaaaccgaatcttcacgtgttccagtgccaacattggaagaactgagagcgataactcgcgagatggccaaggccaaacaggattagaccatgttggttgacaaaaatgtataaatagcagtgcgcagtaaaattttatcccagagacatttacatttacacttaattaaacacacaactgccctttttgcatttaaattggtttttaataagtttcaaaataaattcactttttaaacgc

SEQ ID NO: 7551 - protein, 470 aa, DROSOPHILA
MGVPTSDWIYWCRLCARDDVVYKVRERDDDLVRIISKCFDVEMTLEEPELGSMLCEECYSVIGQLITFSDSVSKVQAIFELLRHSEPQDSQDLDALRLEYGLPPACKQDLEFLDIDDTEDRCSLVEELTISDHSTSPSPDFEAQTVRTRANLKQCNSDPKVLASPTASIPEVETKRSRRQQFAAKRNSKVYTATESDDEEAILDEDEAVSPPPLKRKRGRPKGSGKQKNVDDSDNVTSREPDDNAKSKQDDKTSELSMSPHGSQSSNFVDYPCKICNETFMSFMALRRHKHDMHGGPKKYVCDHCGKGLKTFTSLVEHQLVHTEEKPCICPVCNAGFKNKARLRVHSQTHGEPKFECNVCGKKLQTRAILNKHKYVHTDERRFKCEVCGSGCKNSTALKIHLLGHTGLRPYVCKYCGKAFASNTNCRSHKWKKHPELASKEDETESSRVPVPTLEELRAITREMAKAKQD

SEQ ID NO: 7552 - DNA, 2599 bp, DROSOPHILA
gcttttgtttcttggacagggatttgagaaaaactagttcgggattttggtcatcggcatgagcgtccttctcgccatcgctgggcaccagttgatgttgctgttgaatggcccttatgctctgcagctcctgtgccgatcgcttcatcatgaggccatcctccttcatctgttcctccagcacgtttttggccatgatgtcgctggcctctgtttctgcgtgcagtttccgtgcctcgctcatggaaatgctgtacatggtgcactccttgtccgtgttgatgtggccccacttgtggcacttgagacaacgcacatttctcacctggatgccgaagggctggtccctgatctcggtgtcgcccttgcagtacgactctctaggagcgttgtactttcgctgccactcgaacttgtactccggctcgttgtcatctttttcgcgctcctttcgcactcctggcggtggctcgtacatgaaattgacgctcagcttatccttgctgtccttgctgagcattgccttgttctcgtgcaaattctgctccttttcatactggttgcgtagctcctcctgcttctttttgtacgcctccgcctgctgctccgccatccagacctgcagaaggtaatccctatagttttaggcgttttgctggggaagaacatatttcatcaggagcccggagccacttacccttttcaagttgtccctggaggcggggtggaagaatttcttgcacatgtagttgttgaagcccttgcccatcttgctgctgtgcaatttcgctaccaaattgcaaacaaataaccaatatacaacttttataaatactttccagctgcgatatcagggcactttgactgcgcttatcgataggctaagaaaagtatcgcatttcattatcggtatagtaacacaagtagataaagcgttgccggactgtttgtattttacgaatacattttaaaagcaactcgaaaccttaggttttgtttcatgatgaataactacgacgaatccgatatggtttattgcccgtacaacaaggagcacaaaatgctgcgcaagaagctccagcagcacatcttaaaatgccgtgtgatctacaaagacacggtggaacttatggtttgtcccttcaatagttcccatttgataccagagccccagttctttgtgagtacagaatatacgtagtagttaccttgtatgtcctattaaagcccagctttctgcatacgtagcaacacacccaatcgtgcgaggatcgaaacattatagtacactatcagaccagcgctcctgctgtcctcagcgaagacaccagacacgcgaagatcgagtccgaggagaactgggatgacgacgagagtgtgcccgattacgatcctcaggtctactgttccagggccaacatagtgagagagcccaatgggttgtttcccgcccagcgaagggctttcatcgagcaggaaaaacgtcgtcactttggcgaggattacgaggaggagaagaagccgcggaaggccaaggctcgcgcggatcttcgtcccactccctacgagcacaggaggccatactcaaggcgccagtagttcgtgttcatcaagaattactcccactgccaaagaacaaaaaccaaaacattttatcggggcttatactcgttattataaccaaaaaaaacaattccacggccaaattgttaaaattaacatgtgctgtgaaacaagtattgctcgcagttcagatgagcaaatgacaaaatcaatctcatattattctgagataatgaaaataacatacatatcccaaattcatgtacatgtgtaaactatgtgcctttttccattaacgacacagataatcgtgaaataaagcatttcactttgtttcttatcaaaaaaaatactcgtttcttactcttccttaacctatcagtttatccccaacaatacctttattcgtttatacctttaattcgttattgccaaagtgggtatataaataggggaaatccgacgtatattggtttctttagttatcctaataatattggctgtttttcaaatcggtctgttctgtttattctacctacaaaatgaaactctttgggaaagttaaatagctttgaaagtttgctgttgatgcttatcaagattgtatagtaggaatacacgatcgattatacatgtaagtagccattacgtattaaatctgctatttttggatttttggttacaagcttaacttaaatcaatcatttgactattaatttgaatggatggatgccaaatacagcattttataagtccaaattcaatgaaaactctatttcaagctaatgcaagtcaattaaaggttttaacttttagagtaacaaaaatatggagaagatggcagtataagttatatctgaaacagaatctaatcgggcagtaatcaaacatcaataatctttgcaaaacaaatagcagagcgtctctttttaaactactccaaaacttctcagctacgtcggttttccggcacatttatctaaaacttcattcagggaaataagccaacagatccatttgtgaaaatcaactttcc

SEQ ID NO: 7553 - DNA, 531 bp, DROSOPHILA
atgatgaataactacgacgaatccgatatggtttattgcccgtacaacaaggagcacaaaatgctgcgcaagaagctccagcagcacatcttaaaatgccgtgtgatctacaaagacacggtggaacttatggtttgtcccttcaatagttcccatttgataccagagccccagttctttcaacacacccaatcgtgcgaggatcgaaacattatagtacactatcagaccagcgctcctgctgtcctcagcgaagacaccagacacgcgaagatcgagtccgaggagaactgggatgacgacgagagtgtgcccgattacgatcctcaggtctactgttccagggccaacatagtgagagagcccaatgggttgtttcccgcccagcgaagggctttcatcgagcaggaaaaacgtcgtcactttggcgaggattacgaggaggagaagaagccgcggaaggccaaggctcgcgcggatcttcgtcccactccctacgagcacaggaggccatactcaaggcgccagtag

SEQ ID NO: 7554 - protein, 176 aa, DROSOPHILA
MMNNYDESDMVYCPYNKEHKMLRKKLQQHILKCRVIYKDTVELMVCPFNSSHLIPEPQFFQHTQSCEDRNIIVHYQTSAPAVLSEDTRHAKIESEENWDDDESVPDYDPQVYCSRANIVREPNGLFPAQRRAFIEQEKRRHFGEDYEEEKKPRKAKARADLRPTPYEHRRPYSRRQ

SEQ ID NO: 7555 - DNA, 12492 bp, DROSOPHILA
agttagacatttacaatgttcatcttattgaattaaaacggatcagcagcaattaagttatattaagccatccttattgtgtaaaatatttacttaattacagattttttttatgcatattgtgacatactcaatatgttttacatatttatgacagaccttctcaaacagaatattttacattaattgcacattaccgtttctacacaacacatttttatatttgacacaagtcaaataaataattttcagccttaagttatgctttaattttgtattgaaagccaatggtaacttaagtttggtaaatgagtttgttgcctaagtcttttgttttgttgtgattaaaagaattattaaaattaattttacaataacaaatggctttaaaggaacattaaaaaattctattaaattgcaaatcatgattatagtagaatttcaaaactttttcttaaattttgattagtttaaatttacataaagattaagtagtaaaacaatttcctttattgctttcctgcttatcaaagtgatttaaaacaattacaaggaactaatttatctgtttccttattgtttaggcataataattaaattaaagaaatcattactcacttaaaagcttactattgagataattaaacaattttcttccgaaatcctgcaatcaaatgaacaagttattgaccaatttcatggtctcgcagtttaaactgtatctgcaactgggctcggctaattccatgtctgccggcagttcgcatatttctttgcttatttttacttttaacttgggactttttgaatttgcaatttgcttaccacaatcgatggccccccgtctctggacacttcccttccattacttttgcggctcatgcgagtggccaaaacccaagacccaaaagcgaaaacctctgcccatatgcatgtttctcgggctgttcagttacttcatctcttatgttatttcgtttccaattcgctgattaacaagttcaacaaaacacagtggcagccagtacaatcttgcagatactttcggtgcaaattcggcggtggcaagactcacgtttcggccataaagagaaatgaaaataagaaatgacgtcagtggcaaactggttcgatgcaatacactaattgcgtggggctattagaattgcatcgataaatcgggaaaagtgtatccagtgaaagtggacatcggtggataatcggacagaactcccttgggatttacgatatacaatcccaatccacggtacactgctctaccgggtttgggtgtaaccgagaccatttgacgagttaacgatatcacacacagctgcatggcttcatgacttctcctttcactggccactgattagaggccctgaggcgcaatccaagtcgtaaaacaatagcccagatgcgagtaccataactaaaactccccgggtacacttgtccatgcttcagtgcccagatccgtccagtcaaagagattgtcgaggcatcgcttattcaacatcaaatactgctcacaatagccttatttcggacaccttttgtgaccagccccattgtggggacattttcacactccagtttcatgtgacactagactgaaggtaattattgtgcagcctacaagacctttccattctgatacaatcgcggaatcaattctcgatagaagaaacccggagaaaccttggcatgtatttatgggttaagtttctcaattaattggctccagcccacgcttttacttctggctttttgcttttggcttttcatatttcatatatttataatacctctttaaagctcattcggtatgccaggcacaggccaaccgtcaaaaggccaaaaaaaagagccattatttatgctaaaagtgtttaagttcttgatgtcatcatcgttgagaaagtcaacgcaaatcgattcgattttattagcattttaacggacttccgcttgatatggcagaactttgatgtcaaatataaattctagctagtaataatatttgtatttcccattagcgcccattcaatccacctatttcgctcggcgctacagcgataattttttctcattccctccttttttattttttgatcacacagtgagtgctgttaattacgcgaccagtgccagtttcgctcgcatgcttacataataattagaaattgccacgctcttttctcttcagcgccaaagaacgtgttaaaataaaatttaatataagtatgagaagcggctcaaagagcctagactaatagacggtttcttctctttgcggtggccatttcctgctgtgcagaagacaggttaattatgcagatggatttcgagacatgggaacgcgacctgagggcatcattaagcaatagcaatagcaatagaatttcattcagccagcatctttgtgttccctgatctttttttcaattaacccacgtgggcgagcttagaatggagaagagctttaataggcctgtgactattaggtactctgagaaaagttaggtgcacttggaaaaaatatttgcatttataaatttgaaataacgaatcgtttaaagcttggaatcggaaataaatatatcattttccttgtaaagtttaaagtgttatatatataatttcgtgtggactaaaaatctatatttggttgcaagctattttttctagtgctgaaagaagcatgcataaatttccaaagaaacccagtgagccgtgcggctggctcggcgttttcagcgttttcagcagatgcgcggaggcgtgcgctaactttgcgcagccactgtgcatagaaagccacgctttggtgccgtcgctgcttggagccgctgctgctggtggtgctgttttattttgctgccgccggcactacgtcagtcgtcagttctgcattaatgagagagcagttaggtacgctcgctcgcacgctcggtgtggtccaaaaacaacatacgagctacagagtttcatccagatgaaaacccagccggaggaaaatcgggcagagagagatcccaaataaaagtttgcctattggggggaaaacttgtttggccatctctcggtcgcctctttctcctcgggcactccaattcgatttcccccccaatcaaaatcgtcgtctgcgcagtcgcaactcgacgctgcagcggtgatgagtggtgcatacgctcagccaaaaggcttcgaaaagcgaaaaaacatatagtaaaaggaaaaataaaagcagcttagcgaattgaaaaaaggaaacgcagtgcaatcggggaaaaatgcaaaagtgtgaagtgaataatcgctaatggccaaagcgttctgtgcaatgaaatgtaactaaattccaagcaatcccgcgaccacaagccacttacatattgtttatagaaaaggagctcgcgcactgtaattccatgaaaagtgtcactgatatgcgttggcgatttgtgtaaaatgcgaaaaaaaataaagaatacaaataccttatgtgatataaaaacaaaacgcgacggcgagacattcaataagcggttcagggccaggctctgaaggtgttgccaatttattttaaaagtctgcgctttttgttggctcgctgtcgtcacgtgataacttgttccacttgcataaaaatattgttattttcttgacacaaatgccccggaccgaggctttaattagcatgatgtttaaaaaataaatacgaaatgcttaaaatacacacgagtgcccgcgctaattgtaatttatttattttcgagtgcagtgcaattaaaatttcagctcgaagggaaacacagctcacagaacctcgcaataaaatccaaagcataacaatacaaaacctgatttgtatgcacaaacaaacaaatgcaagaaaatgacaagttcttcgacacctacaagcaatacaaagtctgtcccaagatggagataccaacgacaaagtatttagccgactatctgtacgttgtgcacgaggacgtacccttccgatactatcgcaaagtgagtgctagggcgggggtttgcgggggccatcatcatgcatgatatggcatacgatatatgatatgttatgatgcgatacaatgatgatatgctatgcccatggagcgctcgtcatcggcacgatcataaactctaaacgccgcttggctggtcgattttttttttgtttacattttcaccgtgcggttttcgctttattagccgccttcacctgggcgtcacgttgttaccgctctgccccttcggatgctgagtttgccctgttggcagttcgtttgcctaactaaacgaatttcacttagatgcgctgggcatacccagtggcattaaattagggtctggaagtcggatgagccttaagaagcctttcaattttacaaaaaaaaaaaaaaatatgtttgtgagcttacttctgcgtggaacataaatttactatcttacagctttgcggttttcacaataatactcgttttaggtgcttggatctacgttaataaattgtcatttgttatcttattaattagtcattcagttatattgatttaattaaattaaaatctttttaaaaatgcgaatgcttaatatgttgtttacttatgttctattatgaattcaaatgtattatcactattttgatgatttataaaaaatatttcaatactagaaattaaaattattgccaaatccaaggtattctttggttgctacgctgtattttccgcctcttgtgcttggaaagtgagcaaagtgaggagcgttgttagttcgctgatgtttttgcacgggcacatctaatgggcttatgctgtacatttcgcagatgacttattagagccatgagcgaattttggccgaagcttaataagatcccccgtgacaccctgctgcggtgggcactttcttttgccgctcactgtgcgaacacaaagaactaagccagttacgatggctgtggatgggtggggaaaattcgaggaatatgagtcgtaagacaaataaacagaaagcaaaattgtgtaattaatggaaataaagcgaagcacggcgaaattacacaagtcgaaagcggaagtaccggaaatgacagagacgctccgtaggagtatctttttgtttttgcttgatgtcggcggatgcggcaactgtgactgtgactaccgctatttgtccgggttaccggcaaaagaaaatccaaatgggtttgcatatgacagacatttgtagatttgggctttctcatcagctgcgaaaatttttcggacatggttcattgctaacttttactttcttcgaagggagttcagggttaattgcattcacgaaaattagtggagtctttgaaccttagaaaagctttttacaataagttgtgctaactcataattcaaattttagttattacgtgttcagctgtgctcaatttcatttaaaactaaaatttagctatggtatatggtaagcatattttgtacagggaaacagagcatgtcgcaatacataacatcagatttatattcaaatataacttagtgggtgacgttccactttaggtgggtttagttaatgggtccactttaggccaggtttatgcctattccatgtcgtctaaactaatttccacactcgtcccatttcttttcattgcagacgaaatgctcggtgttccgcgggctcgtgctctgtctgtgcctgaacctgagctatgcgaacgtggtccgcttcccacgcgagttggaccgctacgggtcggcgtacctggttccgtacgtggtgttgctgtttctagtcggcctgcccatggttctgctggagatctcggtgggccagtttctgggccagggggcggcgcacacctggcgcgcctcgcccattttcaaaggtgagtttcgacggagtagcggaggtagcatacttttcggccggcaacaggtgctcagaaacggaagcatcccccattattgtgggaggtacaaaatggggccaaagccaaagctgcagctgcagcttttttgcatccccaattgcaggacgaagcttgatggggaaagctctggcgttgcactgcgtcctcgcgcttaaaattcccaagttggaattccgcaagacagagcttaaatatcctcgttgcaaggacctccagcgggcggtcgtgcattccgcagcaacgacggttgggcacatcccgtctcatccccactctctcgaattgtgtccgttggtagccgaagttacgattgcaaaactttcgtcatctctctctcactctctgaagcaaaagccaaggccggagcaggtgcatatggtgccaacccccctggcccccccaaaaggggggtggtgctggtgcaattgcaaaggcacaggagcacaggagcagctaaataaacaagaaagcaaaatcaacaaccgcaaaagtctaagacatgtatcacgaattgaaaatgataatgacaaaatgagaaaaaacaaatatcagaccaaagttatatcaatgcaaacaaaaaaatctaaaaaatacacataaaatacactaaaaaaagagaagacttacttaaatgtgacctagtagataaaatcatcatcgtgttatcaggacgaccgcaaaaaatctctgaaaatcgtacaaaaaaatattaaaacctcaaaatgcattggtgtgtgtgtcccgttcgtgtaatcgctggcgcgccacgccccccgcccctcccactgtcacgcgctcgccacgccccccagttgccgccccattagcagcgggcagatggacaacgtgtgggtggcccacaaggacatctagtaacacgacgcccaacagcagccgcaaggtctgatacgccgcccgccacgcccatcgtgtttgggcggcagaggaagcggtccggaagcggaaacggaaacggaaacgggcgagcaaaatggtggcgcggtatcgcgggcaaggcgacggcgcgtccacaaaaaataaccatagagacgtttaaggcaaattctaaatgaacaaaagtataaaccaaaaacaattgtaacgagaaaacaaacgaattcaaaaatgagcaatatgagcaacaactaataatggcaaaaagcaaaaacgacaactgcaaattacgacacaacaccttcgaaaagacctcagtaataataaaaacaacaacaaaaacacgtgaatgcttggtggctgcaaaggaatgccttcgtcgtatcgcccttttttggacttggccaagctattattgtataagtatagtttcagagaacagatgcgttgtaaaaaataaaaaagtgtatgttatattaacatgacaagcagagtaacagtgcgtatgtgcaataaactacagttttaatatttttgtagcaaatatcattatatacagcagagcaacagtgcgtatgagcaataacttgcagttttattatatatttgtattaaacatcactattaccagcatattaagatctcgataaatgactactcgttttaatatattttatgcctggcttggcatttcaatcacacaatgatttatagccaaagtaacacatcttttaaacagcagacgttttatctattattttattcattgagcgttaaaataaaaagcaaatgttaaagactcttttgaaatatagtgttggtataaagaactaatattaaagtttggtttggtgcccaactaaagagttatcattaaagactattcttgatgaacacttaagcatttatatggcttataaaactcttaaattgccgaaggcaatacttaacatttttcaagccaccgacgttggtttaaagtagccatttcattgtgaaatcagcgagctcattgagtgaatcgttttatgactgagttgttcgcaacccataattacgataaatgaggcaaaatattcatgacacgtgccgattgcgtatatgaatggacgaggaacagaattcataggtcagatgagatgcgagctcttcttgcttcaccttttgtttgatcgatagtgcaatataatcataaaaaacggtgctaacggaattggcaaacataatctaatgtggcctatttgcatagataggaagtgtataataaacaagaaaaaacagttgcggtgcgtacaacagacaatgctaattaaaatatttcattcgttttcattgggctatcgaaccaagccctaaaaacctttgaaactcaaatcatttttatatatttttcggacacttttcaatgtcggcttagggtagtccccaatcaatttacaatacgtatattaattaacagctttgggtgtgtttttaaggtcaaattgatctggtttggcgaatgggttttaatttactgcagaatacgttataaatgtaaatgtaaagatattaaaaaatctcgttctcatttataactagttttcacttgagctcttttcaaacgaacacctttgcttttatgaatttcgccttttaaatgacaaaagtaatttcattaactgggttcctcctcttccgctcatttgtaatttgtttagaaggttgttttatggggtcgtatattagacgtagtttaaatccgattctgagaaggaactttgcgctagataaattatgcgatagaatagtacatatgtaaatatatttcagatgctttccttagttattacttaaaggaaatagatgtaatcatctaaaggcgtagaaccatttctcaaaactaaatgtattttctttaaacgttttttttttatatatatccatacttatatttcaggagcctgcatgatcagtcgctttgcctcctggctttcggccatttgggtgtccttgcaggccgtgctggcactggcctacatcgggatgttcgcctccaatgacctgccattccgggagtgcgctggacccgtgaagctgcgattggtaagtaagaactaatctgtcaggggaatgtaatttaaaatgcgatattctacagagtggatacctcctgacgggaaccagtggacaagagtgtttgcagctgacctttctaactccattctggcggaatcctctgtactttggtcttctggcagcgggacttataggcctttggatagttgtaatgctgtggtaagatagaatgcctaaaagacatttatcctaacagattaataagcccttttttatccaacagcacacacaatgccaaaatcctgcgccgcagtatattcgtcttcggactagttggtctagtcctgctttgcacactcactggttgggaggtgcgaaactccttcagtcgtcactacttcccggagctgtggggattcgactctaatttgctggccgaaagcaacatctggttcaatgccctgatgcaggttctcttctcagtgaattgtggctttggagctctgcccatgatcacgggcaagttcttgtacaaaggcgatgctgtgagaacctcggtggtttatctctgcttcaacctgctcataaacgccattgccgtaaccctgttcatggtccagtttgatttgtcgtcaaatggctttcagaatatggaggaactaaagcccctaaccgccatctacgatcgggtattgaatggatcccgggagggcgacagtcacctactacaacatctggtcccatcgcttatctacgccctaataatcctctcggccatggtctccataacagtggcggtgtacacctccacacgtcttgtgccacgacgccccaactatgtgatctgcttgattggattggtggtggccgttatttcatttgcggcgcccaagtttctcatcgcccgtgtgctggactcgcgattggtgggcaccatggtggtgactgctttggtgtttgagctgattgccataacttggatctacggagccaagaacatctacaccgacctcgagttctccataggtcgtcccattttccgagtgtggatgtggctgtgggtcatttgtccggccatactaacaggtattctggtgtggtggtgtgcggacgacgatcagtacgacttgctggcggagtatctcccacgttgggcgccaattctttttgtgctggctgtcatcgtgatcatcgcctgtgtgcagatcttccggcaggtagagtacaacttctttggcatgatctgcgaggcttcaaagcctgcaaaggagtggggtccggcggatcctttggcccgacactcatggaagcagtggcgctccgtatgccaggacacaggacgcagggactttaccctgagacgaagaggtactcgggactatacgcactctatcaagaagggtcagtactcgagtgcgacgaagtatggagtacagaatggaggtcaaacccagacgcctatgcatcagcagcactggaagtcatcaacgccgggaaatagttctcccaactacagcggatccatgtttggggactcagccattgaagaggatattagtgtggataaattcccaggaatcacgcagcagcaatacgttcccttccaggctagtgatacgaagcagtcgaggtattcacaaagaatccggcaaaccgctcagccgcagacccaaacacagatgcgaccgcccagggaatccgtggagaaacatcgcgaggtggtctacattcgccgcctctccgatggtggaactggtacaggtcatgccacgcgtatagagatatcgccctcaaacgaatccattacctacggcaatggcaagagcaacaataactactcctcggccatgtcccgcaatccgctgggccgctccacgggatgtctggccgctccggcccagccgccgccgcccagcgtgcatgtcaagcggtcggccagctcggtggtcaatgttaactcacacaagctgccacctccagcgacgtccggtggagcggcggatcacatttgctggcggaagttcaacgtcaatccggaagagtattccacggagctgtgaaatcaggggaggaccaggagtaggaaacgaagcattcacattcaaaaagacttgttgcatccaaaacaaacgtatctgtatctgtaatccgtattgcatctacggcacacctaactataagctacgaataacgaaccatgttcatacggaaagtgtatcttctagttgcgagttgtaaatagaaaaagagagagagatagaaagtgtagagagcgtccctagatttagttctacgatctagtttcttagcttaagtcgagaaaattctgttgtcattgttcttcatctggaaatcaggatcagaaaaagattgagtatacatttagcctaagcacgttgaactatcaaggattcgagtgcctgaaaaaaacatgaattaactgaattaaccctaagctttttcagctcttagtaagtccgtaggcatatgaccccataacctaagtatccattgtaaagttacactaaaaacacaacgattccgaaaacgatcttatgtaataaatagaaggattagtaaattatgatcgctcgtgttttctgttcgccgcaattttatggacattaaatatcaaagttcgggcatttgtcaagttgggtgctaaatttgtttcctaatcacaaaactcttacttaaatatcttatccatggattgaagttggggaaccagaatttcaattagcatacatcttcgaacatgatcggtggatcgtgtcgattgcttctgccgccgttaactaccaatatccagcttagaatatatgttcgactattttaagctataaattttcgctacaaatttgcacaaaatggttttgcggacgacatttggacaagtgtgccaccccatccgatggcaattaaaattttttcaagaatacttttgtgtttagccgcagagcaagttatctgaccgcaagcgccaaacgaaatcgaaatcgaaattgaaagcttataatgccactaagttaacaatcgtttttgtaccgttattctaaacgaaaccgtgtatgattcttctagtttataaaatggatttagtctgcagcatcgggcttattatcatatgatttgtatgtttatacgattcaacagtagatattaatacgtttaaaaaacaatattcagaacattcagttgatgaggacaagaattattgtaatttagttgagaagccatttcaatacgtgtttgcttagataattatcaaactataagcaattgctaagtaaaatttcagatgttctttgtttaggagtcaaaacatttattattatttattattaatatggaaaggtcaaacaaactcataactgaacttctatttctggctgtaatgtctgttatattttcaatgccaacccaacacattggagtaataagaagtaatgagagttggatatttatggagctatgaaaaaggaaactaagcaattactgtcgaattttcgtaaaatgtgatacattcttggcgcgcagtgcaattaatagcgctaaagaagtgcgaagttggcccattaagt

SEQ ID NO: 7556 - DNA, 2928 bp, DROSOPHILA
ttcaacaaaacacagtggcagccagtacaatcttgcagatactttcggtgcaaattcggcggtggcaagactcacgtttcggccataaagagaaatgaaaataagaaatgacacgaaatgctcggtgttccgcgggctcgtgctctgtctgtgcctgaacctgagctatgcgaacgtggtccgcttcccacgcgagttggaccgctacgggtcggcgtacctggttccgtacgtggtgttgctgtttctagtcggcctgcccatggttctgctggagatctcggtgggccagtttctgggccagggggcggcgcacacctggcgcgcctcgcccattttcaaaggagcctgcatgatcagtcgctttgcctcctggctttcggccatttgggtgtccttgcaggccgtgctggcactggcctacatcgggatgttcgcctccaatgacctgccattccgggagtgcgctggacccgtgaagctgcgattgagtggatacctcctgacgggaaccagtggacaagagtgtttgcagctgacctttctaactccattctggcggaatcctctgtactttggtcttctggcagcgggacttataggcctttggatagttgtaatgctgtgcacacacaatgccaaaatcctgcgccgcagtatattcgtcttcggactagttggtctagtcctgctttgcacactcactggttgggaggtgcgaaactccttcagtcgtcactacttcccggagctgtggggattcgactctaatttgctggccgaaagcaacatctggttcaatgccctgatgcaggttctcttctcagtgaattgtggctttggagctctgcccatgatcacgggcaagttcttgtacaaaggcgatgctgtgagaacctcggtggtttatctctgcttcaacctgctcataaacgccattgccgtaaccctgttcatggtccagtttgatttgtcgtcaaatggctttcagaatatggaggaactaaagcccctaaccgccatctacgatcgggtattgaatggatcccgggagggcgacagtcacctactacaacatctggtcccatcgcttatctacgccctaataatcctctcggccatggtctccataacagtggcggtgtacacctccacacgtcttgtgccacgacgccccaactatgtgatctgcttgattggattggtggtggccgttatttcatttgcggcgcccaagtttctcatcgcccgtgtgctggactcgcgattggtgggcaccatggtggtgactgctttggtgtttgagctgattgccataacttggatctacggagccaagaacatctacaccgacctcgagttctccataggtcgtcccattttccgagtgtggatgtggctgtgggtcatttgtccggccatactaacaggtattctggtgtggtggtgtgcggacgacgatcagtacgacttgctggcggagtatctcccacgttgggcgccaattctttttgtgctggctgtcatcgtgatcatcgcctgtgtgcagatcttccggcaggtagagtacaacttctttggcatgatctgcgaggcttcaaagcctgcaaaggagtggggtccggcggatcctttggcccgacactcatggaagcagtggcgctccgtatgccaggacacaggacgcagggactttaccctgagacgaagaggtactcgggactatacgcactctatcaagaagggtcagtactcgagtgcgacgaagtatggagtacagaatggaggtcaaacccagacgcctatgcatcagcagcactggaagtcatcaacgccgggaaatagttctcccaactacagcggatccatgtttggggactcagccattgaagaggatattagtgtggataaattcccaggaatcacgcagcagcaatacgttcccttccaggctagtgatacgaagcagtcgaggtattcacaaagaatccggcaaaccgctcagccgcagacccaaacacagatgcgaccgcccagggaatccgtggagaaacatcgcgaggtggtctacattcgccgcctctccgatggtggaactggtacaggtcatgccacgcgtatagagatatcgccctcaaacgaatccattacctacggcaatggcaagagcaacaataactactcctcggccatgtcccgcaatccgctgggccgctccacgggatgtctggccgctccggcccagccgccgccgcccagcgtgcatgtcaagcggtcggccagctcggtggtcaatgttaactcacacaagctgccacctccagcgacgtccggtggagcggcggatcacatttgctggcggaagttcaacgtcaatccggaagagtattccacggagctgtgaaatcaggggaggaccaggagtaggaaacgaagcattcacattcaaaaagacttgttgcatccaaaacaaacgtatctgtatctgtaatccgtattgcatctacggcacacctaactataagctacgaataacgaaccatgttcatacggaaagtgtatcttctagttgcgagttgtaaatagaaaaagagagagagatagaaagtgtagagagcgtccctagatttagttctacgatctagtttcttagcttaagtcgagaaaattctgttgtcattgttcttcatctggaaatcaggatcagaaaaagattgagtatacatttagcctaagcacgttgaactatcaaggattcgagtgcctgaaaaaaacatgaattaactgaattaaccctaagctttttcagctcttagtaagtccgtaggcatatgaccccataacctaagtatccattgtaaagttacactaaaaacacaacgattccgaaaacgatcttatgtaataaatagaaggattagtaaatta

SEQ ID NO: 7557 - protein, 769 aa, DROSOPHILA
MKIRNDTKCSVFRGLVLCLCLNLSYANVVRFPRELDRYGSAYLVPYVVLLFLVGLPMVLLEISVGQFLGQGAAHTWRASPIFKGACMISRFASWLSAIWVSLQAVLALAYIGMFASNDLPFRECAGPVKLRLSGYLLTGTSGQECLQLTFLTPFWRNPLYFGLLAAGLIGLWIVVMLCTHNAKILRRSIFVFGLVGLVLLCTLTGWEVRNSFSRHYFPELWGFDSNLLAESNIWFNALMQVLFSVNCGFGALPMITGKFLYKGDAVRTSVVYLCFNLLINAIAVTLFMVQFDLSSNGFQNMEELKPLTAIYDRVLNGSREGDSHLLQHLVPSLIYALIILSAMVSITVAVYTSTRLVPRRPNYVICLIGLVVAVISFAAPKFLIARVLDSRLVGTMVVTALVFELIAITWIYGAKNIYTDLEFSIGRPIFRVWMWLWVICPAILTGILVWWCADDDQYDLLAEYLPRWAPILFVLAVIVIIACVQIFRQVEYNFFGMICEASKPAKEWGPADPLARHSWKQWRSVCQDTGRRDFTLRRRGTRDYTHSIKKGQYSSATKYGVQNGGQTQTPMHQQHWKSSTPGNSSPNYSGSMFGDSAIEEDISVDKFPGITQQQYVPFQASDTKQSRYSQRIRQTAQPQTQTQMRPPRESVEKHREVVYIRRLSDGGTGTGHATRIEISPSNESITYGNGKSNNNYSSAMSRNPLGRSTGCLAAPAQPPPPSVHVKRSASSVVNVNSHKLPPPATSGGAADHICWRKFNVNPEEYSTEL

SEQ ID NO: 7558 - DNA, 2551 bp, DROSOPHILA
tgggtttttctatttattttcattcacttagattggaaaagtgataagttcaagaaagagataattgttttacttattatattcattttctaaatcgtttctaatttctaatatttattttctgttagccagctgttaaaaattgtttgtaattattaaatagagaatttatttcatttactagacattttcaaaatttacacaagtaatgcaattattaatttagggtttatagttcatttcaaaatggaatggggaaagggctgccaatagtcaccgcaaaacaacagagctcaacaatataagattcaacaagggtgaatgatatagtcgccttccccgactatcagatacccgttactcagcttttggaaatgcgaactcgaaatttcaaaagttcataaatttcaaacaaattttttggcaaatcgatagaagactaataaaattatgaaaaaatatccaaaaaattttcaaaagtgtgggagtggcaattttgtgcggcttgtgggcgctgcgtcgtggtctctatcattaacctcaatatcaaccctttagcgtttatatttcctgagatctcttttaaacggacagacggacatggttacatcgactcggctactgattccgatcaaaaatatatatactttatatggtcggaaacgcttccttctgcctgttacatacttttcaacgaatctagtatactctttgaatctacgagtaacgggtaaagcaccattgaggaccatttgccgcataataaatgcaacacagtttataaaattaaaaaaaaaaagcatatacatttactgcggaactcgtgaatggctacagttttgtatatggtacaggcctataaaacgctttattctggctctggattgatttttattcgctatctgctctctcctctcttcctcctttgtacaacaaacgaaaaatcaaaacacagaactcggagttcctgacactcacctacggagcactcgtcacccagatgctgcgcgacttcgagaacgccgaggacgtgaacaagcagctggagcgaatcggctacaacatgggcatgcgactgatcgaggactttctggccaggacatcggcgccacgctgcctcgagatgcgcgagacggccgatcgcatccagcaggcgttccgcatctacctgaatatccagcccaccatctcgaactggtcgccggcctccgatgagttctccctggtattcgatagcaatccgctgacggagttcgtcgagctgccgcctgacctgaccaatctgcgctacagtgccatactcagcggctgcatccgcggcgccctggagatggtgcagctggaggtgcagtgctggttcgtgcaggcaagtcttcaatagttaactctttggcgcatttcattgttggctaatggtctagtgtgtgtgtgtgtgcgcgtgtgtggctgggtatccttttgcaggatcaactgaagggcgacaatgtgacggaactgcgcgttaagttcgtgcggcgtctagaggaggtcataccagctggcgaggattagaaaacattggtggatcagtgcatcggagcgcaaataatgagctcttcattaaatgggggtcaataaaagcacattctgtatagaagttagcatcgagtaatctgcgtttgtcgtcgttttctacacgccagtccacattccggagcaaaagcagcaggagcagcaagcagcgtccacaggagcaacaagcagcatcaggacaacaggagcgcaacagcggcaaaatagcaatattggagcaataagaatcgttacaacaagtttagttttatgttttattcgactttatacaaatgatttaacttgggtatataagaaaacagtagaaaatatgtttctgttcatatttggcatgatataaagcgtcataaactccatacaaaaaaacataatatagtataatagtattctattatttttgattaatacagtttaacaaatgaaagtcccccacatataaatatattattacgtccctaaggcatggatcgcttttgatctggggtggtaataaattacatttgttagttgtagataaactcaaagatattcaacgtgttaaatattaaaaatgattcaaaaaacaagtaagagctttagattaaagggaacagacggtcatttatcaactgtccagttgtgcatgtgtatcaattgggcgtatacttcgtagtctgacatgttttattttccgataaggcgacacatatcctcacaaactttatttatggcaatgtttgatttatctctctgtctgctccactagaagctactttgggattctagataatgttgggtttacaatgattatagtaggttttgggatagcgcggccagcctccgctgggatcacatatgattgaatcgtttcacttaaatgcactttgatattttttgtaaaaattttttttggtttcttaatgggaaaaatactttttacaggcccaataccagtttcaaatttctgatgatcggattctctgggctcgtggatttggtt

SEQ ID NO: 7559 - DNA, 432 bp, DROSOPHILA
atgctgcgcgacttcgagaacgccgaggacgtgaacaagcagctggagcgaatcggctacaacatgggcatgcgactgatcgaggactttctggccaggacatcggcgccacgctgcctcgagatgcgcgagacggccgatcgcatccagcaggcgttccgcatctacctgaatatccagcccaccatctcgaactggtcgccggcctccgatgagttctccctggtattcgatagcaatccgctgacggagttcgtcgagctgccgcctgacctgaccaatctgcgctacagtgccatactcagcggctgcatccgcggcgccctggagatggtgcagctggaggatcaactgaagggcgacaatgtgacggaactgcgcgttaagttcgtgcggcgtctagaggaggtcataccagctggcgaggattag

SEQ ID NO: 7560 - protein, 143 aa, DROSOPHILA
MLRDFENAEDVNKQLERIGYNMGMRLIEDFLARTSAPRCLEMRETADRIQQAFRIYLNIQPTISNWSPASDEFSLVFDSNPLTEFVELPPDLTNLRYSAILSGCIRGALEMVQLEDQLKGDNVTELRVKFVRRLEEVIPAGED

SEQ ID NO: 7561 - DNA, 8578 bp, DROSOPHILA
gtggctctactctcctgctttgtttgcgacgagaagtccagcgagtcggtgaaaagcgccacggagctatcgggcccactacgttcgatgcaggatctggcgcggcgcattgccaaggtgtccacggaatgcaaactcgatctggacgccgatacgtatgtggacaagtttaagcccttcctaatggacgtggtgctggcgtggtgcaagggctccagtttccttgccgtctgcaagatgaccgacatcttcgaaggctccatcatccgctgcatgaggcgactggaggagcttctgcgccagatgtgccaggcctcgaagaccattggcaacacggacctggagaacaagttctccgaaggaataaggctgctcaagcgtgacattgtctttgccgcgtcgttgtatctgtaagattctaggaaaatctattttaaggcctaacttccacttccgttccaatcgtattttattgaaatcggatttgttctttagatccattaagctattttctagcttgatgtttggttatagatttagttttgaaacacaaacacgaataactctgctataagatttccgaaccttgcaattattccttgatttaacatatcgactcaaaaggtcgaaatatttgaaccctaacaacctttgtaaatttatttaatgataaaatgttaattttatccacggttaataaaataaatatgaccatgagatctaacatctatttacttagaaatcacgtttgttttatttcaaagccacaacagtgaattcaaatttgtcataattgataatgtggatattcaaagcatttgcgaaaacaacattgagtaatgtaaaaatatttatttatggacaaatacataaaacttatctaaagtacatataaacatataatgtggtaaaaacaatatgctttcaatcgtgtaacaaatgatgatatatacaggaaaaacaatgtacacttttgaaaacataagttattggacggttcacactgattttgtatggtcattttgcttatatgcgacacacagaacatatagaacatatatagtatataactaggagtacatttatgtatgtatgaaaggcacacttagttggtacatcatggatggggtgggtgggtccatcgaggacaattaccaaatattattaaggcactgtaggtgtattgctcttgatgatgtgtgggagtggctacgatctaatggtattctaatgatattcttataatacgggacgtgacaatgttatgagtttgttatcaaataatagcaggtcttaaataatgtaatgcattattttttataaggttaatttatttttgtattttaatatttgatttaaaagatatactctctttacaatttcattcgatattactgccactaaaagtgagttttaaaaatttaagctcagcatttgttataaaaatacttgtattatatagctaatttccttcagttaaggcaggcaatttcctagatttaaataattcttattatacatttaaattctatatatacacgtaaaggccgatgataaggctatggaatgtcattgatatggatttgtattcgttgggttatcaaacttacgaacaatttaacttaaagtaaggcattagaaatacaggtttgcctaaactacaactcaaaactgagatctcaaagatctgtttacaaacctatcataaatacaaaacataaactacttttttcgaaaataactaacttactttaaagaaaaattccaggagaaactgtaagaatatagatttttggtcagtaatctgattgtctatacaaagatcaatgaatggacctacctggcatacttcctcctggattgttgattggctctgtaattggacgattcggctgactccctaagcgcatcctgcgcttagagagctgttacttatacggatgtctgaggcactccctccaccaggtgggttctcctcggctgagccgctggctgggaactcagggtggctgttgtggtgtgcgtggtggtgctgcgggcagagggcaccggagtggtgctccgactgctgcccgagacactggcagcggtgggaactcttttggccggctccgcctgcaactgcgtcacgggcgtgctggaaagtggctgcagtagacgcttctcctccacaggaggagacgccacctttgcggtggacccattttgttgggatcgtggcgtggctgccctttcagattgcttcaccaaatggccattggtttccttgagcgagatccctgacttgagggacgcctggctgctggacttttgggtcatggccagcgaactgggtgagcgcaacgaggtggtgtccgtgtgcgctttgctggccaaggttttggtggatggagagtcgcggtactcgtagatattatccctggagcgcagggcatgatggttggtcaccatgtgggcattgtccactccacgcgtatcctgttccggttccaagccctcaccattaatgaagacatcttcgtcatagaagcgatccgattggctgtgaatcagttattgttagattatattatggtataatagtatattcatccaaaacttaccgcttggcattgcgccacatgatgcagcagatgaccaccaggactatgaggaagaaacaggccaccgacatgctccaaaaggcgatctgtagtggctccttgggctcccaccaatactccgtggtgggtggataagtgggcaccagcactccaataactgtgggcaagtattgcgtccagaaggcgcactccgtctgccgatagttgagtagaatggaggagttgtacgtggtattgatgttcaagtaccgaatctcgccctggtatgcgcgctggaaatgcatgcctagcacctgttgcggcgtcggattgctggaatttaagtaaagtttcagtatatataggtctattgtattgtatgcaaagttaattacccatatctagcaaaattcgtgtaggtctgcatgaaaaagtgactcatattgcgatcgttatccgtccacatattgcgctgcagatgctcctttttgggaaagaactcggtgtccatgaagggagctccggtgaggaaataacgttcgatgtcgtgtggatactttcgccactgtggcagattcagtgcctccacagtggtgttcagtacgtacatataaacgggtaccttctgctccagcattagcttgaccatttgatccaccggtgctcggtagtagagatcactcagcatgtttatgtactggtcccggattatggtgttattattgggatccggccagaaggtgtatatgtacttgatggcctcgtaaactccgttcggattaagtgtatagttgtagcggaaaacgtgttcccttattttctgatcgaagaaacgtccatctagttcatagtacggacttagggattcgttttgggccacaaaaaaggccgcttcctgtgtggtcacgcccgtcatgtactgaatattccggttgaatttaccggcacggatgagggtttccggcgtttgggtgaggaaacgccaatccttttcgcgccatccctcgtaccaatcgtcgccgggcaacgtaaagttgtggtccagaactggaccccatggaaagctgcccacctggggagagaactcagcgtttcccagctcatagaagctgcgtccggtgcgcaggcagttgaccaacttccacgacgattcaatggagcagcccagcagctgtcccagcacgcgactcgtgttctgggcgcgatacttgtcctggatgagcgcccaatccgctagagccgatccggactgtgcgatcacacgacgcacaatgttccgcgtctgtggtgccaccatcaggagtccagcggaggcgcctcctgctcccggaccaaatagagtgatggaattccgatcgccgttgaagaactcaatattgtcatagacccaacgtagcgccatcgcttgatcgaggattccgtagtttccgggcgagttctcatcacccgtcgataggaatcccagggcaccaaggcggtaattcagggtcaccacgaccacgtcgtagaacgaggccagaatatgaccctggaataggttggaggctccacgaatgaactcgccgccatggatgtacaccataaccgggtatttttgagccacaccagcaccagtctgagtaagaaacaaatatagtattcagaagttaaaagaaatgatgaaatggctaccttcggcgaatacacgttcaagtagaggcaatcctcgtccatgtccatgattcctttcgtggcacccgtatatcgcacaggctgtggacaggcgggtccaaagtcgacggcctgcagcagctgccagcctcgatggacgcgtggtggcttgaacctgccctcgaaggtgggcggcagggcgtagggaatgcccaggaagaccgagcactcgcccatcacacgatccacggtcgagtggtagggacgatagaaggacttcggatctggattatcgtacatgtacaccttaaagccctgcacctggccatagttggtggtcacgaaaacatcccgctccagggtcaacgaatcccgccgctgcttgccctgcaaatcctctcgccatccggccagcactcccggaaactgggttctcgcattcggatcgttctgtgatgggaaatggtaacatcattagaccatttgacatggaacatggaacaaatagagactctgagccgatcagtgaatgggcgacatgtgtaattgattaagtcgcgatggcatgaaaacttaattaagattattgctttgatattggaacgaactctatctctctcaatgactgggcattgttcgcttatggatgatctttcggtacgcttctttggtatgggggtcagttttttgtgtcacgaaagttaattgataaagcgcgagttgggaacccacaataaatgttccgatcacttaacgatgtatttaatatcgaattatatcttactcaagtttgtcaagttataagtttgcttaccgggtcaaatcgaaagcgatcttcattcggcattccctgtggatattgtcccggtggatttctgcctggatagttggctccatagccatttggctgataatgaccatatcggcgatcgttgaacgtgtaggttctgtaagcattgaacgtaagtacaaaagctgataagaacgaacggaagccatgagtcacctgtaatccggatcgcctggatttggccaatggtagtcaacgcctggccgagaataaaatctgggatctcttgtttgtccccttgtctgaataaaacaagtgccgatcagcacaagaagggctaaaagccattttaatttatcgcgatatttcaatttgtgcatcatgatgatctagaaaaatattcaaaagtaggaaatggtatttaaaagaattagtttgttgagcacatttatgtttttcgtcaatacatcaacaatggtttcagatcacattgaagtataaacaaacagaatgaaaacaaatctcggctctgagtttcagtaagagtgaccaaactggttttccattacgttgttggctcaattttcttggcacttcaatccaaaccaatacggcattagaaaaagccgagagaccgacaaacccgttttaatgctgactcgaaaaagcgctaaaaataagttacagcataaaatgcgacttcagtgcggagtggaatgaacaaatgccacttcactacactgaatgttacgtgccgtgtgtctggattttttggaacggcgtcaatgggttaattgcagcgataatagagaaaggtcatcggtgtaaaatggtgtgagccagttgggtggcaagtaaattgtttaggaaaatgttggtcaattgattttctcgatgagtgagaaatcttgaaaaaaagctaatgaaatactatcgctcattcatataaaagctagaagtgaagctatgtatttatcagttgataaatagtataaaatccatgattaatatatttttgagtcaggtgtttccggccaatgcaacccctactgttacgtgcgaaaatgccgcaaaagaaaaaaaggtgaaaatgtaaacacctggctattccaaaattggctgtgtttgaattttgctcttggcatttgattggcaatgcatgcggtctgtatcgatgcaacatagccatcgttaccttggttgcattatgtatgtaaatacaggtgggtcaaatatatatatcatatcatcatattcgtatatatgatatgataaatcgaattcccagagaacagaagatgttcatagttgttactggtgctattgttctgactgcgagtgtgttgaaagtggcacaaggactcgtacatgtacgggtgcattaacctgcctgtggacgcctcaagttacccggttattcgatgatacgacggctcaaccctcggaagggttcctaaaaaacatacggaagtgcaaacgcctgcacaaaaattacatatgtacataaatacatatatacatacatatggtcgagcttggtttatagcgaaactggatgggaactttcagatcgaatttcgtgacgaaatttcgttggcatttgttgctgttgcgcgtggatgaatcatttgtagaagttttgccttttcgcaatcaccaaagcaaacaataaacgcaacgataacgctgaaagtgaagcgcaggtgcgcctgtgtgcgtgcccatcatgtgtgtgtgtgtgtatctgtgtgttggcccaccacacaggtgttgttgttaccaatgcacggaaaagaatcggatgcatttttgatacagatatttttgtagatacatagcgtcaagagcataaactcttctgtctaaattaataaattatttttaaagtgaatcttattattggaagctcttctttatcttttaagttttatttatataagcagtttttttttaatattgttgttgtttcttatttcaaatgtattctttctctgtgtggcttaatcttactgtttttacagttatgctccaattgatgacgttgccgtggcaacttgttgcggcttctatccgtcatttcactatctatctaatcgcgattttccaaccattaccactcacattttagtttcaacttttacgcgtttctacactcacaataactttcttggccaacgccccgaaaaggtaacaaacaaaaaatcactaaccaaaaacaagactgaatacaaacgagaaaaaaacgtaacgcagctgaaatgaccgtttttgagtcggcggcggagactgagactcaggtaagccaggtaagcgcaatgtgccgtccaaaaaccacttctcagttctcacgcacaccaacgaacgaaactcagttaacactcacactcagttgccggctgttaccaacgattcgtacacagatacacctggccaaccgattctttcgttgtattgagcgcgcgcagctttaactttaaccgcctcttgcgcaccgaactctcacctgtgcgcacaaccactaccgccaaaacacagaggcaaccgactctttcgaacgctgccgacgaactgacgcgccaaccaaaagcaaacccaaacgcaactcgaatcgaatatcgaatcgcggaagagagccgctctgtcagctgggcgctcgctcccgattaaaattaaaaaagttctagtgttaagatagaaattcctttgagtataacaataatgaataataataatacaataataagaagaagaataataaaaacaatgtgataagaataataataaaaataagaataagaataataatctaaaaataataataataattctaataataataaaaaaaaaaataataataataataatatatttataaaaattgataaaaggatttatggctctaccggaagtgggtggcacgttggattgacttaactgacctgctgctgtagtagttacttttgcatctgcagacccgccgacctgccaagctacgagtcccgcctactatttatactacttcttatttcttttaaataacatcccagttaaattgaacaaaatattatgacaaaagtctgaattaatgccaactatgttaaatcattccttaaactgaatcaatcttaaaagagtccggtgcaattaaaacataacttcaagtataaagtttgcaacaagagataagttttcgtaataagatgttaccatctcacgtatattaaagtttatattttagttaaataaagtcagtaattataaggaaatagaagtcttgtcatccaaaacaagacgttctgaataaagcagtaatgagttatctttgcatgacaaaacggaatacaattttgcataatttctaattgaattctattatataggacgcagcccagacgatggatggatggatggatggatggatggatggattgatggatggatgggtcgtgattcacgcttagagctccgcacggcgaagccaattggcgatcggatcacattttgaccccgacttattgagcgggttgctgggcgtagctgctaattttaattataa

SEQ ID NO: 7562 - DNA, 3820 bp, DROSOPHILA
gttcgaaagagtcggttgcctctgtgttttggcggtagtggttgtgcgcacaggtgagagttcggtgcgcaagaggcggttaaagttaaagctgcgcgcgctcaatacaacgaaagaatcggttggccaggtgtatctgtgtacgaatcgttggtaacagccggcaactgagtatcatcatgatgcacaaattgaaatatcgcgataaattaaaatggcttttagcccttcttgtgctgatcggcacttgttttattcagacaaggggacaaacaagagatcccagattttattctcggccaggcgttgactaccattggccaaatccaggcgatccggattacagaacctacacgttcaacgatcgccgatatggtcattatcagccaaatggctatggagccaactatccaggcagaaatccaccgggacaatatccacagggaatgccgaatgaagatcgctttcgatttgacccgaacgatccgaatgcgagaacccagtttccgggagtgctggccggatggcgagaggatttgcagggcaagcagcggcgggattcgttgaccctggagcgggatgttttcgtgaccaccaactatggccaggtgcagggctttaaggtgtacatgtacgataatccagatccgaagtccttctatcgtccctaccactcgaccgtggatcgtgtgatgggcgagtgctcggtcttcctgggcattccctacgccctgccgcccaccttcgagggcaggttcaagccaccacgcgtccatcgaggctggcagctgctgcaggccgtcgactttggacccgcctgtccacagcctgtgcgatatacgggtgccacgaaaggaatcatggacatggacgaggattgcctctacttgaacgtgtattcgccgaagactggtgctggtgtggctcaaaaatacccggttatggtgtacatccatggcggcgagttcattcgtggagcctccaacctattccagggtcatattctggcctcgttctacgacgtggtcgtggtgaccctgaattaccgccttggtgccctgggattcctatcgacgggtgatgagaactcgcccggaaactacggaatcctcgatcaagcgatggcgctacgttgggtctatgacaatattgagttcttcaacggcgatcggaattccatcactctatttggtccgggagcaggaggcgcctccgctggactcctgatggtggcaccacagacgcggaacattgtgcgtcgtgtgatcgcacagtccggatcggctctagcggattgggcgctcatccaggacaagtatcgcgcccagaacacgagtcgcgtgctgggacagctgctgggctgctccattgaatcgtcgtggaagttggtcaactgcctgcgcaccggacgcagcttctatgagctgggaaacgctgagttctctccccaggtgggcagctttccatggggtccagttctggaccacaactttacgttgcccggcgacgattggtacgagggatggcgcgaaaaggattggcgtttcctcacccaaacgccggaaaccctcatccgtgccggtaaattcaaccggaatattcagtacatgacgggcgtgaccacacaggaagcggccttttttgtggcccaaaacgaatccctaagtccgtactatgaactagatggacgtttcttcgatcagaaaataagggaacacgttttccgctacaactatacacttaatccgaacggagtttacgaggccatcaagtacatatacaccttctggccggatcccaataataacaccataatccgggaccagtacataaacatgctgagtgatctctactaccgagcaccggtggatcaaatggtcaagctaatgctggagcagaaggtacccgtttatatgtacgtactgaacaccactgtggaggcactgaatctgccacagtggcgaaagtatccacacgacatcgaacgttatttcctcaccggagctcccttcatggacaccgagttctttcccaaaaaggagcatctgcagcgcaatatgtggacggataacgatcgcaatatgagtcactttttcatgcagacctacacgaattttgctagatatggcaatccgacgccgcaacaggtgctaggcatgcatttccagcgcgcataccagggcgagattcggtacttgaacatcaataccacgtacaactcctccattctactcaactatcggcagacggagtgcgccttctggacgcaatacttgcccacagttattggagtgctggtgcccacttatccacccaccacggagtattggtgggagcccaaggagccactacagatcgccttttggagcatgtcggtggcctgtttcttcctcatagtcctggtggtcatctgctgcatcatgtggcgcaatgccaagcgccaatcggatcgcttctatgacgaagatgtcttcattaatggtgagggcttggaaccggaacaggatacgcgtggagtggacaatgcccacatggtgaccaaccatcatgccctgcgctccagggataatatctacgagtaccgcgactctccatccaccaaaaccttggccagcaaagcgcacacggacaccacctcgttgcgctcacccagttcgctggccatgacccaaaagtccagcagccaggcgtccctcaagtcagggatctcgctcaaggaaaccaatggccatttggtgaagcaatctgaaagggcagccacgccacgatcccaacaaaatgggtccaccgcaaaggtggcgtctcctcctgtggaggagaagcgtctactgcagccactttccagcacgcccgtgacgcagttgcaggcggagccggccaaaagagttcccaccgctgccagtgtctcgggcagcagtcggagcaccactccggtgccctctgcccgcagcaccaccacgcacaccacaacagccaccctgagttcccagccagcggctcagccgaggagaacccacctggtggagggagtgcctcagacatccgttttctcctggaatttttctttaaagtaagttagttattttcgaaaaaagtagtttatgttttgtatttatgataggtttgtaaacagatctttgagatctcagttttgagttgtagtttaggcaaacctgtatttctaatgccttactttaagttaaattgttcgtaagtttgataacccaacgaatacaaatccatatcaatgacattccatagccttatcatcggcctttacgtgtatatatagaatttaaatgtataataagaattatttaaatctaggaaattgcctgccttaactgaaggaaattagctatataatacaagtatttttataacaaatgctgagcttaaatttttaaaactcacttttagtggcagtaatatcgaatgaaattgtaaagagagtatatcttttaaatcaaatattaaaatacaaaaataaattaaccttataaaaaataatgcattacattatttaagacctgctattatttgataacaaactcataacattgtcacgtcccgtattataagaatatcattagaataccattagatcgtagccactcccacacatcatcaagagcaatacacctacagtgccttaataatatttggtaattgtcctcgatggacccacccaccccatccatgatgtaccaactaagtgtgcctttcatacatacataaatgtactcctagttatatactatatatgttctatatgttctgtgtgtcgcatataagcaaaatgaccatacaaaatcagtgt

SEQ ID NO: 7563 - protein, 875 aa, DROSOPHILA
MPNEDRFRFDPNDPNARTQFPGVLAGWREDLQGKQRRDSLTLERDVFVTTNYGQVQGFKVYMYDNPDPKSFYRPYHSTVDRVMGECSVFLGIPYALPPTFEGRFKPPRVHRGWQLLQAVDFGPACPQPVRYTGATKGIMDMDEDCLYLNVYSPKTGAGVAQKYPVMVYIHGGEFIRGASNLFQGHILASFYDVVVVTLNYRLGALGFLSTGDENSPGNYGILDQAMALRWVYDNIEFFNGDRNSITLFGPGAGGASAGLLMVAPQTRNIVRRVIAQSGSALADWALIQDKYRAQNTSRVLGQLLGCSIESSWKLVNCLRTGRSFYELGNAEFSPQVGSFPWGPVLDHNFTLPGDDWYEGWREKDWRFLTQTPETLIRAGKFNRNIQYMTGVTTQEAAFFVAQNESLSPYYELDGRFFDQKIREHVFRYNYTLNPNGVYEAIKYIYTFWPDPNNNTIIRDQYINMLSDLYYRAPVDQMVKLMLEQKVPVYMYVLNTTVEALNLPQWRKYPHDIERYFLTGAPFMDTEFFPKKEHLQRNMWTDNDRNMSHFFMQTYTNFARYGNPTPQQVLGMHFQRAYQGEIRYLNINTTYNSSILLNYRQTECAFWTQYLPTVIGVLVPTYPPTTEYWWEPKEPLQIAFWSMSVACFFLIVLVVICCIMWRNAKRQSDRFYDEDVFINGEGLEPEQDTRGVDNAHMVTNHHALRSRDNIYEYRDSPSTKTLASKAHTDTTSLRSPSSLAMTQKSSSQASLKSGISLKETNGHLVKQSERAATPRSQQNGSTAKVASPPVEEKRLLQPLSSTPVTQLQAEPAKRVPTAASVSGSSRSTTPVPSARSTTTHTTTATLSSQPAAQPRRTHLVEGVPQTSVFSWNFSLK

SEQ ID NO: 7564 - DNA, 3743 bp, DROSOPHILA
ttgttgtggtagtgggctctgttgttgttgttgtggtagtgggctctgttgttgttgttgtggtagtgggctctgttgttgttgttgtggtagtgggctctgccgttgttgttgtggtagtgggctctgttgttgttgttgttgttgtcgtagtagtagtggtcgtcgattcaagcgggcaaggctcaggattcgtacgatagcatagttcatcaatgctaagaaagtatcctaaacaaaatgacaacgaaaaaaaaaaacaacaaaaaatctcacgaattaaagatttataagttttttactaagttaccaggcccgcacgttttgttagtctgtggataacattttccatccgctttcaattgatatcctaatgaacgataaaaccaaaaataatataataataatacattggtttttcatatacttttttaaaattatcagttaaagcattgagtagttctataaatagtcatacacagctgctgattaaattgggcaccatttttggtacagcgagattaaccattttttcagagatttcttacctgtttgacaaacgaaagagctttgccacacgccgttgacatcctgatatccctgcggagatgtcggcttctaggggaatatatttgtataagaatagacaccaatcctcagagtaaaccacattcggttaccgcgatgtatgcttgagcacttccgcaaggcacaagggtgatcaggcaggcaaccagggccgatctgaatgacttcacaagcatactgtttaacttgcttgctgatccgggagctgagacacagattcgcgatgtacggcggtccgcactaggcgagagactaatcgaagcgacgctgagctcgctgggatgcctttggaaagcataattgctggcgctgcgataaccttcgtgttccagataacggtgaaggtcgcttgggctgcagcttcagccgttcctaatccgtcaccggtgagccgggatcagttcgaatcgaaatgtctgacagtgaagtgggtttccgtgtgcaacggctgctgctgttaatctgtcttggactatttcccgcgacggttatcaccaattatacaccaaatccctgccaaaatggtaagttcgacttggaagcgtttatccgtcagtccactgatgacatcattcacatcttaggtcaggttaatgcttatatcgtttgcagccccattattttgaatatgtatagtaacctgtgcggaggtcaaacggggattcaatgcaatccttccaatcctgtgactactgttgttcctggtacccccggttgccctaacactcctcaatatcctacagtggttccgaataatccatttaatcccaatgtaaatgttgttcctggtactcccggttgccccaacactcctcaatatcctacagtggttccgaataatacatttaatcccaatgtaaatgttgttcctgctactcccggttgccccaacactcctcaatatcctacagtggttccgaataatacatttaatcccaatgtaaatgttgttcctagtactcccggttgtcccaacactcctcaatatcctacagtggttccgaataatacatttaatcccaatgtaaatgttgttcctgctactcccggttgccccaacactcctcaatatcctacagtggttccagataagccactttgtcccaatacaccaacaactccagcttgtcccaatgccaatggtccgagttcctgtaattcgaacggcccatcttcgtatcccacgaacggtcctagtatcaatgctccttccccaacttctccaccaactaccactcccccaagtgttactgagcaaccagcgcctgcacctccagcaaatccaacaccaccacctcgaccgatcccagtcccagtcactacgccgccaccggatcccattatccggtgtccggagggaacaattttggtgaaaggtgtttgccgtctacttttctgcggggaaaatagcttgtacatcgaaggacgctgcattcagacccgctgtcctgctggatatgtttggacgggtatccggtgctcgaagcctcagccattggagctcggtaacatccacatagagaacactgtccaccagctcccaggagctctgccccacctgatcaccaacaatgttaaccacgtcatggtaaacgcctccatcacaatcccagaacaagcctccgaagaggaagaggagctggtggaagtggtggcgccaccacagtcaccctcaagcccctgctgcaacgtattcgctccgcgggtctgcgccacccaggcgggtcaagacggatacaagtgcttcagcaggagtcatcatcagtgcggttccgtctgcagtgccaggaaggtgatgctcgctccggccgcagtagccagctggactcagtccaacagccagatggtgaccatccctcccaactgggcgggtcaggcctgtcagtccaataatgggatttgccagcagccccagagtgagttcagtaaagatagttgttacatgcaaagtaaagtccaatttcatcgttttttgtccactttagacttctacgactgcagtggctgtgctatgggtaacctttcgacctgctcctcgtactgctactcctacaaatgcagcacccacaactgcgtatattacgaccaggcccaatactgctcccaatatgcaggtcaaaccggatgccgtgcggaagatggatggatggattaacactcgccaagcgcaaattattgaaaacgtgcttatcattatgcaatcaataccactcaaaaaacaataaaaaaaataaagcaattaataaagaaaaacaaattataataatcttttttataatacttgagagcctttttgatagttaaagcctctcacaattccgttcaaccttaaactttttcagtaatagttttgtcgtcataggggccatagtgttgatgtgatatttccgaatattcaattctgagcttaaaattgtggaaagcggatgtgtctataatttaggttaatgtcttagacaataattatttgtgtaagtgtacaaattataatagcatttatcttatctccaaatatcgactgatgattataaattaaatgataagattagattaccctacgtgcttcagcagagcttagctcttttcttgaaagctccaatactcttacattagggcggggataagcaatatgtaagtgctctagttaactcctcccttactgtttaataagagtgtcctgattgactcagagttaatagatggctcattgtttagaagtttattagctgcattattgctggtactatgtcggttatcgttctagaacctatggttgtacgactgcgaattttgaaaatttatctatacagctatctattctggaacaatgttttgtagagcgataaaagctcttttgagtttcacagcttaaagaaaattttttttttcagattaccgtaacaatattggaaaaaagtggcaccagtatatcagagaataagtcattcatcagggtctgtttatgttttggggatgcgtagccttcactggcttgggagatttggttcctgttgatggattttcctgtaagtaaatgagttaaaaacaaatatattgaatatattacttgtcttaatacttatgcccactagtgtatttaacctctgatttccaaattgagtgaaagcttcgctagtaatcaattctttgatagt

SEQ ID NO: 7565 - DNA, 1614 bp, DROSOPHILA
atgtctgacagtgaagtgggtttccgtgtgcaacggctgctgctgttaatctgtcttggactatttcccgcgacggttatcaccaattatacaccaaatccctgccaaaatggtcaggttaatgcttatatcgtttgcagccccattattttgaatatgtatagtaacctgtgcggaggtcaaacggggattcaatgcaatccttccaatcctgtgactactgttgttcctggtacccccggttgccctaacactcctcaatatcctacagtggttccgaataatccatttaatcccaatgtaaatgttgttcctggtactcccggttgccccaacactcctcaatatcctacagtggttccgaataatacatttaatcccaatgtaaatgttgttcctgctactcccggttgccccaacactcctcaatatcctacagtggttccgaataatacatttaatcccaatgtaaatgttgttcctagtactcccggttgtcccaacactcctcaatatcctacagtggttccgaataatacatttaatcccaatgtaaatgttgttcctgctactcccggttgccccaacactcctcaatatcctacagtggttccagataagccactttgtcccaatacaccaacaactccagcttgtcccaatgccaatggtccgagttcctgtaattcgaacggcccatcttcgtatcccacgaacggtcctagtatcaatgctccttccccaacttctccaccaactaccactcccccaagtgttactgagcaaccagcgcctgcacctccagcaaatccaacaccaccacctcgaccgatcccagtcccagtcactacgccgccaccggatcccattatccggtgtccggagggaacaattttggtgaaaggtgtttgccgtctacttttctgcggggaaaatagcttgtacatcgaaggacgctgcattcagacccgctgtcctgctggatatgtttggacgggtatccggtgctcgaagcctcagccattggagctcggtaacatccacatagagaacactgtccaccagctcccaggagctctgccccacctgatcaccaacaatgttaaccacgtcatggtaaacgcctccatcacaatcccagaacaagcctccgaagaggaagaggagctggtggaagtggtggcgccaccacagtcaccctcaagcccctgctgcaacgtattcgctccgcgggtctgcgccacccaggcgggtcaagacggatacaagtgcttcagcaggagtcatcatcagtgcggttccgtctgcagtgccaggaaggtgatgctcgctccggccgcagtagccagctggactcagtccaacagccagatggtgaccatccctcccaactgggcgggtcaggcctgtcagtccaataatgggatttgccagcagccccagaacttctacgactgcagtggctgtgctatgggtaacctttcgacctgctcctcgtactgctactcctacaaatgcagcacccacaactgcgtatattacgaccaggcccaatactgctcccaatatgcaggtcaaaccggatgccgtgcggaagatggatggatggattaa

SEQ ID NO: 7566 - protein, 537 aa, DROSOPHILA
MSDSEVGFRVQRLLLLICLGLFPATVITNYTPNPCQNGQVNAYIVCSPIILNMYSNLCGGQTGIQCNPSNPVTTVVPGTPGCPNTPQYPTVVPNNPFNPNVNVVPGTPGCPNTPQYPTVVPNNTFNPNVNVVPATPGCPNTPQYPTVVPNNTFNPNVNVVPSTPGCPNTPQYPTVVPNNTFNPNVNVVPATPGCPNTPQYPTVVPDKPLCPNTPTTPACPNANGPSSCNSNGPSSYPTNGPSINAPSPTSPPTTTPPSVTEQPAPAPPANPTPPPRPIPVPVTTPPPDPIIRCPEGTILVKGVCRLLFCGENSLYIEGRCIQTRCPAGYVWTGIRCSKPQPLELGNIHIENTVHQLPGALPHLITNNVNHVMVNASITIPEQASEEEEELVEVVAPPQSPSSPCCNVFAPRVCATQAGQDGYKCFSRSHHQCGSVCSARKVMLAPAAVASWTQSNSQMVTIPPNWAGQACQSNNGICQQPQNFYDCSGCAMGNLSTCSSYCYSYKCSTHNCVYYDQAQYCSQYAGQTGCRAEDGWMD

SEQ ID NO: 7567 - DNA, 7158 bp, DROSOPHILA
ttggcgggctctccgaaattcacaataattgcacgaacgagtcgtgcgttgttttctctgctcgatttcattgtttatggggcataatatgtggggatgccgggccaaaaacgaaattaatcacgaaaacgcactcaccgtcgaaaaatcaacgaaaagaaagaaatttgacagatgggtcgcggttagggatggcaaagaggcagtgctggaggtggtatttcgtaacgatagttaacgatgttatcggttgtacttgtcaggggtgaagagcattggattctacgtttataaatggttttgatagctcattttccttcttctacgcttatttttttcctatgaaattgtttaaatatttactgttttgtttatgtcttcctgtaactgtttaatttaattcagctagtatcgataacactgtcatctctaagtcgtgaactgtcaaattcaaagcatgtgctttgcaacacttcaagggagtgtgtctttgctaaaatcgtggtcttgttttcactgttacaattcaatattttccaattggaaaccagtttaaatttttcccaactcgtgaaaaataaaaataattttaaattttcgttaaacgtttttattacgttttaaaagcatatttttcacatgtcaacatactgatagttataatttaataacggttcttaatacctttgtaaaaaatgaaatacagatcaaggatctaacgaaaggccattaataaagtagatatgtaagtaatataaaaaatatagacaaatagttttaatagaatcaatagcaattcagtgattgaattcatatttttaccagcgttgaagaaagttcagtaacatctgttgatcatccgcactaacagaatgttaccgaaaagctcaacgaaatacagcccgctgttaactaacatggcgcttcgccaacagcaacaggtttcctatggtccacgatccccacatatgtggagaatggaaattcagtcgcgtgtgagcagcccacttttaacgttgtggtgtctctggggatcagatccaaaattcaaaaaagtccagtttggcctcttgattaaatcaattcttccacttcattcaagatgatgaacagcctaaagaaattgcccgtgcgcatggtgagttggccacgcccccctaaccgacacctttatacatacatatatgcctacaactaattcctttttctttattaattaactttttagctggctaacgctgcacgtcagcaaagtgctgcgatgtcctcggcaactggtctccccccacccctcacctttctcaccgacgatgagaaaatgatgaaggagactggtgagtataccctttggatctaaatagatcatagtgttaatggtactgtacacggagttgtagtccccatttgataggcgtgttttttctccatgtcgaatttttagatatttttatggtgtttagaacttgcttggtgttacgtaacaccaagcatcgcattttaatgatgctcttgttatttattaattttccattgtgctaaccagctgaagtcttgctgcactactatgtgtgtattcgtatttttcgagttttgttcttttttttttccttttttgctgataaagtttattcagttgagggaaacgcggaggaggccgcttgccagataagcacatttttattttgatagtagaagtaaaatgtcactaagtattagtgggtaggtttgtccattttctttatgacgtttgtatgtttaaatattacaagatatacaatttccgatttgatccttattgtaaaatgacgatcaacgattattaccttataattaattccttattaaattaatttttctggcgattattatataatttgtaatgattaatcccttaaattttttgtagtgtaataaacctaatatttttaaggtaaatgaggtccttgaatgtgtttctatgtttataatttattccctttggtgaaaaatatttttatctatataaaataatttttaataaaactatttcagtatttaataatagtatgcttaaaagttacaaaatattaatgattcatcccactgaggtccttaggtgacaattttgttatgtactgccataataaggttagctcttaaaaatcatacgatttcttaaagctggttacatgcatgtttaatgaatataattaaatttagaaagttacaaataatataataatataatatatataataatatttcgaatatcgtgttgtgtcaaatgtgtttaaaagtgttcacttaaactaaatgaatatatgtattcttaaaaagtgcacaattaatggccgaagagctaaagctgccagcttggcaagttcaaggtctaaccttataacaagcttttttcccgatggaaaaattttcctcccacctgcttaattctttaaaaaattataattaattgataataataataatttaccagtgagaaaacttacccaggtgggctgaaggaaaaaggggtgggccccgcacacacgcccaccctgctcacacacacacacacgcgtgttctaaaaatagcttttgcccaccgccaacgctgaacatcgagtttcgtcgctgatatttctcggttggccgtggtgttcctcgttgagcggccggcacataaagaaagcaatttaccaaagcgcgagttcgagccctcaaattataagcctctctcatccaagatcctctcatttcccctcccacagagtactgttattgcgtgcgcggaatgtttcttattaaacttatatagtgtccttaaggatatcctttaaccacgagttttcacaggtcagtcagctgtacggttctggttttaaacgtcaaccgaatagcgttacaccagtgatagagcaataaatgcggctgtgccattccccctgtccacctgtggccactgttctagtggccacgccgggcaatccggggcgtggcacttggccgggcgcccttccctagagagttgaattacctgagtggggggaggacgacgacttgttgttgttgtccccctgcaaaccatctaattcctagttgggaaggttacatttcctttttatcaccgatcaccttgtttttcctccataataattaataatcctcgtctcgcttatcagtccctcaactggactcaatctatatggcttcccatatatatacatatgtacatatgtatgtgtgttacatacaaataattctaagtgggaaagtatgtgtctatatggcctaactgttgcgtaatctgagctgaatgcaaagtggctaagtgcatgaagtcaaactggtttttttttatatttttcaatcatatatcataggctttggcacagttaacacattttaaattaaattattacattaaattttctgttttaatatgtatttcaaagtgcttgattttttaagtaagctttaagtacgtaaaagaatagcaaacacacatttactcgaacgattattaccttcaagaaccaagtacagttgcccaaaaaaaaagcaaaatttcaatttcagtctatatcagactaaagaaatgacctgattttattgaatttcatatttccactataagccaaactccaaaaaggacatgtaaaatttaccatcaagcccattgggacacgacacatctgttcgaaattttccgactgacccctgtccatatgttggaaaactaaatgaatatataaagttagttaattatttaagcaattcccatgaaaagtgagcgaaagaaagtatttccaaatgtgtgcaaaacggcaggaaagtgattgaagaaggggcgacggaggtgtgggagcttctgtgggtgtgtaccagttggatttccaagcagaaaaacagaaacacaaagtcaagaaaaaagaaaaaaatgcttaaaaaagatcaataataaatacgctgagagaataatagaactgccgaaagaagacagctgcgagagccccacgcgatcgtagaatctagtgataaaaaacgaacacacgaagactttttatctgagagacaaacgcgtgtagaaaaatacatacctcaacctacacaagcaagagatcaacagcaaacatcgcgccccttagaagaaaaagaactccaaaaaaaataaaaatcaaaaaagcttaagtttttaccttttttcaaaaacgtgcagttaaaagcttatcgaagctttacaaaaactttgacattaagctctttcaccgatcgttacattctatatctacacatatacatatacacatatgagttatacttaaggtctaggaattcttatgtgttataatatatttaaaaaataaaaaacctattttaaatgtatctaaatgtatgcaagcatatttgacgtatatgagttatttcacatgtttcataaaccatggaaactttcctttaaactttcagttgccaaactggctcaggagcagatccagcccttggtgaagaaaatggactttgagcacaaattcgatccctccgtggtgaaggcggttttcgagaacggcctgatgggcattgagatcgacaccgagctgggaggcagtggctgcaacttcatgaccaacatcgtcgtggtggaggagctgtccaaaatcgatcctgccgtcgccgcttttgtggacattcacaacacactggtcaactcgctgatgatcaagttcggcaatgccgagcagaaggcgaagtatctgcctaagctggcccaggagtacgccggtagcttcgccctgaccgaacccggtgcaggatccgatgccttctccctgaagaccgtcgccaagaaggacggctcccactacgtaatcaacggctccaagatgtggatctccaactctgatgtggcgggagtcttcctgatctttgccaatgccaagccagaggatgtaagtatatattgttttaaagccatttaaatttagaaataaatcatatttttattagtttttttttcgattataccccctagcttcgttttcactttttcgcagaccactgaatgatttcaaaatattttccgttgctaatctttatgttattccaactgattgccaactaatcgctctcagatcaaagttcacttgattgcagttcgttaaatattaaaatatgcaaatgagttttcttttcaaatataacgtttgaggaaacaaatttcatattccaattattcgactgcataatataaactttcttcaattatattttactgaacaaaaaatctgattgcgtaattctttcaaactaaaaccttatcgttatcttgttttttgcagggctaccgtggcattaccaccttcattgtggaccgtgagactcccggtctgatcgtgaacaagccggaggacaagctgggcatccgtgcctctggaacctgccagctcaccttcgacaacgtgcgtgtgcccgaggagaacatcctgggaaccttcggccatggctacaagtatgccgccggcttcctgaacgagggtcgcatcggtattgctgcccagatggtgggcctggcccaaggaaccttcgacgcgaccattccgtacctgctggagcgcaagcagttcggtgatgccatctataacttccagtcgatgcagcatcagatcgccaccgtggccacggagatcgaggccgcccgcctgatgacctacaatgctgcacgtctgcaggagcagggtgtgcccttccagaaggaggcggccatggccaagtactacgcctccgaggtggcccagagggcggcgatcaagtgcgtcgactggatgggaggcgttggcttcacccgtgatttcccgcaggagaagtactaccgtgacgtgaagatcggagccatttacgagggcaccaccaacatgcagctgagcaccattgccaagtgcatcaagaaggattatgcggcctaaagactaccccgatactcctccttcccccaacatatcccccacacaagctgagatatcgtacgtcagatacgtcaagtgcatttatgcgtgggaaccgctggaacaattttgacggccatccgttatcggttctcaccatgttaacgtagcatttaccacttagttgattctgttatgcatattgtataaaatacaattaaaatatatacacatataaaatttaaataaaacatatagttgtatagtatggttaattcactaatgactgcctcctccatccgttgtggtaaatgcggccagcagaatgttgatcactgtgatcatgaaaactcccattacgagcagatcgttggttctttcgtaacttcggttcctaaatcgcttgagacgtcgctgcggagattttttatttagtgaatggactaattgaagctctactcacatactttaaagatcagcattatgccaactaaaagctgcagcaccagggaaagtatcaccataatcatgctgtatatgtacgtggaagccttgtcgttataggtgatcaggaatcgcaactgattcgcattcgccgaaagcaaagctatatccattaggcctacaaaaagtagtttgaatatcagagttacaagttgtggttagcgttctttaaactttaagtattgtaactttcgaatagtgatttgcattacgttcttaccttcagctacatttttgttggcagcatagctattctctgtcgaaagatcgctggaacatttcttgttcgattttttggattcttgtaattcactggtggccctggatgggaactggtcgtcttttatatggctttcatgcacctgaatatccaaatccctgccagaaccgcaacatggtccactggttgtactggcgaaactttccccggagctgggggaatcctccaaagatattttcacctcgccgctgtccattgttcgagttccaaccgattaataagcatttaaatgctcttcttttaaaaaaatgcgaaaagcttttcttgtttttgagcatgaaagccgcaactgcggtttagtaactgataaaagggaatgacactgaccgaactaccctaaaaaaaaaaaaaaaaaactgggccataagccgacctgaaaagtatctgatgggttgagatacgcactaagcatgtttgccttaaagtatgctacacaatcttatttaaaatgaaggtaaa

SEQ ID NO: 7568 - DNA, 1569 bp, DROSOPHILA
cagcccacttttaacgttgtggtgtctctggggatcagatccaaaattcaaaaaagtccagtttggcctcttgattaaatcaattcttccacttcattcaagatgatgaacagcctaaagaaattgcccgtgcgcatgctggctaacgctgcacgtcagcaaagtgctgcgatgtcctcggcaactggtctccccccacccctcacctttctcaccgacgatgagaaaatgatgaaggagactgttgccaaactggctcaggagcagatccagcccttggtgaagaaaatggactttgagcacaaattcgatccctccgtggtgaaggcggttttcgagaacggcctgatgggcattgagatcgacaccgagctgggaggcagtggctgcaacttcatgaccaacatcgtcgtggtggaggagctgtccaaaatcgatcctgccgtcgccgcttttgtggacattcacaacacactggtcaactcgctgatgatcaagttcggcaatgccgagcagaaggcgaagtatctgcctaagctggcccaggagtacgccggtagcttcgccctgaccgaacccggtgcaggatccgatgccttctccctgaagaccgtcgccaagaaggacggctcccactacgtaatcaacggctccaagatgtggatctccaactctgatgtggcgggagtcttcctgatctttgccaatgccaagccagaggatggctaccgtggcattaccaccttcattgtggaccgtgagactcccggtctgatcgtgaacaagccggaggacaagctgggcatccgtgcctctggaacctgccagctcaccttcgacaacgtgcgtgtgcccgaggagaacatcctgggaaccttcggccatggctacaagtatgccgccggcttcctgaacgagggtcgcatcggtattgctgcccagatggtgggcctggcccaaggaaccttcgacgcgaccattccgtacctgctggagcgcaagcagttcggtgatgccatctataacttccagtcgatgcagcatcagatcgccaccgtggccacggagatcgaggccgcccgcctgatgacctacaatgctgcacgtctgcaggagcagggtgtgcccttccagaaggaggcggccatggccaagtactacgcctccgaggtggcccagagggcggcgatcaagtgcgtcgactggatgggaggcgttggcttcacccgtgatttcccgcaggagaagtactaccgtgacgtgaagatcggagccatttacgagggcaccaccaacatgcagctgagcaccattgccaagtgcatcaagaaggattatgcggcctaaagactaccccgatactcctccttcccccaacatatcccccacacaagctgagatatcgtacgtcagatacgtcaagtgcatttatgcgtgggaaccgctggaacaattttgacggccatccgttatcggttctcaccatgttaacgtagcatttaccacttagttgattctgttatgcatattgtataaaatacaattaaaatatatacacatataaaattt

SEQ ID NO: 7569 - protein, 414 aa, DROSOPHILA
MMNSLKKLPVRMLANAARQQSAAMSSATGLPPPLTFLTDDEKMMKETVAKLAQEQIQPLVKKMDFEHKFDPSVVKAVFENGLMGIEIDTELGGSGCNFMTNIVVVEELSKIDPAVAAFVDIHNTLVNSLMIKFGNAEQKAKYLPKLAQEYAGSFALTEPGAGSDAFSLKTVAKKDGSHYVINGSKMWISNSDVAGVFLIFANAKPEDGYRGITTFIVDRETPGLIVNKPEDKLGIRASGTCQLTFDNVRVPEENILGTFGHGYKYAAGFLNEGRIGIAAQMVGLAQGTFDATIPYLLERKQFGDAIYNFQSMQHQIATVATEIEAARLMTYNAARLQEQGVPFQKEAAMAKYYASEVAQRAAIKCVDWMGGVGFTRDFPQEKYYRDVKIGAIYEGTTNMQLSTIAKCIKKDYAA

SEQ ID NO: 7570 - DNA, 4223 bp, DROSOPHILA
ctgataggtcgcatcacagcgggtacctacatcgctcctgtgggctactacaggcgcatgaccaagaaggagcagcggatgttcgatggcgaggaagaagaagagggcgaggaggaggaggaggaagaagaggaggaggagttcaacgaaggcgaggaggagcaaatagaaggtgagcacttaccatacgcacgattcgcatagcaatacccgattattttgcagataacgacgtaatgcttttgaaaaacgagaagtacgaggcggaaccactgggttctctggccaccccggttgcttgggttcatgtcaggtccaatattctgaaccaacaaggccgcgttgtctggtacgacgaggagaaggcccgcaaggagcgcgaaaaggcactggccctgtacctgaagatgcagatgctgggcgagatggaagaggaggtggaggaggaggaggatgaggaagaaggcgaggaggagggcgaagaagagggcatgatcgagggcttcaatcagcccgaactgggtcccagtatcctctcctcctgtgccaatgacatgaaccccgaggtgccagtttcctggctcgcccgcatgaccagcaagtacacgaatcagaaggagcgaatgctcgtgatgcagtcgaacgtctggccaggcgcctacacgttcatctttgagaagacctgcgagtcgatatacttgggctggggccacaagtactacgcccgcaatattcccttcaagcacttgccgatggtgcaggaggagttcccccacaacccagaggacttcgtcgaggccaacgatccgactgtcgaggaggaggaagcttacaaggcttggctcctccggaagcagcagaaggccgagtatgtggccgaagacatcgaagactacgatgatgacgagttcgccgatcagtatgacgacgactgagttaaatgaaattgcttgtttttatgttctcattcaagttctgcaataaaatgtattggctttgtgagctttagtttgatttattacttgcaaataaaatacatatcgtgtatctaaagtgaataatgttggacttacacttacttcgccccccccatatgtacatttactctttctaaacttaactgcttaactgaaatcacacgtgcacatcgtcatcctataaattgtcattaagttaaatagctcttcgaaccatatgtacattgcagttttcgtgtgcaataaatgtaattgtaatttagttatcgttggctgtaactcggacacatggaatccatgaggtcttaatggctaaatacggaatcgaacaaatttggtaatacaacgcagcaatgcagcagcttacagcttcaaggattcctgaagcttcactgtagcatttgcagacggctttatgacttcctgcttgacggcaatcgcttcgggctgtaatcgaatgttgaaactctttagaagataagcaatcatacctatattataatttataccttggggactacggatccgtcttcgctgctgggtgctttaatattgcccatgctctgaatgcaaaagttctttagctgatccacggaagcggccagcatattgttcttgttgtttgccagcgttatctgaagtttatcaagtttagtacatctctacctgtaatcatgttcgatcgacctacctctttctcaattctctccaaagattcatcgaaactggtcactttctgtttatattccggccagctgttacttattgtggccacatgggacgtaatgttttcagatcgatccagcaggtcgtctattttcgtctgcaataaataaagcaaattagagctgataacgcagcagaatttggaagagattaccttgtgcagagatatttcctcgctgaggattttcgttgtttgacttagggtattattcacattcttcagatcgttggccagtagtttaaatgaattaaaagtggttttgttcagcgcagcaatatcatccgataagtttgcgggtaaagcgttagcctgaatcgtgggtagctgtgagagattgagctgcaggagcaagatgttcattactgtgttgatactcagcgtatactgatagcgagacctacctttaaggcttccgtttcggcctgcagtgttttctgcacctcggtgtacttattgtagtgctccttgatggcctctatgtcggtggcgacggcttctatcttggccccgaaatcagccaccaacttctcgtccttgccgtggtttctttgcgctgccacggccgcctccaggttgctaaagttgttccgcaggctctccattgatttttgcaaatcatttatttccgaaatgacggctgtttggttcttcagcaggtaggacgaagtctcgtgccatctttgcagggtgtccgggaagttcttgctcatggcagacactgaaagattacataattaaggacgcactgtgcgtagcagactgtgtacaccataccctcctcgatcttctggcgatagtcggtgagttgctggcgcagatcgaagtagagccagtacaaaattcccacaatcagaatgcccataatgccgaatagaagcgggccgcacatgcggaaataggctatttttcgatggctgcggcgactgccagcgacatttgtctgaaaagaacgcaatattattgggttgctaaatatttcactctttgcatggtgggaggcacatataagcatgtacatacatgtatgtgcgtataaattcccaatgaatgtgtatcttcagatactcgttagctgggaaagttcaattgggcaggttcagatacatagatacaaatacagctaaccttgtacttgatcgagtatgtgagtagcgatgtaagcagcagagtagcgtagaaataccttacccatgcgtaatcctcagggtcgtcggtcgagacggagagcagcttgtcctgggagttggtgcctccggggactctccggttggctctcttgcccgaggacgactgggaggctatcagggcgtccagctcccgacgcttcttcattttctttccggcccgcaggggcacttcaatgcgatggtggcagtccatggggtcgtcttctagaaactctggtctccagtggaattcttgcaatcggtcgcagggctgggctattacattttctcagcgtagcccagttgcttttgtaatgctggagcaaccataacatgtacttatactgataaaaaagatacttctgcgcatgatttcagattacggtgattaagactaatcgctggttatcgataagcgatgaaagttattttggaaattaaattggctgcctatgctaaatataccttttaaatgagctgcttttgaagtacatttaacttggatcctccgataatgatcaattaaattgacccaaaaagtgggggcgttcgataggtttggtaatttccggattcgtaataacggtctcactgcccccaaaagacttgcattgatttttacgccgtgctcgctttatcgatctagtttaattaagttcatagccgtcaaaaatgttctgtgcgcttctgctcgtctgctcagagtttccgtttagtgttttctaacgttggcctccatatgtcccataatatgttcgttgacgccgacgtactgttgcaataggtactcctccgctgatttcgaaatggccaagaacagctttaagactttaatcagccagaaacacaaaacgtttccggcggacctaaatatgtacggaatgaagtgtaaatcgcagctgctggaggatcaggagaacgtgaccctgatcatcaatcggcggaactcaatccgccagaagccgaagagttgggcttggaccctgctgcgttgcaggtggcaaaagaagctagttctcttattaatatttatttgtgtgtgcgttctgattgttttcgccaacacgcatctcttggttcgcggcaacatcctctcggccttcctctcgagccggcttaacaagcattcgcacgcggagaagcaggaggcgaggtatcccgacatcccggccacgaccccgtcagttcccccggtgctgaggcccacgcactatctgctcaactactcctccacccagctggagctgagctcgcacttgaacggtctgtcctcagactacaacatattcgtcatctacacgcgggagaactaccacttgaaccttaagttcgacctgttcgcccacagcttgc

SEQ ID NO: 7571 - DNA, 1688 bp, DROSOPHILA
ttttatcagtataagtacatgttatggttgctccagcattacaaaagcaactgggctacgctgagaaaatgtaatagcccagccctgcgaccgattgcaagaattccactggagaccagagtttctagaagacgaccccatggactgccaccatcgcattgaagtgcccctgcgggccggaaagaaaatgaagaagcgtcgggagctggacgccctgatagcctcccagtcgtcctcgggcaagagagccaaccggagagtccccggaggcaccaactcccaggacaagctgctctccgtctcgaccgacgaccctgaggattacgcatggacaaatgtcgctggcagtcgccgcagccatcgaaaaatagcctatttccgcatgtgcggcccgcttctattcggcattatgggcattctgattgtgggaattttgtactggctctacttcgatctgcgccagcaactcaccgactatcgccagaagatcgaggaggtgtctgccatgagcaagaacttcccggacaccctgcaaagatggcacgagacttcgtcctacctgctgaagaaccaaacagccgtcatttcggaaataaatgatttgcaaaaatcaatggagagcctgcggaacaactttagcaacctggaggcggccgtggcagcgcaaagaaaccacggcaaggacgagaagttggtggctgatttcggggccaagatagaagccgtcgccaccgacatagaggccatcaaggagcactacaataagtacaccgaggtgcagaaaacactgcaggccgaaacggaagccttaaagctacccacgattcaggctaacgctttacccgcaaacttatcggatgatattgctgcgctgaacaaaaccacttttaattcatttaaactactggccaacgatctgaagaatgtgaataataccctaagtcaaacaacgaaaatcctcagcgaggaaatatctctgcacaagacgaaaatagacgacctgctggatcgatctgaaaacattacgtcccatgtggccacaataagtaacagctggccggaatataaacagaaagtgaccagtttcgatgaatctttggagagaattgagaaagagataacgctggcaaacaacaagaacaatatgctggccgcttccgtggatcagctaaagaacttttgcattcagagcatgggcaatattaaagcacccagcagcgaagacggatccgtagtccccaagagtttcaacattcgattacagcccgaagcgattgccgtcaagcaggaagtcataaagccgtctgcaaatgctacagtgaagcttcaggaatccttgaagctgtaagctgctgcattgctgcgttgtattaccaaatttgttcgattccgtatttagccattaagacctcatggattccatgtgtccgagttacagccaacgataactaaattacaattacatttattgcacacgaaaactgcaatgtacatatggttcgaagagctatttaacttaatgacaatttataggatgacgatgtgcacgtgtgatttcagttaagcagttaagtttagaaagagtaaatgtacatatggggggggcgaagtaagtgtaagtccaacattattcactttagatacacgatatgtattttatttgcaagtaataaatcaaactaaagctc

SEQ ID NO: 7572 - protein, 402 aa, DROSOPHILA
MDCHHRIEVPLRAGKKMKKRRELDALIASQSSSGKRANRRVPGGTNSQDKLLSVSTDDPEDYAWTNVAGSRRSHRKIAYFRMCGPLLFGIMGILIVGILYWLYFDLRQQLTDYRQKIEEVSAMSKNFPDTLQRWHETSSYLLKNQTAVISEINDLQKSMESLRNNFSNLEAAVAAQRNHGKDEKLVADFGAKIEAVATDIEAIKEHYNKYTEVQKTLQAETEALKLPTIQANALPANLSDDIAALNKTTFNSFKLLANDLKNVNNTLSQTTKILSEEISLHKTKIDDLLDRSENITSHVATISNSWPEYKQKVTSFDESLERIEKEITLANNKNNMLAASVDQLKNFCIQSMGNIKAPSSEDGSVVPKSFNIRLQPEAIAVKQEVIKPSANATVKLQESLKL

SEQ ID NO: 7573 - DNA, 3748 bp, DROSOPHILA
tgcaaacggattttgtaaatttgtaaacaaaagcccaaacaaacgagttgccatgcaacggtaatttgtttggcaaccgttacgaggcgttgccagccgtggggaaacttttggagacgaatggagttgccacgtagatagataaatatagcggtagcatgaacccttaagtgccaacgatattttacatggaatttaaaaatactattttacactccaaaaaaattttattggtttcaaatttaaattacaagagaaaggagatatttgatacatgctaaaataaaaagcataccaaacataacaattttcatagtgttaatgagaaccctttatttcgatatcagttggttgtaaagatttcagctttatctgaatagtcaataaatgcgaaagtaattacataggaaaatgcgatagtttatctccccatgatttattatattttcgaataaaccaattttgtcaactgtcttgctattcgaaattaattttcatttgagttatcgtagagttgatatatattcactttatatagctctattgttcatagaagatatatgtatgtatgtacgtcagcattatctaggagacgcaagtttattttctaggtggaacctttttcggtttttacaccttcaggttttaatctctgtttaatcaaattacgactttaggcgcgactacctaaagtttctttttgtctaatttgatgactaaaggcgatgattatagcattagatatcttttgagaccttcaatactttggttcaaaggtcgagaaaaggtctgcgtctcaatcagataagggtaattaaatattaagggctttcaccacgaaactcgcttagcactccaataaaagtgtttttaactgtgacttgctaaaaagagaatagtagctattaaaagatttactttgaagatattttgctaaacagctaactcgccgcacaaagtccaagtagcaaagctgtgacgaaaagactttaccttgtttagtcataaatttgtgtttattatctgttataacatttagagccgtgcaaatcgggcacatacctttgatcactgtacatcacaagtgggatgaaatacactaactatatacacacacagtactctctatctagccgtctacttaagtaatggaatcttacgcctccttcaggaatcgaataatgtggggcgccactcgatccggggtgaccaggtgcagatgatgggtgccgggcacctcaacgtagaccaccttcgcggcattctcccgcagcgtggcaatcacatccgcatacacctgtggcgtctcgaacttcatgccgggaataccccgaatgttgagcacgcgacagcgaatctggcgtgcgtaggccaacgtctgctcggcggtgaacatgcccagcaggcttacttttagcctcagatccctggcaaagaggtagccattcttgctcggattgtgcctcattcccctgttcatgagcacacgaaccgaaggctcatccacggacccatcgtacgcgtccagcaccagtttgatcatctcgtcgtacgagtagcagggctgcttgctctccggcagggtttcgtagtccaggaacttgtccagcgccctgccagtgccctccgccatccgttgggtgccgcgcaccgtgggacccgcgatatcgatgttgatcagcttctccacctccgtgggaaagctggccgcgtacatgaaggtcagagctccgcccagcgagtggcccagcagagtgacgttcttccagttatacttgcggactatccggcgaatcaggcatatgccgtcccagaagatgaagtactgcatgcccatcggatagtgcgacgacttgccgtgcccgggcagatcgatggccaggatggaggtgtccgccggtagcagggggcacagcctgtcgaagctgccgcagttgtcctgccagccgtgcagggcgatgatgggctgcctctccttcgagccccaccacttggctgcaagcgggaaaatcgattagtacatatgtatgtaacttggtttcagcacgtgtatgttaatcgttcaggggaatcgcgtgatgtttccaaaaaatattactcaaaaaacaagcaaagagatagcgttattgggctcagttagtagaacacttgtagtgcgtcgaaactaacaaaatattttagccgcgtcacatcgaaaatcacgtcggattgccatgaatggtcgatgctgttgattaggaaacggctggcaggtgactcaccctcaacggttccccagggcaccgcgatagagaactcctcccagctgtcctcgcccagcagctgcaggggctcctccgtctggccatctgaaagcagggggaatccacataagtaattcaactaaaaccaaagcaagctgtgacgaaatggtctgcgtctggtgaaatcgcccgcgggccaggtgaagcgcaaccagcggaaacttcggactcaggtgcgcagagcgtgcgagtcggtgacctgaccacgacctcctcctccggtttactcacttgtctctggcgaaagttccgccgcgggagattgcgccgctgttgttgctgccacgcgtgtctggcccatggctaattgctgctcgcaaatggtgctccgtaatgctggacgcggatcgggcgagctcctgcctcggggaatctcaaaaagcgactaactaaagtcgcaaagttttgccgatcaacggaattcgattgtcaatagctattgacagatatgtcggtttggcggtggaatggctagaaagtcagatacggagctattgtgcagctccattcgcgactgggtggcaactcccgcacattgttttcatttgcgattgcaaacaaaatttaatattacttgtattcgaaacaattaagctgagaaatcatcatgtaagtctgcgttattatcctccggctttgccatagctaactctcgattccaacaggacggagtactggaaatcaaacgagcgcaagttctgcgacttctgcaaatgctggctgagcgacaacaaggcggtgagtccatagaataaactcgcttttcggcactctaatgacccctaatcccgcagagcgtcgccttccacgagagtggcaagcggcacaagatgaatgtggccaagcggatcacggacatcagtcgcaacagcgagaaatcggagcgggagcgccagaaaatggacgcggagatccgcaagatggaggaggcggccatgaagtcgtacgcacaggatgtccattcgcgcggtgacatgaccgccaggtccattaacacggtaatgagggccaccgccactgctgccgcctcaggcggagctcactccttcgccggaagatcacgccaagtggaccccatgcgcctggaaggattgtccgacgaagaagaagaccagaggcgggtggctcccggcaaggtaacaagcgacgcagccgtgcccgaggcatccctctgggtggagggcaagtcggacgagggacacacctactattggaacgtgaagaccaatgaatccgtgtggaagccgccgaaagagggctatctgtcctacgaggagtacgagcgcatcaaccagctggccatcgaccagcagcagatctcccaggccgaggaatcgctgaaattccgcgccaatgtcgacgaggaagtggcgagggtgaaccgagagaagatgaaagccttccgcaggacggacaatcccaaggaaaagaagcagaaggaggag

SEQ ID NO: 7574 - DNA, 1296 bp, DROSOPHILA
tgtcaatagctattgacaatcgaattccgttgatcggcaaaactttgcgactttagttagtcgctttttgagattccccgaggcaggagctcgcccgatccgcgtccagcattacggagcaccatttgcgagcagcaattagccatgggccagacacgcgtggcagcaacaacagcggcgcaatctcccgcggcggaactttcgccagagacaaatggccagacggaggagcccctgcagctgctgggcgaggacagctgggaggagttctctatcgcggtgccctggggaaccgttgaggccaagtggtggggctcgaaggagaggcagcccatcatcgccctgcacggctggcaggacaactgcggcagcttcgacaggctgtgccccctgctaccggcggacacctccatcctggccatcgatctgcccgggcacggcaagtcgtcgcactatccgatgggcatgcagtacttcatcttctgggacggcatatgcctgattcgccggatagtccgcaagtataactggaagaacgtcactctgctgggccactcgctgggcggagctctgaccttcatgtacgcggccagctttcccacggaggtggagaagctgatcaacatcgatatcgcgggtcccacggtgcgcggcacccaacggatggcggagggcactggcagggcgctggacaagttcctggactacgaaaccctgccggagagcaagcagccctgctactcgtacgacgagatgatcaaactggtgctggacgcgtacgatgggtccgtggatgagccttcggttcgtgtgctcatgaacaggggaatgaggcacaatccgagcaagaatggctacctctttgccagggatctgaggctaaaagtaagcctgctgggcatgttcaccgccgagcagacgttggcctacgcacgccagattcgctgtcgcgtgctcaacattcggggtattcccggcatgaagttcgagacgccacaggtgtatgcggatgtgattgccacgctgcgggagaatgccgcgaaggtggtctacgttgaggtgcccggcacccatcatctgcacctggtcaccccggatcgagtggcgccccacattattcgattcctgaaggaggcgtaagattccattacttaagtagacggctagatagagagtactgtgtgtgtatatagttagtgtatttcatcccacttgtgatgtacagtgatcaaaggtatgtgcccgatttgcacggctctaaatgttataacagataataaacacaaatttatgact

SEQ ID NO: 7575 - protein, 331 aa, DROSOPHILA
MGQTRVAATTAAQSPAAELSPETNGQTEEPLQLLGEDSWEEFSIAVPWGTVEAKWWGSKERQPIIALHGWQDNCGSFDRLCPLLPADTSILAIDLPGHGKSSHYPMGMQYFIFWDGICLIRRIVRKYNWKNVTLLGHSLGGALTFMYAASFPTEVEKLINIDIAGPTVRGTQRMAEGTGRALDKFLDYETLPESKQPCYSYDEMIKLVLDAYDGSVDEPSVRVLMNRGMRHNPSKNGYLFARDLRLKVSLLGMFTAEQTLAYARQIRCRVLNIRGIPGMKFETPQVYADVIATLRENAAKVVYVEVPGTHHLHLVTPDRVAPHIIRFLKEA

SEQ ID NO: 7576 - DNA, 12692 bp, DROSOPHILA
cagttggctggttttcctcacacacacacacacagcatgcatacatacatacatatgtatgtatgtatatggcgaaaaaagaagaaactcataagctgacgcttactgaagcttccttcgtttcgccttcgtccttgtgccatcgtcctcgtgtatccttggcttcggcggcagtcgcccttgcagaaggttacgccgctgggctcgagcggttggatgaggggggcgttggttctgtgggtggtgctctggcacgtgtcccgttatgtggtagcaactgcggcaggactctgcggcttttgtggggcagtcacagtgagaacactcgtcacaaaactgaactattttgttgtcattgctgcgaaatgcaatcgaataatgatcgtagataactctttttttatagtatcttagaattgtgtatcttctatctaagaatatatgaaagtacttcagtacagtaaggatctcggtttgctaaaaatcctgttcaaaacttgtagtccttgagttcttcacttggaacccctaactagttagccccaattgtttacagtgcagccgacactggcggcgacaaagggctttggtttagcgtgctgccatatgtttccggcaagtgctcgcccaccgccacccactactcctttatgggccatgaaaagcgttgaaatccgcaatgccaacaagtaaactgctggccaagcggggttgccaaggcatcggtgatttgtggaccccaaggccaagaatggaatgaggatggcaccatggaacgctgaaacgatggctctgtaatttgagccgacttcctttcgagcgggggcgacaccttctgtcgacgccgagcgccctgatttatccgcagcccataaaagaatatataaagccacactcgcatttgttatacactgtgttccattttcatgtttttattgttttcgaaaatcagctaatttaacttagtgtttgtgtgggggtgtgtgtgtgtgtgcgtgtgttttttttttttgttttttggattacatttcgagggttttctaacagtattacatacagatgtgcatacaatcagatttctaaacatatatatatatgcgttatatttaagtatttataggtttaattagttaaggtatccgaacagtacaatatcagcttaaataagtcgagccttttctcgcatatacaactagatatatgtatatagataatgtatatatttcaataataggaataaataaatatacaacaatcaggagtcggagccaaagttattattggaatagctggaggtcgatccgaggccttcaatttgtttgattgcctggaaattatgttaatttttcgccgatcatgagggggatgctgccagcagacaggggttgcaaaaataagatacagatacgaataaacaatggggtggatctgccaccatgtaccaattctaaattccagctattcctctaagaaactcatataacttagggtttttctttttgctcccctcataaactttaaagttttttctttgcttaaaatatgtacagaccatatacaagataacaaaacaaaaaatatcagctaagagcaagttgagaataaatgtacgaaaatctaaagcctttttcgagtgtacgaatatcgtaaatataagaagaagtttatcaatatttgcataatgcgtgtgtgttcgtgtttatgtgtatagtatttcatttggtcgaagctctaaaaaattaaaattcatttccaagttgctgggtgctgtgtgctgggttggcattttgttttcgcctggcttcgatttttaaatttatgtacaaaattcgtgctgcaattaaacgtaactcgcttaaacaactaatgcgacaaggtatctacaagatatatatatatatatattcgtatatataaatatgtgtttatatttatttgggtatatgtatagaaatatacgcattgtgccagtgcgagcttgttattttcattattttcattccgctttgtttgcttttgtttatatatgcccaagtattgttttgtatctttatgcctgacacgctcgctcaaagcggcgcaaaatcgttaaaattttatcgccccgatgaggaacgtgagtgtgtatcgggtatcgggtatcgggctgtatctttcgctatacgcgagtgtgttcctttcgaaaaatctagcagctagcccaaccaccaccaacgctaccaccgaattttcacacttcgtggcagtttttcctcagggtgtgggccaaacactttcggcactgagtgtgtgttgttgtaatcaaatattcctgatgcgatttccgttttcgtatcggtttgtggtttttcctcttctgcgtttgttttttcgaaacaaattggtttttactatcgcgcatttgaaattaattttgctatttattagtagagatctttttctcttgtttacgcttggactttccccaaaaagcaaaaggccaaccgaagaagatctatctactaaaggcatgtgtttgtgttcgtctgaccttatcgcggtttaacacatattttgctgttgatattttataattaattttgttgttgcttttttgcctgctttcgaaaatgccagcgaacgccagcgcttttgattagtattattattctcctcctcgcttcttctctctttctctcacagttgggttatttattaatgaatattgttgctggcatttttgaaatttgcttggattatttatttagtcgcgtactaattcgattgcaaatgtttgcatatatgtatgcaaatgatgcggttttcgcatccaacagatacattccgctgtgttgtagatattgctcagtgttgttcgggttagttctaaggcttacgatccattctaatggttgattaaattgcacttcatcttcgggagcgaggtttggaaaacttgcgctataggagttgtttatacggttgatcatcacctcagttgctgtcggtatttcgcagattctccagcggcgccacaagatacatttgcgttccgcacagccaaagaaacgctgcaaaagaaacgaaaagaggaagagaacgaatgaaaatgttattcgcctttctatgggtgaaaatacaaaatgatgtaatgactctactcggccgatgttcattaaaaggccaagcaaaacagaaaaaaaaaaaacaacaactgaaccaaaacaaaaaacgaatatcaaaacaagaatgtttgtcaaagtgcaatgaaacgactacaagatactcagtgttagcgatccaatggatttgtaaaaaacacattccacatttctttggagtaatttgattgatattattgaaaattatgctatatatgctatatattcatttgaaatttgtaaaagcgacagttttcgtaatgcaaattagcttctgcttttctacacttaaagccggaatagctaataaaatccagatgctgaaacggacagacagactttcatatctgtcatcatctcaaaacgccgagttagacgagttcaaaatacatttagtgctctacgacgacaaaaggggtatacaaaaaaacacagcgaaaaagtcaaaactcagtgtagtaacgtctaaaataaaagcaaaacgtctgaaacgtatgaatgaccgaccaagaccgctgccgaagtgacgaacgacaaacagagcgagatgggtggctgtttgggggcagagggaaagagagagagagagggcgagagagtacgtggaagaagatacattatttgtgtataatgactacttgagaaaagccaaagcagaaaagaaacaaacaacacaaacaacacaacatcggcaagaaaatcgaggcaagaagaaaacgcaaaacacgaaatgtaatttgtataatttgagtctcaattccatcaagtgtgggaaatgcgccaaaaagaaaaattatatagccaactcataagggaagtggaaagcaccgaagaactagggttcaagacaactggctccaacagaagagtttgttttcctaatgtagcgtagagtttaaaaggtcacaatgaatcgctaaaaagaaaagcaatcaaatgaggaaacttgaacatcagatcaccagaatcaggtggtaaccaaatcatctcacctactggccatcgaagagatcacattccaacaacaaaaaaaaccattaaaaaactaggaatataatatgtagatacatataatctcagagctaaaaaacaatattgaggaacgaagaaagttccaaaaacgggaagttcgagttttgttagtttaacttaagttaagttactcaacaacagaggattctagttatagattctagttatagattctagttatgaatgactccacatatatttcataattgtacgcttatcagatacccttaaccaatagaaatcagtgcaacacactcaccttgtgactaagcggaactcgccaccggagcattggcaatctgtacgggtggcttggccatggtttccgggactgcggacacactggaaaccgcggatgggatggtcagcagagtactggccgccgaaacggtaatgggcgtctccttgggctctggcctcaacgcaaccgctgtggtcgttttggccaactccggggatttggccgcattggaactgagaacgggtggtgcctcctcggcgagagcggcggccttggcctcggcgcgaatattcaaattggccgccacttgatcgatggtcgtgggtttcttggtcattgcccgcggcgaggtggctgcactgcatccagagctgccgcttgagctgctgctgctgctgctgcttgtgttggtggggctcaatgatcccggattgctggtggaaaccttcggcttttcctcagcacgaactgtcaacggtttgctaatgctggctgctgtgctggcagctgctggctgattgcggaatgccaaagccgatggattgggtatgctccgaactgaggcattctgtggtcttaccaaagcattggcattcttgggtttggcggaactactactggtgctaccactgccgtttccactgctggcggcctttatggagatcttctccctggccgttgccgattccgagagcatatgcagattctgtagatcatcgccgttggttgtaccattcgagttactgccagaagtggtcgatggtccaccattgctgtttgccgatatattctgtttgattttgtttaaggctgcctccaggctgttgctggtgctgttgttattgttattattattattattgttgttattgttgttgttgttgttgttgttgttgttgttgccagcgggcggtgagttgggcgccaatttggcgtcattgttgctcctacccgggttagctgataaatcaagtatatcggcatccttggctaatgctgttcctgttcctgttcctgctcctgctcctgctcccgctgctgtggttaccgatgtggttgctgttgctgttacagccgactgcactgctggccgaaactcgcgcaaactcgttttggacttgtccaatgcggcagtgccattggttttgccttggcagccagctgctggcggggatttctttgaattggcttccacctttgggctcgactttgatggaaacgagtgctgtggagcggctgtgttgcgcagatttattaatgcaggcggtgatgtgcgataagcatttgagttcgaggagttgcccttgttgttcctctggccactgagcgcaactgacagtggcggcgacttgacaatcgccggaatcgtggtcatcggcatgggcagcggcagcggcaacggcattggcattgtcggcatttggcagctccgcttggccgcaccatgtccatgtcctgcatgtttgggcagagccgctggtggtcccatcaagcgggcactggacgttgccggcgggctaagaggtggcatcgttagacccttgcctcctgcactctgcttattcaccggcaatcgcactatttccagtgcaggcacatggatatttggctccgagaaggaataaatcgacggcgtagctctgggccttggcgtaatcgtcacttggctcgaactgctggccgggcacaacattggcaacgttggcttgctgcccaggtcgggtagaccataggatcgcatctggggattgggcagaaaggcggccgcttgacttttggcctggttgctagtctgcatatgcaacttggccgcataactgctggccatcgcctgagcctggctcaatctcgcctgcttggccggatgcgattcgtccagggacatggatcgctttggcatcttgttagccgcactggcaatcgaactgggtgtggactggtagcgttgcatgtgatacatattccggtgggttggagcctgtggcaccgcaaagtgtccactgttgggcttacgattattgttgctactcagcggcggtttggcgggattcgttttagccagactttgctgtagtacagcttgaggttgctgtggcatttgctgttgctgctgcttgggttttccgccggccaccgtatgtggagcagttggcgtcgtgctgggtgtataggctttgaataaactgggcggcagaggtggcgatgtgggcaaggttaggtcctttatttttggcagcaccacaaactgttgctgttgctgctgctgctgctgttgttgctgctgttgttgtggttgttgttgttgctgctgctgctgctgctgctgttctggttcggcggtgggcgtgggcggcggtgtgggtgctccacccaccaccaggctgttgatactccgcgcctcctcgcccaatgtgcgattcagtgcctcggaagtgctagtactgtccagtttcaacttctgcagatccaactctccactggccagtgaatgcgacctcttgaaatccaacttatgattgggttttgccgttatcttaaccttcattttcccatcggtttgcgaactgatctccgcgtgcaacttcttccgcttgccattcgcatcctttggctccttggagtgcttcttcttgcgcttgcgatgggaactggacgtgctggtcgatgtactggcatcggctgtgcccagactgctgctggatccattggtcgaactggagcacgaagacatgggcgaggcattgggactgtatttgctatcgggattggatgcactttgctgcaaaggctgctcaatgggcttcaagccaatattcttggcgtaggtctccagatcgagttgttgggctgagcaagataaggagcaggaggtatcctccagtcgcggaccagccgataatggcatactcagcttgctcttcatgctgttcagttcgatcttcagtttgggcaaatggccaactccctttcgattcgctgtcttcagctcaaaatcctcggcatcaacgtaggactttcggagttgcgagggtggaatgctgaccactatattagtattggcctccagcggctgttgttcccgttctcttggcagaaggaactgttcttgttccggttcacttttaactttggacacggcgtaatcactgtaccgcatgtcattgcttcgcagacttttgaagttgctcaccggactttcaggttccgcttcccgtttactcgacgtcaatcgtttgtttttcgacgagggagaaacttttggcggagtcttacaccgtactttggaacgcggagaaccggagtctatttccgattccaggtcctcggcaaaggtcaccgatttggccgacttggagcgacgtaccgaatgctctggttcaatgtcctggttaatcctggataggttgttctcatcgttttttgtttgctcgttgtcgtaaagcagaatccggtagcagaaggccatgggcgattcctaaatggattcggagaggggagaaatagatggaaaaaagggcaggttgacaagggtggaaaattgaaagtggacattgaacgctaaactgccggcacaattggattgggtttccccttgcgaaaatctatcgggttattgggataaaccgcaaaaagggacaatataccgcccgcctgaagagaagaaaaaagggcgtatataacacttaaaactgaccgataatgataagatggatatgttttcaaggtctaatttggcagtcggatgaccgcagaatcaagtgagaagtttcaaccctgttttctctccatattgttacgtagtttttttgttttacggaatcaaaaagttacccttatgaagaatacatttcaatacactaattgagaactaaaatactagcataagtactttttaaagttaatttaaagattttacaattgcattgtcccttcattgcagttaaatccctttgcatttttaacccattgtcattataagaatgcactaatatttcttattaagtaaaacaaacttacccggctccagttgtaacagtaggcaacgtccatcagggtgaaattggtaggcagtacctcatccttgtaggtcacctccacttccaccagaccgttgtccgtctctatgttgtacttggagcagaggaaccttttcagtaactccacaggtaatccggcggcacattgcaggtaaatagtgggaggcacctcaccaggaccacactgatgcagcatggcgggatggtattccagggataagctaattgatataaacgaaaagtaaagcaaaaagtttattagtaaaattagttttacacgtttaagcattgttagcatttagctgaaacctaccttataagttccgtggttgtgaagaactccggttcatcagtcgtttgttcatccaccaaatcgtgctgctccttgaaatctgccagctccttgcactccctttgatagagtcccggcactagcttatagattagcgatcgcaacgtatcatccgatttcagattcaattcattgatttccttgcctccgctggctttacattccggacaatataccgctcgcagcaggtgctttagtatgcaactccggcaatctgttgagaaatgatagatcaaaccgaataacaatatgtttaatgatcaaggaaaatgtgtattttagcttaagaactaccagaagctgtgattacattgtttagtaatgatcttaaagtttaagatctaacttgggcagtcaatattgtaaatcatgacaaccttaaattaactttataaatgaactttaaaatggtaaaagtgatcaaacaaataatgatcaaattacatgcaattaatacaagatattggttttatgcgtatattaaaggtactctttggaatctaagactacttacaggtatgataacagtaatccacagtggttggatcgatcatataaccgcgacaaagtcggcacgttatcagatcatgaaactgccggacatcccgagaagctggggatgcggcatccatagcggcgtttgattccattgtgttgtgcgtgttttgcaggtgcatctttctgcctattctatctgcctcaatacttactcctagcagcctctttcaatggggtcctggaagaggaacaaggatgggggttaggactcggcatatccatgtttggcatgtgctcgctcaacaagtgacactagtgtgacaactgatgatggctaatcaactgttagggtctttccataattatgacgagggcacaaaggaaacggggtaacaggggccaagtaaaacctaggaaaaagacacacaactgtgagaaccaacagccagcacacaatcccatcaacaagcaccatcaccatcatcgtcatcatcattgttgtcgacatttgtggttgtcgctcgtcaacaaaaaagccacagagccagatatatcaaccgtgtatctgtatcttgtcccaaaagatatggcaacgtcagcacactcgcacaatacagaaaactttagactagtaaggcagccatccatatccatgaatcggaacaatgtgcttgcagctcacaaaaatatgaataaaaaaatagaataaaaaacaaaacagaacacaaaagtagcaactttgtgggcgggtggaaagcaggggggtctgcgggcactgggaggtggggtctttggtctttcgtacgcccttcgtgccacagagggcacctaccgagagaagccgagaagagccgagagaagcgcacagaaagcgatgtgcactcgacggtgtacttgaagctagttttagcttggcgccccccttttctgccccatcgcttcagacccctctttatctaccataaaactacgaaaattacgcttttgtgccctgcacaccagtggaaactgaattttcatcattatggcgatgcccggacgatgattgcgagttgatggcaggcagccgagagttcagggcaaagttcagggcatagtggatcagcaggttgttcggatagctcctaggaaaccaaggaaaacttcaagttactcttgggactattgttgaagtacttgtgtgtaacaattagtgtacctaagattttgaaatgtaagtcaatattcgaaaaccccttttaaaaagttccataaaagcgtataactcaatacaatattcactacatatatatttctatatatttttgacattatattaattaccaacataaataataaaaagaaatgcctttaatcggatcaacaagatctgcattacaaagtgactacttggggtacaactgttcaactgtagaaagtacagtaaaaccatctaattatcatcagtatgataaataattgtgcgcaaagcaatttcttttagctgaatgctttttcttcattttcattaaagattcccgcatttgcataattagaaacaaaattgcgtgtaaatgatgatttcttctggaataggccatctttattcccctcaattcagtcagtcggcaagttgaagtttgttgaattgtgactgaatttggcactgcattattcattatttaactaagtattcttcaaatttaagcacttttaatccacagccaccccatctaaaccgcccatcgcatagcgcaaccaaaagtcgcatcgcttcgcccattttttgtctccgttgcctttcgattattttcgtttgccgctcacgcgaaaatggcacgcaaagaggagggtggcatagttgggtaaaggggaggcagaagaacggaggctgtgctagcaaaacaaaaagcgaacaagacaaaaacaaaagaccgagcggcttgaactaaagttgggcagaaaagtgggtggttggcgttcgtgtgcctacgcccactcagctggaaaatgacaatcccacgtttgatgacgctcttaaattgatgacgtcgctggcgagcgcttttcttgattttccttagcccgctttctgtttatacgccgcaatttcgtaaaaggcgcgcacttgcacaccaacccacacacacacacatggtcacagcttgaaagtgtcggcaatccaataacaacaataacagttcgaccggcacgggcgcccgcagggtggttgaacacacacacactcgccacttctctcccactctctatcgctcacacacacacacacgcaacaagctggctgtccgaaaaatgaactcacaaaaaagacgaaaacatggacgaaaatctacgtaaaatcgcaacaactctggaggtacgatttttccgcggccgcgtccagagttcaactgaaatccaattcgagaaatcccaactgccacttgcgcgctcaattcgccgttaggcgagagcgcacgacacacacaaaattgtatctattcgccgcggcgagagagacgacaaacaaactttctacttttgcgcgggcgcattttcgccgactgtcgacgttttcgccgcacgacgaaaattccaatacgcggcgagaataacacgcacgcacaccagggcatttgtgtttacaaaattttcacccatacatgtgagagggaaaatttcatgttccctttcctttttggtttttatttcccgcatacgtactcaaagcaattgcgttgttacttgaagagttttcctctgtagcatattccctttggattttccattaaaacaaatccattcgccgacaccgaacacacacgctttcgattactccactgccttttcgtcttcttcttctgtcacttcagctgctgttatcgatttctcgtacacgcacagattttcgctgcttctctgtcactcactctcgcgctctctccctctcgcactcgtttgagctcgcgccacgacaaaaatatattctccgttccgtttcacaaagtgcacggcacgaaaagtttccacagactgattcaaattagacctgctggcgctgtcgctgcccaaaatcgctcggctcgcatgagagagccgcacgagtgaaacacgagagaaccaccactaacctatcacatcgctgcacgagcgagatgacaagaggggggcgctcggcatcagcaggctgtctgcgtcgcactctcacgaattgaggttactctgtaactgtgtgggtggcgtcgtttctaattgaatccaactgtcaaatgagagagattaacgcacatattcgtatgtatgtgcgtgcagtgtgcccgtgtattggccttggcgtttataattaacacaaaaatgcccgttttcgcagattttttctcctttttttgttggtctgccgttggcatttcatt

SEQ ID NO: 7577 - DNA, 6313 bp, DROSOPHILA
agttgaactctggacgcggccgcggaaaaatcgtacctccagagttgttgcgattttacgtagattttcgtccatgttttcgtcttttttgaccccattgaaagaggctgctaggagtaagtattgaggcagatagaataggcagaaagatgcacctgcaaaacacgcacaacacaatggaatcaaacgccgctatggatgccgcatccccagcttctcgggatgtccggcagtttcatgatctgataacgtgccgactttgtcgcggttatatgatcgatccaaccactgtggattactgttatcatacctattgccggagttgcatactaaagcacctgctgcgagcggtatattgtccggaatgtaaagccagcggaggcaaggaaatcaatgaattgaatctgaaatcggatgatacgttgcgatcgctaatctataagctagtgccgggactctatcaaagggagtgcaaggagctggcagatttcaaggagcagcacgatttggtggatgaacaaacgactgatgaaccggagttcttcacaaccacggaacttataagcttatccctggaataccatcccgccatgctgcatcagtgtggtcctggtgaggtgcctcccactatttacctgcaatgtgccgccggattacctgtggagttactgaaaaggttcctctgctccaagtacaacatagagacggacaacggtctggtggaagtggaggtgacctacaaggatgaggtactgcctaccaatttcaccctgatggacgttgcctactgttacaactggagccgggaatcgcccatggccttctgctaccggattctgctttacgacaacgagcaaacaaaaaacgatgagaacaacctatccaggattaaccaggacattgaaccagagcattcggtacgtcgctccaagtcggccaaatcggtgacctttgccgaggacctggaatcggaaatagactccggttctccgcgttccaaagtacggtgtaagactccgccaaaagtttctccctcgtcgaaaaacaaacgattgacgtcgagtaaacgggaagcggaacctgaaagtccggtgagcaacttcaaaagtctgcgaagcaatgacatgcggtacagtgattacgccgtgtccaaagttaaaagtgaaccggaacaagaacagttccttctgccaagagaacgggaacaacagccgctggaggccaatactaatatagtggtcagcattccaccctcgcaactccgaaagtcctacgttgatgccgaggattttgagctgaagacagcgaatcgaaagggagttggccatttgcccaaactgaagatcgaactgaacagcatgaagagcaagctgagtatgccattatcggctggtccgcgactggaggatacctcctgctccttatcttgctcagcccaacaactcgatctggagacctacgccaagaatattggcttgaagcccattgagcagcctttgcagcaaagtgcatccaatcccgatagcaaatacagtcccaatgcctcgcccatgtcttcgtgctccagttcgaccaatggatccagcagcagtctgggcacagccgatgccagtacatcgaccagcacgtccagttcccatcgcaagcgcaagaagaagcactccaaggagccaaaggatgcgaatggcaagcggaagaagttgcacgcggagatcagttcgcaaaccgatgggaaaatgaaggttaagataacggcaaaacccaatcataagttggatttcaagaggtcgcattcactggccagtggagagttggatctgcagaagttgaaactggacagtactagcacttccgaggcactgaatcgcacattgggcgaggaggcgcggagtatcaacagcctggtggtgggtggagcacccacaccgccgcccacgcccaccgccgaaccagaacagcagcagcagcagcagcagcaacaacaacaaccacaacaacagcagcaacaacagcagcagcagcagcaacagcaacagtttgtggtgctgccaaaaataaaggacctaaccttgcccacatcgccacctctgccgcccagtttattcaaagcctatacacccagcacgacgccaactgctccacatacggtggccggcggaaaacccaagcagcagcaacagcaaatgccacagcaacctcaagctgtactacagcaaagtctggctaaaacgaatcccgccaaaccgccgctgagtagcaacaataatcgtaagcccaacagtggacactttgcggtgccacaggctccaacccaccggaatatgtatcacatgcaacgctaccagtccacacccagttcgattgccagtgcggctaacaagatgccaaagcgatccatgtccctggacgaatcgcatccggccaagcaggcgagattgagccaggctcaggcgatggccagcagttatgcggccaagttgcatatgcagactagcaaccaggccaaaagtcaagcggccgcctttctgcccaatccccagatgcgatcctatggtctacccgacctgggcagcaagccaacgttgccaatgttgtgcccggccagcagttcgagccaagtgacgattacgccaaggcccagagctacgccgtcgatttattccttctcggagccaaatatccatgtgcctgcactggaaatagtgcgattgccggtgaataagcagagtgcaggaggcaagggtctaacgatgccacctcttagcccgccggcaacgtccagtgcccgcttgatgggaccaccagcggctctgcccaaacatgcaggacatggacatggtgcggccaagcggagctgccaaatgccgacaatgccaatgccgttgccgctgccgctgcccatgccgatgaccacgattccggcgattgtcaagtcgccgccactgtcagttgcgctcagtggccagaggaacaacaagggcaactcctcgaactcaaatgcttatcgcacatcaccgcctgcattaataaatctgcgcaacacagccgctccacagcactcgtttccatcaaagtcgagcccaaaggtggaagccaattcaaagaaatccccgccagcagctggctgccaaggcaaaaccaatggcactgccgcattggacaagtccaaaacgagtttgcgcgagtttcggccagcagtgcagtcggctgtaacagcaacagcaaccacatcggtaaccacagcagcgggagcaggagcaggagcaggaacaggaacaggaacagcattagccaaggatgccgatatacttgatttatcagctaacccgggtaggagcaacaatgacgccaaattggcgcccaactcaccgcccgctggcaacaacaacaacaacaacaacaacaacaacaataacaacaataataataataataacaataacaacagcaccagcaacagcctggaggcagccttaaacaaaatcaaacagaatatatcggcaaacagcaatggtggaccatcgaccacttctggcagtaactcgaatggtacaaccaacggcgatgatctacagaatctgcatatgctctcggaatcggcaacggccagggagaagatctccataaaggccgccagcagtggaaacggcagtggtagcaccagtagtagttccgccaaacccaagaatgccaatgctttggtaagaccacagaatgcctcagttcggagcatacccaatccatcggctttggcattccgcaatcagccagcagctgccagcacagcagccagcattagcaaaccgttgacagttcgtgctgaggaaaagccgaaggtttccaccagcaatccgggatcattgagccccaccaacacaagcagcagcagcagcagcagctcaagcggcagctctggatgcagtgcagccacctcgccgcgggcaatgaccaagaaacccacgaccatcgatcaagtggcggccaatttgaatattcgcgccgaggccaaggccgccgctctcgccgaggaggcaccacccgttctcagttccaatgcggccaaatccccggagttggccaaaacgaccacagcggttgcgttgaggccagagcccaaggagacgcccattaccgtttcggcggccagtactctgctgaccatcccatccgcggtttccagtgtgtccgcagtcccggaaaccatggccaagccacccgtacagattgccaatgctccggtggcgagttccgcttagtcacaagcgtttctttggctgtgcggaacgcaaatgtatcttgtggcgccgctggagaatctgcgaaataccgacagcaactgaggtgatgatcaaccgtataaacaactcctatagcgcaagttttccaaacctcgctcccgaagatgaagtgcaatttaatcaaccattagaatggatcgtaagccttagaactaacccgaacaacactgagcaatatctacaacacagcggaatgtatctgttggatgcgaaaaccgcatcatttgcatacatatatgcaaacatttgcaatcgaattagtacgcgactaaataaataatccaagcaaatttcaaaaatgccagcaacaatattcattaataaataacccaactgtgagagaaagagagaagaagcgaggaggagaataataatactaatcaaaagcgctggcgttcgctggcattttcgaaagcaggcaaaaaagcaacaacaaaattaattataaaatatcaacagcaaaatatgtgttaaaccgcgataaggtcagacgaacacaaacacatgcctttagtagatagatcttcttcggttggccttttgctttttggggaaagtccaagcgtaaacaagagaaaaagatctctactaataaatagcaaaattaatttcaaatgcgcgatagtaaaaaccaatttgtttcgaaaaaacaaacgcagaagaggaaaaaccacaaaccgatacgaaaacggaaatcgcatcaggaatatttgattacaacaacacacactcagtgccgaaagtgtttggcccacaccctgaggaaaaactgccacgaagtgtgaaaattcggtggtagcgttggtggtggttgggctagctgctagatttttcgaaaggaacacactcgcgtatagcgaaagatacagcccgatacccgatacccgatacacactcacgttcctcatcggggcgataaaattttaacgattttgcgccgctttgagcgagcgtgtcaggcataaagatacaaaacaatacttgggcatatataaacaaaagcaaacaaagcggaatgaaaataatgaaaataacaagctcgcactggcacaatgcgtatatttctatacatatacccaaataaatataaacacatatttatatatacgaatatatatatatatatatcttgtagataccttgtcgcattagttgtttaagcgagttacgtttaattgcagcacgaattttgtacataaatttaaaaatcgaagccaggcgaaaacaaaatgccaacccagcacacagcacccagcaacttggaaatgaattttaattttttagagcttcgaccaaatgaaatactatacacataaacacgaacacacacgcattatgcaaatattgataaacttcttcttatatttacgatattcgtacactcgaaaaaggctttagattttcgtacatttattctcaacttgctcttagctgatattttttgttttgttatcttgtatatggtctgtacatattttaagcaaagaaaaaactttaaagtttatgaggggagcaaaaagaaaaaccctaagttatatgagtttcttagaggaatagctggaatttagaattggtacatggtggcagatccaccccattgtttattcgtatctgtatcttatttttgcaacccctgtctgctggcagcatccccctcatgatcggcgaaaaattaacataatttccaggcaatcaaacaaattgaaggcctcggatcgacctccagctattccaataataactttggctccgactcctgattgttgtatatttatttattcctattattgaaatatatacattatctatatacatatatctagttgtatatgcgagaaaaggctcgacttatttaagctgatattgtactgttcggataccttaactaattaaacctataaatacttaaatataacgcatatatatatatgtttagaaatctgattgtatgcacatctgtatgtaatactgttagaaaaccctcgaaatgtaatccaaaaaacaaaaaaaaaaaa

SEQ ID NO: 7578 - protein, 1368 aa, DROSOPHILA
MHLQNTHNTMESNAAMDAASPASRDVRQFHDLITCRLCRGYMIDPTTVDYCYHTYCRSCILKHLLRAVYCPECKASGGKEINELNLKSDDTLRSLIYKLVPGLYQRECKELADFKEQHDLVDEQTTDEPEFFTTTELISLSLEYHPAMLHQCGPGEVPPTIYLQCAAGLPVELLKRFLCSKYNIETDNGLVEVEVTYKDEVLPTNFTLMDVAYCYNWSRESPMAFCYRILLYDNEQTKNDENNLSRINQDIEPEHSVRRSKSAKSVTFAEDLESEIDSGSPRSKVRCKTPPKVSPSSKNKRLTSSKREAEPESPVSNFKSLRSNDMRYSDYAVSKVKSEPEQEQFLLPREREQQPLEANTNIVVSIPPSQLRKSYVDAEDFELKTANRKGVGHLPKLKIELNSMKSKLSMPLSAGPRLEDTSCSLSCSAQQLDLETYAKNIGLKPIEQPLQQSASNPDSKYSPNASPMSSCSSSTNGSSSSLGTADASTSTSTSSSHRKRKKKHSKEPKDANGKRKKLHAEISSQTDGKMKVKITAKPNHKLDFKRSHSLASGELDLQKLKLDSTSTSEALNRTLGEEARSINSLVVGGAPTPPPTPTAEPEQQQQQQQQQQQPQQQQQQQQQQQQQQQFVVLPKIKDLTLPTSPPLPPSLFKAYTPSTTPTAPHTVAGGKPKQQQQQMPQQPQAVLQQSLAKTNPAKPPLSSNNNRKPNSGHFAVPQAPTHRNMYHMQRYQSTPSSIASAANKMPKRSMSLDESHPAKQARLSQAQAMASSYAAKLHMQTSNQAKSQAAAFLPNPQMRSYGLPDLGSKPTLPMLCPASSSSQVTITPRPRATPSIYSFSEPNIHVPALEIVRLPVNKQSAGGKGLTMPPLSPPATSSARLMGPPAALPKHAGHGHGAAKRSCQMPTMPMPLPLPLPMPMTTIPAIVKSPPLSVALSGQRNNKGNSSNSNAYRTSPPALINLRNTAAPQHSFPSKSSPKVEANSKKSPPAAGCQGKTNGTAALDKSKTSLREFRPAVQSAVTATATTSVTTAAGAGAGAGTGTGTALAKDADILDLSANPGRSNNDAKLAPNSPPAGNNNNNNNNNNNNNNNNNNNNNNSTSNSLEAALNKIKQNISANSNGGPSTTSGSNSNGTTNGDDLQNLHMLSESATAREKISIKAASSGNGSGSTSSSSAKPKNANALVRPQNASVRSIPNPSALAFRNQPAAASTAASISKPLTVRAEEKPKVSTSNPGSLSPTNTSSSSSSSSSGSSGCSAATSPRAMTKKPTTIDQVAANLNIRAEAKAAALAEEAPPVLSSNAAKSPELAKTTTAVALRPEPKETPITVSAASTLLTIPSAVSSVSAVPETMAKPPVQIANAPVASSA

SEQ ID NO: 7579 - DNA, 2939 bp, DROSOPHILA
ggatttggcctgcacaggataggcacgcccacacacaaacgcccgacagtgaggttgttactttgttaatttaataaaagccaggacgacaacaggtgctgttcgagtagccccaaacccaagcccgtatgaagtcacgtcgcaggcataaatcaattgccatgagcaggcatttgtgccgcccaaattgcacgcctgcataggtagagtccttgcggaaggaccaaggagctgggcgactccccgccagctggcagctcgcaaattgagcgcgagccatgaaagtgtaacgagtcttaattcgtttgccaagtgccgccgagcgggccacaaatcccgataaccatccgataagccactcccgtcgatgcctgaaatacgttcgccttaaacacggaagactgatggcaaatcaaatacccagctgggacagccaagtggcgcaggagggttgtccctaatgggaaagcactcgcaatccatgggaggcctctactagtaatacaattggctttaaggtgtaagttgtgtgccaaagaaattccgtggctgaatgtaaaatcaaacaatttaaaatatactatggcgcacttttgaattccgcgactcaaagaacaaatttcaaatattccagagctgcctaagtaataatgcaaagttacttcaagaaagttgtagataacagcctcaatatacgctgccaacttcaggttttccgggtaatggaaatggaaatggctgcaggcggaatggtttgaaatgaaaagaaccacgtaaaatgtcgtggatcgattatctccaacacgaatccttccttcctcgacacttccgctgcagttaccacccatggatgccaattacaagtggagcccgctgaaggcgacgaggccgtactgaaaacttgttgatgtcctaccgggcacggcgggtggtaattgcaccacccactgccacacaacattccgcacccaacaaacaggacaggtgtcaaccgtgagttcgcttctgcggaacagtttcctttcacttgttgctttattgggcttacatacatacaatggagacacattgaatactccactccggctacgagtactccactcaccactggaagatggtcagcatggcgcgtagcagctctgggatgtcccagccgttcttgcgcagggtgcgcagtggcttcaccacgtcgcgcttgttctgcaggataattgaggaagtgagaatgagaagtaaaggagttaatacactgccacactcttgtgtactcaactcgagtgggtctactcacaatgttggccttgagcgtggcctggaattgcttggagaccaccgccttggtgaagttgccgaagttggtgtgattcgcctgggactgtgccacatagttgtgcacctcctgcttcggcatgatggagagcagatcgccgacgaaggtgtggtgcttcacggccttgcagtcgcagttgcgatcgggctggcggacgggcagtatgatgcaatggaagatatccgccacggtctcaatgtcggcggtatccacgctctccgactgcagttccttgagaacggtcttgtaggcatccgtatccgtgagctgctgggtggtcctctcgaatccggctgtgttgtagtaccgcatggcgcggcggaacttcagatcacaattgtagtgcacctcgatcagattgagcagggcctcctgattgatcatagcgcgaatgtgctggaagttggcgcacagggcggagtcgtgatcggttctattcggattgttattatcggtattgttattttctggtggacaccattcctctgattcctcggacacctcaatgtaatgtggctgtgcgatcgtgtggcaggcgaatatggccacggccacggtcaacagtatcaacgtcttcgcgtccatcgtctcctttttagctggccgagattcaagttaactgtggccggaacccgccgttcatcacctgcttttatggccctcccatcggcggcagagtcaattacatgcatttccccttttctcggacacatcgcttatcgcctgccaattagcggaattcgtccgagccactttccgcttatcagttggccaaaaacaagccgtgtcatatgtgcgaaaatggtaaacactattcaacattagcgccaagataagagcggatcgtgttctaaacatcttttcacacttgaaaacaatgattcacaaaagtgggttgttcattccttcgtgaataaaccagcaggatatataggatatgaattgtgctatttatctgatgttctcttagtgcacaacatctaattgtttgccattagagcttataatttccgaaattcgcttataatctctgggctctgcgcttcattaattgcaaattagagttgctcccatgctgcccaccaaaaagccttatgacttatgcacctgatgctcctcgtctgtgtgcatgtgattatgactttgggggagtgaatgtagtatgtatggtcaaacccactcattagttccgtagttctggcaggatgggagaaaacaggacgaggggactcgtcaaagtgagtccaacgtttatccacaggaccaagtgctcagaccccagagtgcaaaacaagtttggtggggcatcaggagcaaaaggacccagctgtccagagggggggcagtgattgtttggccaggggcttcgctcctcaacttgcttgattcatggccctctgtttgcagagctactcgcaggagattcaaattccattcgagctcggacgaaagtttccagcacttttcggcactcaatggattgaatgaaatctggcgaattcaggaaaaaatggaaaaattctgcgtaataatattaataatcatgcgcctcgctgggcacatttatcttgccgcaattgtcatgagtttctgggctccgaagatatct

SEQ ID NO: 7580 - DNA, 848 bp, DROSOPHILA
tctcggccagctaaaaaggagacgatggacgcgaagacgttgatactgttgaccgtggccgtggccatattcgcctgccacacgatcgcacagccacattacattgaggtgtccgaggaatcagaggaatggtgtccaccagaaaataacaataccgataataacaatccgaatagaaccgatcacgactccgccctgtgcgccaacttccagcacattcgcgctatgatcaatcaggaggccctgctcaatctgatcgaggtgcactacaattgtgatctgaagttccgccgcgccatgcggtactacaacacagccggattcgagaggaccacccagcagctcacggatacggatgcctacaagaccgttctcaaggaactgcagtcggagagcgtggataccgccgacattgagaccgtggcggatatcttccattgcatcatactgcccgtccgccagcccgatcgcaactgcgactgcaaggccgtgaagcaccacaccttcgtcggcgatctgctctccatcatgccgaagcaggaggtgcacaactatgtggcacagtcccaggcgaatcacaccaacttcggcaacttcaccaaggcggtggtctccaagcaattccaggccacgctcaaggccaacattaacaagcgcgacgtggtgaagccactgcgcaccctgcgcaagaacggctgggacatcccagagctgctacgcgccatgctgaccatcttccagtggtgagtggagtactcgtagccggagtggagtattcaatgtgtctccattgtatgtatgtaagcccaataaagcaacaagtgaaaggaaactgttccgcagaagcg

SEQ ID NO: 7581 - protein, 240 aa, DROSOPHILA
MDAKTLILLTVAVAIFACHTIAQPHYIEVSEESEEWCPPENNNTDNNNPNRTDHDSALCANFQHIRAMINQEALLNLIEVHYNCDLKFRRAMRYYNTAGFERTTQQLTDTDAYKTVLKELQSESVDTADIETVADIFHCIILPVRQPDRNCDCKAVKHHTFVGDLLSIMPKQEVHNYVAQSQANHTNFGNFTKAVVSKQFQATLKANINKRDVVKPLRTLRKNGWDIPELLRAMLTIFQW

SEQ ID NO: 7582 - DNA, 13620 bp, DROSOPHILA
atcatcttatcatttatgctatatatgagaaatggagtgataaagggtacaaatgaaaataacgcacaaagatttagactaaaaaaatatattttatatattttatggaacataaagtgcagaagcaacccttgcaaccgtgtcgcattgcaggaccgaaaggagcaagtgcgtcacgaaaccccccccccccccttcgcgattcagctggacataaaaagacagccgtttgtctgcggctgttatcctttgcccgacctctccccacacctcctaaaactgagcgccactaaagcgggcagacacaatggatttctctctgcaaccggctttctctctgcattctgctctcctctttttgccacttccactccgctccccatccctatccaacggtttggtgtagcacgtgcagtttgtttgcctttgccactttgtttcgttgtttgttatgactggagctgagttagcgctctctcgcaaatgccgctctctccttggagccctggcacacttacagaaaaagttagagtttaactgtggctcatgataacatgagaaataaagtgtgaagaaataggaagtgtattttatatccattgttaattttgctttgtaagtaattatttaacattgttaaaatttgtgaatttggatgaaatgcatatttaaatccaataaaatgatttaaaagacaatatcaatattaaatcatatcaataatattgataaaccagttaaggctttggcttaaattaagactttaactgttattttgcgaaaaatacttgtaacttatttgctcggtgtatgcactggctctctgtagttagcggtgttcggttctccgtgtggcttcattcatgcgattgcgactggtgttgttgtgctcgctgttgttggaacagttgcacgcatgctcagaacacggactcaaacgcaaactgactttgtttccgagattctcggttggcagtactcagttctgttgcgaacgtcggaccgtttagcagtaatttttccggcattcgctttttcggtattccatgctcggttctagggctttttctctctgttttcgccccgcgcctacataaacgcccccccaaagcgacccggtaaaaaatacgataggcggaatcagcgagtgccgaaacgtaaaattttcattgattttcccaggctaatttagctgtataaatagtcggcccgtgcccaaatctataaataagcccgacaaatgtgtttcatcttcaagtagtccagaatcgtaggtaagaaattttggaaaaatggacgaaaatcgcatgggccgccttgacctcagtaggctccattttgtttctcgctctttgctttttcctttccttgccctctttttgttcctcctcacgtttggccaaacctgatttgacccggctatcaagaaaacagtctataaaatcaatagcctaaaaacagttttttatattgcataatattccgttcttttatgggaaaaggaatgtctggagatttcgtttaatcagaagatcatacatatatagtatcttactaaaagatatcttatgtaaagaaattaaattacttgtattaaagcagacttatgagggccttaacttcaagatatatgacccgtaacaaagtaccagaaatgcaaaataattgaaatgcattgatacgtaaacaatatgagagctacacaatctacgtatgtatcttcaaagaaacaattaggtgaaataatcaatcgatgggaaaaaatcaattccatcatagagccacaaatcaatgttttttctagataggcatacagaaaagttttttaggcctctaataaatatggcttagttatactttgctatagggtatagctactcttcggatacaaaataaatacacatatatttcgcacttgtttttggatcgcccgtctgcattgtccagagacgaataatctgcttaggaagggggcttcgaccagatgtctgggtgcaaagtttcaccagcagactgataaaggttctccctgttcttgccgtttctgctgccccaagcattcttatcagcagaccaagagcttgggatgcgctccaccagccgcctgtttatgtgggtgaagtgggtcggcctactcggtggtcatgtggcgtttgcctccgtgcctcaagtgcattctttaaatcccagaagtgaccaactaaagaggattaaatattaaacacaagggttcctccttttgtttaagcctcgaaatggaaatgtatgtatgtgactttctttggagcagatgaaagcattttgaacttcttcagattcgattataggtatacaggaatatatggggaagctattaatgaagatatatttggtttttatattgcagtcagaaatactttaatacatgctaacataataagtaaaccactgtttgactaatcgatttaataagtcgtaagaaaaacataataaagtgtttgtgtttcttccgggaaaatgtttatgaaactaaagtttatcgtgccagcttgtcattgtattaccatttattatgataattttattcactacacattacaagtagtctgggaattttctcctctacaaaacattttttattattggcacaagcatttgaaaacctgttaaggcagctagtattgttgggaattccatcccaacttgtaatgtttatcaatattttagcctttatagatgggaaatactcaaataaattattcaatcttgagaaaccagttattgtagaatgcagtttatggcaggtgcttatgcttaaggtcaagtaaaattagaaataaatatatttatcagataaatagtggaaaatgattttatatgattatttctggtttacaaaactttttaaacctgactttcttgccaactaatggaatgtaattctactatttcaattgattgcaattgtagtacgtagagtgtataaataaataaaataggtgttaaatacacatacttaaatacaaaagggataaagctttataacagaaaaaagcatttagaaagttcaaaaatctgtagagcattggagagtcttaattgccggatctggtctcttaaagtttgttgctcgtattccagttgcatttttactcctatttttttttttagaactgataatacaaatgccgaacacagcagataaagcaataatcgcacaactgatgggcaagtgcagctttgtctataaaaaattgctgtacatatgcttacttcataatttctaaggggcaaaagtttaagacttagacattgatcagcggactttcaaatatgtttttttatttggattttatatctggtaagcacaatctacccctaatgtataaaaccgctgtaagtccaattaaaataatcatcccaaattgaacgcattttaattgctgtcacttgacttgtcaggggcccagtggcaattaccgatctataaaatgatacataggttgatgtgtgcatatggataaccctctaattaggcggaaaatgaatggcatttatatgctgcggttttggcctctggttcagcttgattgcatttgctgggcacggggattgagaattctcaatggctcattaggcccctttttcagtgcagtgtttcccaaacaacccattattataaaatcaatttagaaaaatatttcactgatgtgggctcttctattgattttttcgcaggctatcttctgtaggcaatcattaagctaaacacgtaacattcactcaggttgaaaagaaaaacaactattaactactactgtaataccacaaaaaaaaaaaacaataatatattaaggaaaaaacgatgacgccagagaaatcggttatggcctacgtcaatcatttgattgtcagcaatttttcatatttctgtaagtatttgtataaaagttttataaaatcttaataccacgtatgagtttcaaatatatttaagcttaaatgatactactatcaaacaatttaaatccttaattgcttaagtacttaacttgtaataataagtatttttgacatataactaaacgtgcgaatttattagaaaatgttaaacatattttttttaacctcctaaaaattagttttcttagtaataattgttttattgttttgtaataattaattgtgaccaaaaaaagtcaaaattcccaaaaaatagtaatcttaagatcaatgcattaatccactttatttgaatcacctcaacaggggacgagatcgatgggtatctgtactacctgggaggcactttgggaacattaaccctaggaagcctggcagctagtgtggcatactactttgcaacgaggcccgttccggaacgaccgttagtgcctctggagaaccaatcgccattgctagaggtatgctgatttcgcaattgatcgactttgatctcatcaattacatcattcaatattcaattgcgaactgtttgtcttgagttttctctgaggctcggttgtgtttgaggtagaacaggagaatcccccgaggcatgtgggccaaaaagagcttggctgctttgatgtgcacacgtccacgatcacgagtcggtttcccaaaaacggactctgcttcgttgttgtcgtcacatgattttcacacattttcaccatttcgattttcatttcgcctttgttcttcgacttttagccgtgacgtctgtgccacagtggtgcgaaaatgattaaaaatagctgccaccacctcatgctctaatgtatgaatttcttttgccaagactgcaacattctcgctgataaattatcgaatgacagcggcacgacaataataaatcttgtcatggctcaattggcattttcccctaattagtatcctggttctctcaatttcgatctatgcagatattttccgcgccgattgtaccccacacacacgattgtcagaggaatttccttcaactgaactagccgacattttccccgctcgaattgttgtaacggacctttccttttgtgttgatgtcatgtaaataaacaattattgacacaatagcatatttcgcgcaatattcgacattgccaaaatcgcagccccagttttcgtgggttgaaggctgaaggcactgtgaaacgcgataatcgttgattaaacaaatgatttattgaatgctaagtgaatacatttttgttcctagcgttgtaaaaacggaaaagttgaatgaaattgtagaaatttcatcttcttccattattaatactaaggtatttctaacttgtctttttttaagtaagtgatacatttcgaaaccatacagcacttccacttaagtgttgattatttttctcataacctgttttcacattcatatccggcgaataaatctatttaaaagcagtcgaaagatataaattttcaaacagcaagttagttgtattacaggaattagctttgaaatagttttaaaatcgaaagaaaaatttgaaaaatattgaagttttttttttattccatgttaaatgccatcgaaagtccccgcccaattacaaacaaacaatgaaagacaacggaataataaggaaatgtcagacttttgacaagacagggccaacctgtctacatgtgagcagatacatttgcttgtgcggttgtaaaacaagtattttgtataattatgcatttcggaatttcactcacttagtgtgcttgtttagtctgctatggcgtacagattagaatgcaccaacatttggcacactctttcttcttcacagagtgttttccaatatacataagtgtgtatgagcactgaaattgctaatgtgcgcaaattgaggtgcaaatgaaacgataaatatgtggctatgagctaatgttgagtggatttagactgaaaggtgcataaattaaacaacattcattgaatattgagtaattgagagcatgtaagcaatcggttataaatttaaaacaattagcaacgagtctaattggtatgggaagtgtgtggcaaacatatctgaaatattatttatttttaaaaataaaatagaatattttgtttttatttaatgaccaatgaaactttgcatagtataaagcattccatgatgggatgcccaaaagtaaacaaatgctttctatttttaccagtcgcaaaagtgggcgtggtcctctcgtatagaccataaatcattttggttattaaagagttgaaaattgctgtcactaccataaggaaacacctctattgcttacttactacacacattcacataaatatgtgaatactgctcgtttggtaaagggaaaatcgagacaggtggacaacttgatcgagccaacaaaaaattagaacaaatctatttggcaaagagtaaaaagaaaaaccatttaatatcaaaacaagaacatataaacgaataaaatttctggccgaacgctgcattctacttgatccccccgaaattacccccaaaaacccacaaaatctttcgctcgatttttctcaatctctctcccaaatgaaaagcagattcctcgggccggccaaaatcatttttagccacggccaatattttacttctgccactcagttcgaaatttaacatcgtgtcgcgcagatcgtggcgggctcaagtcgcaagaatatatttcaagttagaaaaatcccaaaaaaaatttgaaaaagaaaaaaacgaaataacaagcaacaacaacataatgtacatgtcgcagatatatgtatatctatgaaacaaacgtatttttttataaataatagctcgtgtatactaaacaaaacgaaataaagagcgaaaaaacgcacgacaatttgcaacaaattgacaaaaatacaagcgtttaatctcattacgtaaagcgcaagaacccccaaaaaaaaatgttcaaaaaagtggacggaaattaacgaagaaaaatgaaatgattttccaaaggaaatcgatttgccaaagtgtcaaagtgccgtcgtgttgccacgtgaactcagccactcaagttcaagttcacgcagtttctatacttgaaacatctaagaaaaactcagcccccagattggttatatagctaattttaacacgattttgattcatatttagattgatgaatgttgttggcttaattggtggggtttttcagttgtaaacggttgatcttaacaatacacacagattgcccatatcattttatagctgtttatatttaagagatacattttatatttttcaagaatttttgagccatgtgcacttttgaacgtgaatgcatttgtacaaatatgtcgaaagtatcaacaaattcaaagagatttacagaaatagccactaattgaaaaataaatcaaattttacaattttatatttttttccccttacattttaactttggctctatataacacgactgcaatctatcttaatcaatcaaaatgccaggaagtaaaaccaccgcacatatatctttaaatatattcttttgtattacaaccaatgcattcaaaagattccctgtggtttgttatttaagataatttctaaaatataatggttagtaaggaataagttagaacaatgaattttgtgagcacttgaagttggtactagaaaatacataaattcagaacgctttaaaaaatatgccagccacctggaaaccgaaaaaaaagcttttcccaaacgaccttgaaattctcgcatatttttcctggctttcgtttattttttttatttttaaaaatatgctgccaaactattgataccttgcagattcaattgaaattctttttggtcccggctgtttcattcatttattttcatttcttttctttggctctcgatttttgttgggccaatagtttatgtccgattttatgaccaccacaattaccataactcaaagatgaattgctcattgaggaaaatgtttgctctctgccaattggctcaaaacatcccaatgaggcccgaaacgcgttccccatgactcagtactcgatcgtctttagaaaattgaaattttcctctatttcttagcattttgcataaagtgttaattgtattcgagtgtgtgtgtgaaagcatagtttggtttttttcttttatttaatgccgccacacacatttggcgggtcccatagataacaacagagtggaacgtttttacccacaaacgaactatttataaaaataatttggggcaggccaagcaaaatccgcagacgacgccttgtcgataatgtgttggccactctctctttttgtcttggccattttacaccgttctcttgccttttttttttgctatcccctttttttggggccgccctgcagctgccaatattgaaaaattataaacaaaatgactgggccgcacttgccaaaaatatgcaaacggacagccaggcgtcataattatgctatggcttttgacttttggttctgcttttaatttttgttctaattggtgtaattcagatattatgtgaggttttaaaatgaatttaagtagatgctaagtggattaataaaataaggaatgatactatacgatcaatataagattaaataccaaaaattattagtagaagaagtgaaccaaaaattttgaatagtaaaaaaaatacatagaatggagcaactatcgatataaaataaacaataatatctgtttaatatctgaacaacattttccgcacacccttcaattacaaatctattttaagcgcgcgctaattagcgtttaaacgatctcgatgcggttatgaaatgtgccttatgggaaaatctataattgaaatgtacattggaccgtttaaacgcgaggcgtacttggcaattaaacgccagatattgaatgcaaattggtcaatgaattggaaatgtgcttaaattcgcgtttgtgttttacagtcgcttggaaaatgtgcgtgtaaaatgtcagatgcaatctgaacgatcaataaatagagccataagtgaagaaagtgtccaaaagtcagcaaacattgagtaaacctaagaagtgataatacagaaaaaaaaagaaaaccatgtcctgttgcggccaaatcaccagtatacgagtgcccatcgagctaagcaatcagagcgatgtgctcaaggtaaacccctttatgaggacctaaacaaatagaatgaaatgacaaaactgcctgaccaggattaactaagcaatcactaatatatactttattttgcttcttttatttttgtttaccgtctcttacatttcgtgggctagatcatatacgatcatcgtcaagatatccaccatagggtatgccccatgaaactaagcccctcgtagtatgcactagctaactaacaatttcccctagacttgcgtcaataatgaaaatgaaatccataaacaaaatcaatttgcaaagcactttaatctgtggaaaacaattagttttgaaaatacattcgcattttgctcattaaaagcgggcagcaaaaataaacaaactaactctttggatccgcggaccagtaccccccacaaaaatattcccccatcgcagagtattttgatattcgttctcgtacatcaacacttttggccattgcggttgttgtttctttcgcagctgtttaccataaaggaagtggctcgatgtgctttactttcgagcggactaatgaaatcccgccgagtgatgggtttatgtctctggccacaaaataaatgataaatcatagccttttggctgcgtacataaactagaatggttattgattttattctaacaattggctaaagtaaccgaaaataaacacactcaatggatggacggactataatagctctagatttaggggaaacagatttccgatcgtatgagatcaattaaaacttgaacttacgacaatatcccattgtacctaaatcttttatatggcttcccatttccgttaatggcaattaaatgacgaagaaatatttatttattttttttttttagctcaagacaagcaactcactaacgttgaacatatgtacatatgtatttgcatctgtctaacccaacaaaaatactatctgtaccccaccgaactcttgattgtatatattcttttctacctcaatatctgaacgtatctcactcattgcatgtcctccgacttctctgtttcttttggggtcacttcacttgcattgcagggtccagaacaaatacacgtctccaagttctacaaggagtcgaagaacggcaagttcgtgtcctacatcacagagaatgtccgcaccctgtaccagacgttccgcgagggcgcctacgcctccaacaatggaccatgtcttggctggcgcgagaccctgacctccccctaccaggtaaaagtcccaaaagtcataattggaaattgatatagttctagttatatgtaatatgcatttacatatttaatttactccaatccttgtcaacttagtggatcaactacgacgaggccctgctgcgtgccaagaactttggagccggaatgctggcgctaggagccaggccaaagcagttgattgggatctactcgcagaaccgcccggaatggatcctgtacgagcagggctgctactccttctccttggtggtggtgccgctgtacgacaccctgggccccgatgcctgcgccttcatcatacgccagacggatatgcaggtggtgattgtggaggacgatggcaaggcggccatgctgttggagaaggcgccgcgcagtctgaagatcatagtggctatcaagcccatccggcagacgaccctggagcgggcacgcagccgaggcatacagatattctcatttatcgatgtggagaaactaggtgccaaaggcaaccatccggaggtgccgccgacggcggaggatctttgcacggtgtgctacacgtccgggacgacgggcaatccgaagggcgtgatgctcacccacggcaacgtggtggccggcgtctgttctgtgatcctgcagatgggcgaccatcgcatccgggcgggcgatgtgatggtgtcattcctgcccctggcccacatgttcgagcgttgctgcgagaatggaatgtactatgtgggcggctgtgtgggcttctattccggcgacatcaaggaattaaccaatgacctcaagatgctgaaaccaaccgtaatgccggcagtgcctcgtcttttgaaccgcgtctacgacaagattcagaatgatatctcagcgtctggactgaagaggggtctcttcaatatggctatgcgagcgaaggagaaggagatcgccaggggtgtcctgcggaggaacggctgctgggacaagttggtcttcaagaaggtgcatcaggcctttggcggaaatcttcgtttaatggtcgtgggctccgccccattggccggaaatgtcctgaccttcatgcgctgtgctctgggctgcctggttctcgagggatatggccaaacggagtgcacgggggccattacccttaccgttcagggagatcatgtgcccaaccatgtgggaccacccgtgtcctgcaatgctgtgaaactggtggatgtgccggagatggagtactttgccaatcaaaatactggcgaggtgtgtgtgcgcggatcgaatgtgttccatgggtaggtaaagctaatatgaatattccacttttgtttaatccattgaattgttgtgtgaatagttactataaggatcccgaaaagacggcggaggccatcgattcggagggctggcatcatacgggcgatgtgggcatgtggctgccaaatggaacactacggatcatcgatcgccgcaagcacatcttcaagcttagccagggcgagtacatagtgcccgagaagatcgagaatatctacacgctcagtcaatacgtaaatcaagtttatgtctatggagagagcttaaaggtaagaccgaaattgtattatatatgtacatatttaccaaattctttcagagctgcattatcgctgttgttgtacctgataccgatgtactgaagcaatgggccacggagaacaatgtacgcggcacactctccgtcctgtgcaataataagaatgtcaaggaactgatcatgaacgacatgctcaactggggcaagcagagtggactcaagtcattcgaacaggtgagcttttgaatcagcatacctataggtttcgagataatatccgggatatttaattttaggttaaagatatctatctgcatccggatcccttctcggtgcaaaacggactgctgacgcccacattcaaagccaagagaccgcagcttaagagctattttaagccccagctggaggatatgtataaacacctggattaaagcaatgcctatatgcatacatagacatcaacaacgaatcgaactcaagaaactgggaagcattcattcaaatatgcctataccattttaaactgatgataacaaagactacagatacagatacgaaagcgaactgtctaattttgtagtatcgtcaattcttagcacgtaagaggagcgcaagatacaccagatacagatacaatacacataaaatatacacaacttcaaactgacaaggagaatccttttggcagccgcatttttttatataatttaaccgagaagcgaaccttaattaatatattaactatatatttccctttaaacacttatgagctagttcaaaagtggatagaaaacaattgcgtagtctgaaccaaaacatatataataacatattgagcaaattgaataaaaagaaagctttaattaactattgtatactacactcagcgctagatggaaactaaagtgaagaatcaaatttttaactatatattagatacgctaaaactaaattaatgggaatgaaatgttcatcgcaaatgctgaggaattacttttaacttacaaatgaacgccaatcgagaagcagatcaaacctaataataaatatggaaaagatcaacgtctttggactgcactgtctgccttactaaataccaaatgaaaatttattaataaattgctaaaataatgaactatttcatattaagagctaaacaataaagtaaagcagcattgtattaaatttattaaatagattctttatgtagatacgaaagcaagttaactcaaaataatatgaaataaaaccaacaaaaatacaaattgaaatactgagatttttgaaaactttatttgaatttggcgttgccacctaacgcacatacgcagtcaccaaagcttttcgagggggtaaagtggcctgaccatcccaaataaatggttaataaaatacgctgaattaattactatttactccaacttttaatacatttgacaatcttcaacttaaaggcgcgtatttagtatgatgacatttaatttcggcttaacttaattagtagctcttggaatgcaagacaagaaaatcgttcgaaatcgagttacaaaacacaattcagactttagtgagctgttttctttttgagttgggtttacgttatcaatcgcattatgttctaattaaaatgtacaaatgtgtttagtcgttatttcggagatggctcttagctaa

SEQ ID NO: 7583 - DNA, 2759 bp, DROSOPHILA
gaccgtttagcagtaatttttccggcattcgctttttcggtattccatgctcggttctagggctttttctctctgttttcgccccgcgcctacataaacgcccccccaaagcgacccggtaaaaaatacgataggcggaatcagcgagtgccgaaacgtaaaattttcattgattttcccaggctaatttagctgtataaatagtcggcccgtgcccaaatctataaataagcccgacaaatgtgtttcatcttcaagtagtccagaatcgtaggctatcttctgtaggcaatcattaagctaaacacgtaacattcactcaggttgaaaagaaaaacaactattaactactactgtaataccacaaaaaaaaaaaacaataatatattaaggaaaaaacgatgacgccagagaaatcggttatggcctacgtcaatcatttgattgtcagcaatttttcatatttctgggacgagatcgatgggtatctgtactacctgggaggcactttgggaacattaaccctaggaagcctggcagctagtgtggcatactactttgcaacgaggcccgttccggaacgaccgttagtgcctctggagaaccaatcgccattgctagagggtccagaacaaatacacgtctccaagttctacaaggagtcgaagaacggcaagttcgtgtcctacatcacagagaatgtccgcaccctgtaccagacgttccgcgagggcgcctacgcctccaacaatggaccatgtcttggctggcgcgagaccctgacctccccctaccagtggatcaactacgacgaggccctgctgcgtgccaagaactttggagccggaatgctggcgctaggagccaggccaaagcagttgattgggatctactcgcagaaccgcccggaatggatcctgtacgagcagggctgctactccttctccttggtggtggtgccgctgtacgacaccctgggccccgatgcctgcgccttcatcatacgccagacggatatgcaggtggtgattgtggaggacgatggcaaggcggccatgctgttggagaaggcgccgcgcagtctgaagatcatagtggctatcaagcccatccggcagacgaccctggagcgggcacgcagccgaggcatacagatattctcatttatcgatgtggagaaactaggtgccaaaggcaaccatccggaggtgccgccgacggcggaggatctttgcacggtgtgctacacgtccgggacgacgggcaatccgaagggcgtgatgctcacccacggcaacgtggtggccggcgtctgttctgtgatcctgcagatgggcgaccatcgcatccgggcgggcgatgtgatggtgtcattcctgcccctggcccacatgttcgagcgttgctgcgagaatggaatgtactatgtgggcggctgtgtgggcttctattccggcgacatcaaggaattaaccaatgacctcaagatgctgaaaccaaccgtaatgccggcagtgcctcgtcttttgaaccgcgtctacgacaagattcagaatgatatctcagcgtctggactgaagaggggtctcttcaatatggctatgcgagcgaaggagaaggagatcgccaggggtgtcctgcggaggaacggctgctgggacaagttggtcttcaagaaggtgcatcaggcctttggcggaaatcttcgtttaatggtcgtgggctccgccccattggccggaaatgtcctgaccttcatgcgctgtgctctgggctgcctggttctcgagggatatggccaaacggagtgcacgggggccattacccttaccgttcagggagatcatgtgcccaaccatgtgggaccacccgtgtcctgcaatgctgtgaaactggtggatgtgccggagatggagtactttgccaatcaaaatactggcgaggtgtgtgtgcgcggatcgaatgtgttccatggttactataaggatcccgaaaagacggcggaggccatcgattcggagggctggcatcatacgggcgatgtgggcatgtggctgccaaatggaacactacggatcatcgatcgccgcaagcacatcttcaagcttagccagggcgagtacatagtgcccgagaagatcgagaatatctacacgctcagtcaatacgtaaatcaagtttatgtctatggagagagcttaaagagctgcattatcgctgttgttgtacctgataccgatgtactgaagcaatgggccacggagaacaatgtacgcggcacactctccgtcctgtgcaataataagaatgtcaaggaactgatcatgaacgacatgctcaactggggcaagcagagtggactcaagtcattcgaacaggttaaagatatctatctgcatccggatcccttctcggtgcaaaacggactgctgacgcccacattcaaagccaagagaccgcagcttaagagctattttaagccccagctggaggatatgtataaacacctggattaaagcaatgcctatatgcatacatagacatcaacaacgaatcgaactcaagaaactgggaagcattcattcaaatatgcctataccattttaaactgatgataacaaagactacagatacagatacgaaagcgaactgtctaattttgtagtatcgtcaattcttagcacgtaagaggagcgcaagatacaccagatacagatacaatacacataaaatatacacaacttcaaactgacaaggag

SEQ ID NO: 7584 - protein, 704 aa, DROSOPHILA
MTPEKSVMAYVNHLIVSNFSYFWDEIDGYLYYLGGTLGTLTLGSLAASVAYYFATRPVPERPLVPLENQSPLLEGPEQIHVSKFYKESKNGKFVSYITENVRTLYQTFREGAYASNNGPCLGWRETLTSPYQWINYDEALLRAKNFGAGMLALGARPKQLIGIYSQNRPEWILYEQGCYSFSLVVVPLYDTLGPDACAFIIRQTDMQVVIVEDDGKAAMLLEKAPRSLKIIVAIKPIRQTTLERARSRGIQIFSFIDVEKLGAKGNHPEVPPTAEDLCTVCYTSGTTGNPKGVMLTHGNVVAGVCSVILQMGDHRIRAGDVMVSFLPLAHMFERCCENGMYYVGGCVGFYSGDIKELTNDLKMLKPTVMPAVPRLLNRVYDKIQNDISASGLKRGLFNMAMRAKEKEIARGVLRRNGCWDKLVFKKVHQAFGGNLRLMVVGSAPLAGNVLTFMRCALGCLVLEGYGQTECTGAITLTVQGDHVPNHVGPPVSCNAVKLVDVPEMEYFANQNTGEVCVRGSNVFHGYYKDPEKTAEAIDSEGWHHTGDVGMWLPNGTLRIIDRRKHIFKLSQGEYIVPEKIENIYTLSQYVNQVYVYGESLKSCIIAVVVPDTDVLKQWATENNVRGTLSVLCNNKNVKELIMNDMLNWGKQSGLKSFEQVKDIYLHPDPFSVQNGLLTPTFKAKRPQLKSYFKPQLEDMYKHLD

SEQ ID NO: 7585 - DNA, 3303 bp, DROSOPHILA
cacatggaaagtgcagcaaaactatatgcctttcatttcggtttagtgcacaaatcggcgagtcctgctgccacaagaatgaatcattcgaatcttttcgattttgtcgaaagatatgatatgtgagataaataatatgctgatgcacaaccacacacacactcgcactcacgctcacgcacacccgcccccacacacacgaacgaacgaggcttcactgtttatgtttattaatatattccagacacgcggatccatagaagaaaatcatacatattcgaattcacggcggcgacgacagcaaaatgaaaaaaaatcgaaaacgaaccgaaaactgaaaagcagaacacacgcgttggtcctattcgttcctttgtttttgatatcgtatcgcgaggggctaagaactataactatatccgcattatataaccgcactggtagatccgggcatggctgcaccgtggggcacgtaattgcacccgtcacttacacttttcctcgccagtcgcttggatctcgcgtccgagtcgtttggggatttgttttttaaaacgcgacgttcgttcctcggttctcgacggctataaacagtgtggccgcgccgggagtgcaactataagccgatggtgtgaccatggcgggaaagtggtattatgccgtgtgccatatgggcaaatataccaaaacaataaatagcaattcaaataatttaatatataacatgtttacttaaaaactaagctttttacctaaataagtataataaagatataataaagtaaaatattattttgttatatataatattacctgtgaaaaaattttaaaaacgtcaatttgttttatacttctttatttctttcatttatataaagaattccatgtttaatttattcacattgaaacatattcagcataacagttttgacccactgtaaacctcccttttcaatactaattctaacgtcaaccattgttatcgataacagctaatttgctgatcgctctcgttcgcataaaataaacacttttccggcattttaaaatggtaagtagatatttaacgaactgtgccttttatacatcccttttttccgctagttttctgtccttcataaagaggaaaatgcgcacgacagtcagctatgggcgtgcacctggggacgcgacactgcggcctcagatccggatgacgcggtcgtggagcccgaggagaatccctttgatttcgataagaaggaggcccgcccgaaggatttcttggtcaccggcggactggatgacttggtaaaggtgtgggacttgcaggaggacaacaccctaaagttgcgccacaaactaaaaggacatgccctgggagttgtttctgtggccgtcagttccgatggacagagtaggttgaaagattctgtacttgggagatagagaaatggacatcaattaatggtgccgccttccttccagccattgccagtagttctctggactccaccatgtgtttgtgggatgcccgttcgggcgacaagaaacacctacttagctttgggcctgttgatctctggacggtgcaattttcaccctgcaacaaatatgtgatatccggactgaacgacggcaaaatctccatgtacagtgtggaaaccggaaaggcagagcagacattggatgcccaaaatgggaaatacacgcttagcattgcctacgtaagctttatctggtaaataacccattttgagaatcctatagctgtattattctagagtcccgatggcaagtacattgccagtggagccatcgatggtatcattaccattttcgatgtggccgcgggcaaggtagtgcaaacattggaaggacacgcgatgccagtgcgtagcctttgcttttctccgaactcgcagctgctgctcactgcctcagatgatggtcacatgaagctttatgatgtgtaagtggcttaacacctatgacattttcaggcactactatctcctcgttttagaacccactccgacgttgtgggcaccctatctgggcacgcatcttgggtgctgtgcgtggcattctccgaggacggcaaacactttgccagctcctccagtgataacagcgtgaaaatatgggacacctcggaacgcaagtgcctgcacacgttcgccgagcacacagatcaggtgtggggcgtccgatatagccccggaaacgacaaggtggcctctgcttctgaggacaagtccctgaacatatactactgtccgcccaatgccattgtttgatttcatacaatagagcgtaggtttaaaacaaagaacaagaatgatttatttacggattaccctccgagctcgatttaacccgcagaaggggctgcgtggcttgagttagcatcgtgtctttgtacttctggtcgggtatgtacatattaaaagttttaaagtagtgcagtatgttttctaaaaagggaaaagttagactgaggtattctgagaacacattttcttttaggtttaccaactagaggctccttaagcttgtactcattggctatcttcttggctggccaggattcaggatccaactggtggtcattgatgaacttaagcgcctggcgcagtgtgcaatgaccggggctaatgcggttgggctccagatatccgtactcaaaatcatccggcgttttgcgttccaggggcagtggtcgctgttccacattgtccgccgccgcctcagctgcctggcgctcctgcactcgcttgatctagggaacatatagcaggttccatattagtattggtcgaaagtaccttctaaggtattaacccacaaatcgatcctgcgaggttacataaacgtctttcaatcgtccgtccaagctggagtctttcatattgagcttgtccacgaacttgggatccactgtaatggggaaaatgaagcattacactccaagggtgtttaattttacttacattccaaggtgcgctccatgtctctcaaattcgagtcaaatttgggcgccggcgttggcttctcgcgctcgaggacgcgatgtgcacgattctcgacattgaagcgattggcccggcgggcaaccattgaaaccacctgacccatgccaaaaatatattatgttttatttatgttgctaataattcacgtgaaatcgagaaaaaccaaaagaattataaaagcatggccagctgttatatgttttcgaatcagctgttcgttatgctatcgataagttattgggttttgcaacagttgactggccaattaccgggtagtgttgttagcaat

SEQ ID NO: 7586 - DNA, 1068 bp, DROSOPHILA
ctgatcgctctcgttcgcataaaataaacacttttccggcattttaaaatgttttctgtccttcataaagaggaaaatgcgcacgacagtcagctatgggcgtgcacctggggacgcgacactgcggcctcagatccggatgacgcggtcgtggagcccgaggagaatccctttgatttcgataagaaggaggcccgcccgaaggatttcttggtcaccggcggactggatgacttggtaaaggtgtgggacttgcaggaggacaacaccctaaagttgcgccacaaactaaaaggacatgccctgggagttgtttctgtggccgtcagttccgatggacagaccattgccagtagttctctggactccaccatgtgtttgtgggatgcccgttcgggcgacaagaaacacctacttagctttgggcctgttgatctctggacggtgcaattttcaccctgcaacaaatatgtgatatccggactgaacgacggcaaaatctccatgtacagtgtggaaaccggaaaggcagagcagacattggatgcccaaaatgggaaatacacgcttagcattgcctacagtcccgatggcaagtacattgccagtggagccatcgatggtatcattaccattttcgatgtggccgcgggcaaggtagtgcaaacattggaaggacacgcgatgccagtgcgtagcctttgcttttctccgaactcgcagctgctgctcactgcctcagatgatggtcacatgaagctttatgatgtaacccactccgacgttgtgggcaccctatctgggcacgcatcttgggtgctgtgcgtggcattctccgaggacggcaaacactttgccagctcctccagtgataacagcgtgaaaatatgggacacctcggaacgcaagtgcctgcacacgttcgccgagcacacagatcaggtgtggggcgtccgatatagccccggaaacgacaaggtggcctctgcttctgaggacaagtccctgaacatatactactgtccgcccaatgccattgtttgatttcatacaatagagcgtaggttt

SEQ ID NO: 7587 - protein, 331 aa, DROSOPHILA
MFSVLHKEENAHDSQLWACTWGRDTAASDPDDAVVEPEENPFDFDKKEARPKDFLVTGGLDDLVKVWDLQEDNTLKLRHKLKGHALGVVSVAVSSDGQTIASSSLDSTMCLWDARSGDKKHLLSFGPVDLWTVQFSPCNKYVISGLNDGKISMYSVETGKAEQTLDAQNGKYTLSIAYSPDGKYIASGAIDGIITIFDVAAGKVVQTLEGHAMPVRSLCFSPNSQLLLTASDDGHMKLYDVTHSDVVGTLSGHASWVLCVAFSEDGKHFASSSSDNSVKIWDTSERKCLHTFAEHTDQVWGVRYSPGNDKVASASEDKSLNIYYCPPNAIV

SEQ ID NO: 7588 - DNA, 37322 bp, DROSOPHILA
aatttctacataccgctatgacggcactaaagcgccattcggcgaaatggggaaactactcatgcaagcggctcggagcccggctaacgttatttgttcaccaaccgatctcgcaacgctgcgaaagagcgcgctgccaaaatggctccccgccatacggtatctttttcttgcaccgacgcggtcacactgccgatttgaaacagatcgcttttttccagtggacgaaacggttgtgaaagcggacgagcgttaggcagacgaacctggaaagcgcagagcacagttctcaacatttattttttttttgaatgtgtgtgcaacaacgcacgtaaaatcgcgctgccaacaggatatacaaacaaatcaattacacagcaagcaaatgcaatgaaatgaaaaggatggccccagcgggaaagccgttcagcaagagcaaggagtgcctgtcgcagggatagcaacgagagagcgacacagagagcgagagagagagagggagagaaacaaggattttcgaaaagtgtatctacctcgagtcgcgcgtgtgtgagagtgagacgaaagccgagtgcaagaagcgcaagaggaagagagcaatacgcaagcgtgcggcgtcggtttgaatttgaatttgtggctcgatcctcgcgaagagaaaagcaagcaaaagatacacgaaaagcgttctttttttgccactttttttttatgtttcaaaacggaaaatgtcgccgtcgtcgggagagtgcctcctcttagtttatcaaataaagctttaaagtctgaagttcaaaactataaaaaacaaaaaaaaaaacaaaaaaacaacaaacgcgctaaaacaaaaaattgcttaaactactgagactagcatactaaacctaaactcgcagttaaacatatcctcaaagagagaccaaagaggagcgctaaagaaaccgagaagcgagtagaggtgaaaaactggaaaagtggttaactggaaaactggattacaatgcaatcgcagcgcagccgacgtcgcagtcgcgcaccaaacacttggatttgtttttggattaacaaaatgcacgccgttgcgtcgctgccggcgtcgctgcctctgctgctgttgacgctggcgtttgcgaatttgccaaacaccgttcgcggaactggtgagtaaagcggagacgccgatcagaacaactaggcggggggagggcagggtgacaggcggggtcgcccgaaaatagggtgggtgcacaaactggaattccaggaggctcaaaacgttccaaaacgcttgccaaagaacggttttttacagaaccaaaactatgagataagatgatcttgtatagctgaaagatgtggatctcaactaatagtactgaatcgcataattgtttggtcttagatgtcagttttaaatggagcatacttagtatgaaacaactaaaattgcaattacaaaatatacatacatttgcattggactagttccgcttaaacccgttggatagatcgctacattgcatagctaggaaatgttggtctataaaatcggatgcattcgcaacacatataagtgactgagcaaacccatgcaactgtaatccaaaaaggaagtgatgctacttaatctgcttaataagcctataggattgttgcaaatcctaccttaaagaatttcactttaaacgcaatcgtcggaatccgctcccaaatgcgttctctgtgtttctccattcccttttcgatcctcttcgtttgtctcccttttgggcagctcctcttcgctcttcgccttccttttcatggcttgtattcaccgcgcttccttttgcgctgtcttccttggcttcgctttgttgtcgcttttcggacaggtggtcgtttttttttcctctctctttctctctctctctctccttgttgtctcgctgatctcgttctcgctctcgctcgatcgctgtcgctgtctcgctctccgccgactgcgcatgctctctcagatttggaaacccaccttttcgaaacaagaaagaccgtttttaccgtcggcaaaaggcgagtttttccattcccctagcactctaggcactctttcctttgtgttttctcactgcgctatttgctcgctagtagtgagtggccaacttcctttccagctttggaagcgaactctcctcctccacacgctgtgttgtgccgcatgcacatggggcttacttgggtatttgcatatggagcggtcgttgtctaatcactgaacaaacaccgaatcgtatcggatcggatcggatcggttgtaggtgtacttagggtcgattgccccagtaaaatgtcaactttccatggaactcgaaatctcttcgacggaattctcggctcaacgatgagaaagtatggggaatgcagctcgatatcatagtattttgaaacaaatttgataatgtcagagaattttttgttgtttcattattcgaaaatctatcgaaatccatcaatccatcaaacgtttaaaagcaattaaatgatcattactagaaatttgatccctgagcactgggcaactttattattacgcactccatgatctctgctattttttttatattttttaacagctgcaaccgaagagcgttgaactattatgtttataacttttacctgggcatttcctgagctcgagtttccgcctcctaaactctttttttttctggctttattagccatgggtaatcgtgtgatctttgcagttttagccaaaggaagttgtagtaaaagttaaataaacggtataaaaaagtatacaaatgcatatgcatataaaggtgaaaaaaatgctgaaagtagtaataataagagtgttaattgatgccaggatatattgcaaaaacaaaaagggcatcctttgcattcagttcacttcattctactactgcgctaagaaaaaagtgttcgaagatggaaaaaaaaaaccaaaaaaaaaaacaaaaatctctcgaatcttcatgtacatttttgtacctattaagttctcacaaatttacgccccattagctccaatccaagtttgttcaactttgtgcgatcgaacgcctgcatttagccacaaatttagggtattatttttttgcaggtttaatgtggcacgtaacggtttcgagaaacgagaaccagaaccaaccaccgcattcgatttcatcatatatgtacacaaccaggcgcatatagaaagaatgtagttggaataaacgacagctgggctcctggagccaaaagtgaaacagcagcaggagaagcaggagcagcaggagcaacccctgagtcctggcatattgcacatgcgcgtcctttttgctgtttgttcaaagatcaaattacgatatgctatggcatggcatcgcacggcatggtgttgttgtttgtatcgtgagcgagaagggaaatgagcgggcatagagtagagatacttttgtatctgcgcgctctctcggctatttcctgtatatcctgtgcgcaccccaaaaaccaaagaagtaaaaaccgaaaacacatttcttgactttcgtaagtcacgcacacggcggatccctaattagccctcgcctagacttcaagtcaatataaatatactacataaagtactatatatgcatgtacatatatacgtaagtatgtatgtagctctggcgcatgaagtcggcatgtatggcgatgcataaccaacatgcccatggttatggatcgtaaagtgtgcactttatggtcggaatggatcatccacataaagttgcaaccaaatttaatggaaataaaaatttaagaggggaaaatggagggagggcacttaaattgaaggatcaactagagatgagggtagcaatacctagatttatgttcttaaaaaggaagagtacatgaagtcaaaactaggcaacattaagtaaataccataaataccatacactatacatttgaataaataatgcattaaatgatcattaaaagatgtgagaagcaattggtaagaatgcttcagttagtgagtaaaaccaaggtagtcattaataaccaactcaaattgaattcgaatctcaatacctcaattccatcaatataaataactttgtactgtatgtctgagatgcatttataacacctaaagcaaaaaaccaggccaattcccacgaatgcaaacccatttccaaggacgcggcacttaaaaacgcagattattgtgaaagtctctcatatttgggcgtctcaattaatttgagacaaccacttatcgaccatttactgtcgcatttattaattaatcgacgccgccgacgatggccaacagggacaaaaaaaaaaaaccaggagtatcacttgaaaatataactttcccatcagtaacttaagaagacttaattaaaaaacggtactcgtatatgaaatcggctaatttctcaagtgttaaatctgctgttactccttgcctttcgcttggccaaaataaaaaaaaaaacaaaacctgtaagtgataaagtaaacttcaaaaaaaaaaataaaaaagaaaacaaagtaaagcagaagatgtcgaggaatcttgttgcctggtcacttgatatggcattggtggatatgcggcagagcagttccgttccgtttcgttccagacgataccgatgctcgatgctcgatcctgtttttcgggacacacctttggaaaccagaattggcaaggctcttcaggtagaatttcatttggcaatgtgcaatgtcttcttctcggtaatctttgctctccggaaatccacaatgtttttgcgctctgtcttggctgatatttgttatttgttcccatagtcattgcataaacatgaaaatcattttcccagcccatctctctctctctctctctctttctctctagtttatatatgttgacaactactttccaagttttgtcttgggaaaatgcctcaaatggccaacgaatgaattgaggttttcttctctacagatatgtatgtactgttttgctggccaaactaattatgaaaacagtcctcacatgtgtcggctgcaattaaatccgtttagaaaaatccatggattgtatggattctaaatctcagctcgtcttggcttggctcgaactgacttaacttgacttggctctctacactacactctacactgctcttctcttctcggcttttattgacttttaatgatggccaggcgaattagtgcgccctgacttactctttctgccatggccagtttaatgagttttctttatggccaacacatgtacattttcgagtcggtagatacaggtactcacacacagatagtattcgagtcaagatacaagatacacacaaacagagacgacgaacgcactgaccgaacaagtttttagtttttttttttttttccttctgttttcttgggttttcttggctggtctctttggtcttctctcctttgtgtggcttgttcttgaagtatctgagtggtacaacaaaacaaaaaaaaaggctgacaacctcagaagaacccctcctttcgacccagccccgccccttcgcccccgcccctgcccccttctaagaaacacacaccaacagcaatttttatagatattacccaaagtgtcttgtttggtttggttttggctttgggttttggctttggtttctcttcttcgtttttggcccggtctctttttgtcttccaggcttttgggcttttaggctgcgcccctgccacgccccctagaaatccccctatgttgcccatgcgatttactccgatactcttatacagacagatctctcatatggtcggtctttgaaaagtggaaaagcggtagaaaaatatcgatcttaataatagtaaatatgaaaatataataaaaaaaacttaattttcctcaatactttctcgtgtattattgttataagaatataaaacttgaaaatattttataattatatcagtaccttaataacaataagaataattcaaaaataatttgaaaattgctgttgtatgctaagtcgaatgaaatttcgtttcgatgccctggtctctgtcattaaagaaatttacgatttcctgggcaaacgcaatcagttggcatagaaaaacttcatgttcttggccaggccgactctggcctatccctttctcgttctattgctcgttatatagccgtctcttttccgtcttctatcctgttttttggaggaggcaatgaaaaatgacaatcatcattatatacacttgagcggatcgacgacagtcgccgatcgtgtgctcgtcgtcttctcaagttgaaactgaaattgctacgactttgtcgtctcttcctacttctccgccgacatctccttgtctttttcagtctccgtctccatctttatatttttctcttcacatgcgtgtttgagaatcatctgggggagagggagaatagagatcggtccaagctcaagtgagtggtttgactttaagagatgcatagatactttggcttgcataataataataataataatagtaatgatcgctggtcgaaggaagaagccatgcagaaagatacgggacgatatgatggcgaatgatactctttcatggtggtcttgggagtcttagaatcattacagataccctcactcaaaacataagcaaagataaaagaattaattgcaaatttgacagatatgggttatataactataaattggaaaactattattgctcacgtacagctaaaggttagatacattctaaaggtaactggataccctgatagatccttaagataaataaaaggcccctttgaaactgcaggatacacaaacactgagataaacacatgcttcaagctgccacttgaaaatgtatctcaaatttcaagcgtctgacactcgctggctctataaagtacttaagatgagaatcttgaaggaaatatgtaagaaggatgtctctgttttggcttgcgattcccaaacgaacgatttgaagttttaactataaatataagataactaagtttcgattttaggtacatatgtacatatctggaatttaaagtccagtttttttatggctgcatgattgttagcaactgcgttccacttcatctgaacgctcacttagcattgattagtagccatatctcgcggatgcatctttctctttgactttttcccttagtgctggcaacctgcgcgacatttgcataaggccatttgctagggcgccagaagaaccggcgttccttcgttgacaaattagcagaggtggaaagtaaatatgaattgaagactctggccttttttttttctttctttcatccatttcagttttgtcgttttcggaactttaactaaacattcacacgctgctttgttgtctgccggaagtgttaaatgcttcagtttatttaaagtacatatagacaagaggagtaaaagagagagaggagactccatacaatatcactcatatgccattatttttatggatttccgagcaacaaccctttttgtttgtgcgcctgcgcggccttttttcagtttggcgcgcatttccttcagcctcgacctcttgaactccagctcttgctctctcactctctccctcttctcttctctctgctctctccctctctgcacgcattttatatgtttttgccccggcgagggcggattttgtcaaagtgtcgcatatgttttcaagtgcacttcaattaccaaaaatacaagaaaaaaaaaaccatatacttatgtacatgcatatagattacttacaactgcagctgtgtgtccttcctttccggagggctgtttatcactcatcctccctgccaaaacgttttccaaccccccctcttatcatgcactcaattacatcgtcgggtaggtcaattattcccataatattatctttcatttggctaagcattatgctaatcatccgagcttctcgtgtgggaaaataaagtgcgagtcgtcgtggaaaaccggcgggggaaaacggagtgatgatcatcaagtggaaacagcgctcaactgtgaaaagttttgcgtcttgtaaatgggttttttttctacttaccacacttagtttcattatcaaagacaatttcaatgttaacaatgaagttcataatatattctattaggttatattataaacaatcctgctaaacaatccgtttgaattgaacagctagcgctgtaataagtttcctgtttctttctattaacaaattatatattataatatttacaagtgaagacatcaatcagggtgcccataaaccacattcacaggcacttccccttcggttattcgcccctttttcaacgatcgtctaatccgaaatctaattccaacatatgttgcaatagcaatatcgtagaccgcaaaaaccacatacttcctcccccatgttgccccaaaattatacgaatgaatggcttaggctgtggcagctgtggcggggaggggcgggcattggagttgtattttctatatttttgtccgattttttctcgttttttccctttttttttttgctatcgccgacgacagtggcctattaatctatcagaagcttcagacgcttcggaccaaacaaacaaaaggggttagcagagatagagatagagggccgaaagagatggaggcagatggagtgacaaagacgggtagagtgggttggaaagagagagagtgagagaggggagcgagccaaggcaaaattccatgccacataacccaaaaagacgaaaagaaagagcgcgacgttgtgtgtttcgttgacgttcggttcccacactcgtttattcgttttacgacttgccccgccgctccacgccccaacgcccctgagtgccactccccctttttccagccgctcgcgccccttttgctactcgattcaccaacgatctcggctacttttttcattaacactttacaatctttccgcattttgttgcctgctgctgttgttacaacgcctctgcaggccgttcattttccaagacgctcggcaacttgccactacacttacagccaagtccacaataatatgtatgcttttcaatttagcaacaaaaaaaaactaggattatgggtcaatgaactcctcctctcgatagcttgcacttaaatataacacaaaaaagtatacaacttgcaactaaagaagagtttaccttcaccttttaataacaaacgatcgaactttttaatgatattcgagttgctcttaattttcccgccactgtattgcttttgaccaattttctatttgccattacacatttatgtaggcaaaagtattgtttcttatttattgctggcccccgcagcaatttgtgatcattcgccgaacggacagttcccatataaaaaaataatgatcgctcgatgatcgcttcgttttctttggcagcttatcacagttgcagtttttgcgacgcaaattgtgtatgaaaatttcttttatcatcttctcgctcgccataatacacttcgaatacaaaaaaaaaaaaaaatgtgcataaatgaacgagtgtaagcctgagatcaatcgtagatggaaatacttgagagtgccgaattggtagccaaatacatgttgcgggggttaaacgatcaataagcaattaaagtaaatttatttcggcaaataacaaaagattcctttcaaagaaacgtttaggtgggccaaaaagaacagtagcttggcgattcgatgaatataattatgtatttccatttcaagttgtattgtttgtacagcacaataaaccgagatcgtttagcatagttaagctaagatcacaactactttttttttttaatcacctacacataaatttatgtgtctgatgacttgttgcatccgggctttattcaaatccaattacgaattgtggcgaaattgtcgccgaataaaaaatcatgaataaacatgaaggcagcctgagaacaaactgaatttcgataagaaagtgggcccagcgtaatggtgttatatggccgcgataaggccaaaaaaaagcatctggtcctatagtttcccacttcagttgcaagtagatagaataggattgcttatccttttgggttgcacgtggcatttttgcgcttttccgaagtgcagagaaaatctatgcttaatttaggcttttattttgttttgccgttttattagatataccaacttgctgacattcttgttgatatgttttcgttttttttatgtttttttttttttatatatatatattgtgcttagagaaaagcgtgagaaatttttggccgtggtttggctgtttttttttttttttttgtgtttgttggtgcttttcttgttttagtttggtgtggttgctttttgttttagttgtcgcagctgttgttgcttattatgctgatagcgtttgccactttttcattgtagttttttcttttcgtatgtggtaatgcgaaaaatttaaattcgataagcagcatttgtaaagaaaaaaagaaaaaaaaaatagcagagatatttcattattgtcttggcttccttttttttttgtcgttcatgtttgtttgatgtatgtaaatggtttttttttttggggtaattacaagtggttcattgatcgcttcatggcgcaaatagttgcttgacaatatttctcagttggtaagggatatttttagtaacaacttagttaaatattaaaaacgaaaaataacgtgcaacattttctttctgttttcgtgtcattttcatcgatcaatatcacagatatttgcaagtcacagtcacgcctgctttcatcgttgattgtgaacgaactttgtcgtgactttgagagatccccgcacttggccgccaaactaactatgcgaactaaaaaccgacaatctctattacacatatcgttgagcaagtttaattaggtcttaactcgatttgagccaactcaagcaattaacagctcatttgtcggtaaagaagcatctgcctaagcggcgcataaatgccggccaaaagcgattccacgttgattttacatgtgcggtggtaaatcacacgcaataaaaacccatctacaaaaagccaaaaaaaaaaaaaaaaaaaaaaccaactgaaaaactgaaaatcttttcacgctctgtcgatgaagcgttgagtgctgcccaaacatatgtgttttgccctctctgtctatcgcgccttctcgcctgccggcaaattaattaaacagagccataagcccaggccacacctcacgaacgaaaaaaaaaaaaaaaccccactaaagctaagtgatctttacctggaatgtgtataaattcaatttcagacccatttacccattccacttggccacttttgtcacacatttgtcggctaacagttagtgcgctaatatattttagtttcaatacgattttgtttatcaaaagttggaaagatatcgaatgtttgcagatttgcactatattatatatctgttggatttgtggcatttgtctatttttgcatttgtttttggtgttttttttctttctttttttttacactaattgaggtcaattagtttacaaacaaacgcgcacacacattcagcgaagacaatcaaatcaaatgcagagcaacatctgagcatgctgcaatatttttccttttgcataaatttctgcaacatttgtgcacacactggttgtgactcaatttgaagttatctcttttttttttttgcttcctcgccgctttatttatgcattgtcattagccagttaatcaggcatctatatatatatacacttatatttatatatatctttgcgatttatgccacgtcttgtccacaagccatcgatcatcaatgtttaaaggagacgcgtacggtgagcgtacacagtgtgcttacaaaattcattattcatttggtcgatcaacaaatatttggcctttataccaataaagtaaatatagttcctttgatttgaaactatattggtcggcgcacatttattcttggaaatgctcaatttgtgcactcaatttggcgctttggcttaagcctttttgcatttgatttgcaagacagtggtgtacagtggtcactcattcatattgtatgtgtgtgtgtgtgtgtatcggcgttcatatagaccccatacatatgtatatactgtcgcccccacagccgcccttatgccacgccccttttcggcagacaaagcgatttatttatctccgcctgacgttggcaatcaaaacttattgtcgtcgcctcgaaatgaaccaaatcgccctggaagaactgttttcagctgagtttttttttttttttttttttttgtattcagacctctttgcagctttgcaggaaatcgccacacgcccaattagcaaacatatatagagcacagttgggcgcaagatattagcagcgaaggtgttgaaaagcgttatgagtgcagctttaaaccaaaaaagaaaaaaaaaatcgaaagtcgctcatacaaaatatgattacattgagatgaaattaggaaaatattatttttgcacaattgaaaagtacatagcattctgagccaatctgttcataactaatttatatactgaacctgaagaggtgaagtgaaatttgcggggattgccgcttgtttgcggcttcgtttgtttaattttgtgtgccagatatttttcaatggaataagcataatttttgtgtgtgctccttcgctctttgcttctgtgtgtgtgtgtgtgtgtgtgtgtgtgtgcgagtgtgtatgtacatatgtgtaatatatgcttaataataatttgatttgattgcaaacgtttcagttttctttttcttatccaactacttttctgcagcgcttggcagttcaagtgcagtgaactttttgtctgtgattggcaacaatgatgataataatgatgaagacagtgactttgacatgccgcccgtttgcccttaaaaggcagcaacaacatacatatacatatatgtgcgatctctctctctctttcgatcttctgcaaaacagaaaagaacaagaatgttgtatgtagcatgtctgtctctttacctcttgcaaccatgtggcatgttaagtagacataaatgggcgacaagttagcatgatcttacagatatggcgtttagcttttggcatttataaagcattgataaacagaaataaactcaattgggaatgttagtagtgtgtaataactaacgataaacttttcaactttttatcctttcagataccgcgttggtggccgcttcctgcacaagtgtcggttgccagaatggcggcacatgcgttacacaactcaatggcaaaacctactgcgcgtaagtaaagtttaaattttaattttaaattgaatgcaaacatttctcatatgaacttctcatgttaaaatagttaaaatagttaatggctcaactgatattggctataaagttaacataattgatgtatttctatgtctctgtggcatttgcatatgtcaaacaagagatcattttcaaggacaatggattttgatggtgtgcttgctgtgtactctcttcttaatttaactcgaaattcgtctagacaaaagggaggaacgttgttgttgttcggccagacaaaagcgcccgcacaatcttcagtcttgcagccttcagtctgcggtctccagtctgcagttttttttttcggcctgcagtcttctctgctgcgaatcgtatcaaaacgggctcgttgtcgagcgacattcctggcaaatcggtttgaacctaaacgagagtctgggagtctctggttcgtgcctttagcccggttcgcatgattttcactcgcctcgtatctcgtatttcgtatttcgtatgtcgattttcgtattttgtttcctccgtgtgctgtctgttatttatttcagcatttttttttttttaattttttttttgtctatttctctgttgtctctgcaataaatcaaatgcggccaaaacaaacggcacgtacgcaacgcataactccgtttgagttattataaatagagagtccgttcggagagttgaagtcggtgaaacgatcgctatatccatatattttgacagactgtcgtcaacgatttttacgagtctgtgaagcgggccgaaacctacatggcataattaaaaaaaaaaaaaacacaaaaaaaaatacattgcaagaacacacaaaaagctaagatcgaattgcattccaaccagttcgaggcgaagactcatgcttcgactatttccagcgatcaactggattttatttgggttgtatattttttttttttttttttatatctggcatctgtgtttggtcagcaaagggaagaacggaaacggaatagatgtatgcagctatggcaaacgttagtaacagaaagttggcttttatgcctttttttttgttatccattagcatgtaaaaaagttaatatcggcaaatttctccaaaaactcctctcgtgttttgcgcgtctactcatttttatttgccattattgttgccttttatttaatgttcggctcaactgactcatcaaaaaaaaaaaaaaaacagaaaaaaaacaaaaaacagtttcatacatcaaaagaaatttccgccgtaaaagggggatgctgagggggcgtggctcgacccaaaagagatgctgctcattaacatgtcataaaccgcaagcgagaaatgattttttctccgcatttgtggctggctccttggccatataaatcaaactcattgttctgagatggcagagacaaaattgagacccccgtctacatgacatttgacatgagcaaaaggcacaaatagttgtgtttcgtgtggtcggatcgtttcaactcaaaactaaaaccaaactgttggcaatcaagtcaattaaacaaacaagctggcaggcggaaaagcaagcgatcgcaaagagccacataaaataagctaaggtttttcgaacgcagagaggaaagccaacaacgagagcgattccaaatcaagaaaatgtggtaaatggatcagcatggatcaaccgtaaacgatccgaggatcagttggcctgggccacaagaccgaaaaaaaaaaaacagctctaatagctcaagctcaagacaaaagttcaaagcgatcttatcgccaaatcaaaaagaaaaacaaaccaaaaaaatggcttacagaaagaggggccagcacatatacacatggcatggccattggcttgatcgtgcctttgatgatcatcgcaaaaccaaaaccaaaactaaaaccaaaaccaaggcaaggcaaggcaactaagagaaagagctaaaagcgaataagcaaagtaaaataacccacggatcccgagatccaagagtcttatatatatatatatatatataagcgaaacaagacaaaaaaaaaaaactaaactggcatctcgcagttttgggctaagagccaagcgcttttatgtaattgcccaaagatagttaaagaaagagccagccaggatcggttgacatgtgtagtctcctctggaaaagaggtggctgtcgacgaaaagctagaaaaactctgttaacaacgaacgccaagatcttgccgatcaaaaaaggcaaactgatcaggcaactgaaactgctgtgctgttttagaactcaaacaagatcaacttcaattgattgtggaagtaaatttaatgaggaagtgaactcaagagcgactaaattaacacgagatatgtaaacttttttgcagaaatacaaagctctagattggaaaaaattccatcaatttaaaagatctaacaatttctggcaacttgaattgaatggcaattaaacattatgcccagacgtatttaatcatcagaaagtgaattaaccgtcgagtgagaaaagttcgttgcctaagtcttttgttttccagacatggcatgtgtgtgtgtgtgtgcgtgtttctaaatgcccacacacaaacacacacacacaccaaaaacgttcgccgcaggggaataatttacttttttatttgaactcttggctcacacgctttgcacttgaaaatgttctttgctttctaccttttgctctttcttgttcttgttctctttcttttctttccttttcgttttatgtcttgtcttttcatttcttttcttttcttctcgaaaagtgaaaaaaaggggaaaaggggaaaaagcatttccaggctgcaattactttaattaactgatcattaagcacattggccatggggctcgatgctctatgcgctctatgctctatgtgtgctggaaatgacaatgggaaagccaacatttcatctgtgctgctgcgatgacacatttaacttgcgccagggcagccatttttcttatatacgtatgttatgtatatatatatctcttcatatatgtataggtgtacatccttcggatgttcggctaaaaacttgtttgcaacctgctctgattgcttttctgtgttacacaagctcgaaagaaacaagggttcccgtgatgaggagaccgaggcgctcgatgcccatcccatgagatcttggctgcccgaaaagcgtagcgaatatttattgtgcattccgcttgcattttacattcttcgcgagtagtagacccttttgctccctttttttttttttttttttgtatatgtatatgcagtatgttgtgctcggtttttctcgtatttttatttaattttcgtttttgcagccgaggcgttggcgtacaaaattcctttggccaggtcttgttgcctgcctctctctttggtcaaattaaaacgttttattgaaactcaattaagttgcgcattctcacgaaacgctgaagatggtagaccaagttgatgatgatggttggatggatggatggatggcgaagagaagaagcgtagaaggcataatgttaattattcgaatgtggaatgatgcattacataaatctgagctttgtcttctcataactcaaatgaaagattttcccaggcttgcatctcttaattatgcacatatggaaatacctttggctttttcttctactgccggcgacaaaacatttcaacacacctcattcatccacacaagtcgaccaatcacatatcaaaatttggttaggtttacgtttttggtaacacattgcgattttggatgggaaaaatactgtttttctttcggggaaagtctttctttttgaaaagcttcggtcagtagaacagcagaaactgtgaatcttaatgggcttatgctaccatcaaatagttacatttaaaaatactaaattgtttttttttagatagaacttcatttgcataaaacaaacaagtttacaaagcgagacaagccatcattaaaccgttttttatgttccatatcgataagatgtattccgctttattaaaccaataaaagcttaataaaatcagagttctgtatatgaaatttccaaaagagatatcaccacgttgtgcaatggaatttggtcaggtatatttcgttacctggaaactggaacctgtggaaatcatttgacggaccagtgtcagaaaatgcatttttacctgctcgtcggacaatgggaaatcaaacaaaaacccgatccgaggcatacctcgaatctctccacaaacaacagctggaaatggatgggatgggatggatgaatagatagttagatatatggaatggaaacagaacggaaagaaaatgtgttgggtgtaaaatttgagttggtgagccgccagggtcacgcatttcacttcatttcagttcgttttccactctgtcctcccttttttttttgttaccattgttcttgaacagctaagcaaatagcacagcaaatgcgctgcctgggtgaaaggaagcaatagataaaggccacgggaatcgggaatcgaggaattacatggccgagtattcgggcgtgttgcacctgcgcatggaaaaccgaacacatattttcacgtgaaaaacacggctcagcaaaagccgagtgcatgtaatgtgagaagtgtgctctcggtagcctaatattcgcccctcttctcgctactgatcctcccttcatatggttaaattcacatcatattatatcgtatttttggcgagttttcgtttgaagaaatcagattggcacaagcacaagtcgcactttaaagactctaaaaataaataaataaataatgtgtataatgatacagttgttcgagttggaaaaccataaacatgggaatcccaagcaaaaaaaaaatatatatatatatatagatttaatgagatcaaagcttggtagtaaaaacccagtttgataagaaaacatttacaaagtgtgtctttcatgtaatattccaattgacagcaaaacccattcattcaaattgatcaagttgaactaattgatgtagtcttatcggcaaattaaacaaatggcacatcatacagcaaacgactttggaatctttgaagagtgtctcgggattatttgtgcgttgataagcagtttatttgttgtccgtcaaatcccactccacactccacactccacttactccagcgatcctgtgataatgtgataatgtgctgagatcagcagaaagctgaatgtgcatatatacgaaaaggtatatataatgtgaatgtgactttttctttggcgtatgtactgtacacacaaacggaatttgaaaacgatgaatcaagtttggaaactagcttttattcacagaccaaatgctagtgaaacaaatttgggtttatatatttaagatatagcagtgcacgaggcgtgtgaattgcactagggaaattaaacactcgccaaaagataaacgcagagtcgcagaggagttgtcgctcgatctctgtggaagccatatatagccatataacagatgaatgatcatcgggcgatgacattaaatcatttgcttacaagccataagtcctatggccaataacaacgccgcccccccacccccctacctcatctaggccagaaattcataatccattcgatacgagctgctgtggttacccattcagtcgagcgatcgtgagaagcgaatataaatatctatgtatatatagatagatgtattatctatgcatatttcatatattcacttcatgccgtagttatgattgtgaacaatttctgtcccgaacgctgaccgcaaattgagttggttggcaacggagatacggatgcagagatgcagatacaatgattcgatacaattggtagatagattgccagcaaaattttgtagaatacttttagattcgaataaggtatattaacaatccgtttcttgttttatttaaaattcgatttgattgcagttcgccgcttccttcacgtgacagaaggcgggggtgactcattgcctttttggccaactttacaaaggaggcttgaaacggagcaaggggtatggggggtttggattggggaacaggagataaagccagcagcacacacacacacacacacacacacacacaacaacaacacacccagtggctgccttggtttatttgccaatgcgagtcacgttttctgctagccttctctttctccccctctctaaaaaacaagttagcaagcaaccacttggagctcgaactgaaaactcggcttggcctgtgtataatttatattacattaatttttccatccaacatttactgcccccacctccttgggcagcagcaaaaaagctgacacctcatttgaatgggccttcctcctcctcctctcccccccccccctgctactttttcgtcttctccaaaccaagcatcatcgattgtattttagccaggtcttatcagtgggctaatatcggctaaatactgcagtcactgcaaaggaaagaagttaagctcagattatttgaaagcattcaacttttggtatacgtcgtatatatgcttgtgtttttaggtaattttttcaagtgtatgctatgtatgcttttcagccactctctaaattctcgcttaaaaatttgcaagctgtcctcgattgcgatcgacagactttgaggttaggcagggcctccaaaggggattgctacaaattaatgctaaatctaaagcattttcacacacttgtaacgggaagcagcagcagcagcagcatcggcaaaaaaaaaaagaagtgattcgaaaaagaaaagcggtttttcctcgcctgctggccggaccaaacagcagcatctcatcccagcagcttctccttacctccatcgcttttcaggttggtcagcagccgccttaatgattattcattgcttgttgccgctgcttgttcggtatgttggttgctgccgtgctgcctgatgttgctgttgctgttgctgttggtattgccactgcaactgcaactgcaacagcagcaatgcgtgtaattttctcattgcagccgatgaagaagcagcagcaagcggcggcggcggcgcagcaaaaaatttaatatgcaatcaagatcgcgcacaaattaccgtacataaaaattgttttctcaagggaaaagtaacaacaagcgggcataatgttgtcgtcaagcagcagcaacaacgtcgcgtaaaaagagagttgttttcaatgggaagagagcagatattgttccatcaaccaatttgtagtattttttcctttttttgtatttatgccagaaaatattgcttgtgagaaaataagaaaaagaacagggattatattagaaaaataattaaatatacatatgcgtccagttcaataggtttagcagatcaacttgtccaagtccaggcatgtgaaagtgttcgaaggagcagagctcgagcggaaatgaggctactttgtcagctttaacactttggtgtcgtttgggggctgggatttatcaggcggcgcgaatctggctcctgactttggtcaactaagccgacaagtcgataaactagccaacgatatggatatgtgtgtaaatcactgcggcaaaaatcattatcgtaatccagtgggaatgtggtgcacgttgaagttttctgcaccggcgccactctgcgattttttttttttaagtgtaaataatatgtgtctgctgctggctgcagctcattgctcccattcaaattggcacctgcaaccccattttaatggcaaacccgctaatccgcatctatctgtatcttttccagatgcgattcgcactatgtcggcgactactgtgaacaccgcaatccgtgcaattcgatgcgttgccaaaatggtggcacctgtcaggtgacctttcgcaacggccgtccgggcatctcgtgcaagtgtcctttgggcttcgacgagtccctgtgcgaaattgcggtaccgaatgcctgcgatcatgtgacctgcctcaatggaggcacctgtcagctaaagacactggaggagtacacgtgtgcgtgtgccaatggctatacaggtgagttatctgccacgaaaatgtagcatcaggaaactaatcaccactgctaacaacactctatccacaggtgaacgatgcgagacgaagaatctgtgcgcaagttctccctgccggaatggagccacctgcaccgctttggccggaagcagcagcttcacctgctcctgtccgccgggcttcaccggtgacacctgttcctatgacatcgaggagtgccagtcgaatccgtgcaaatacggcggcacatgtgtcaacacccacggatcttaccagtgagtaccacgctccttgacatcgattaagaataaaaaataaaaaaacttgttaatatattgtcgtttaacccatcgattacacattgaaaacatcgtttttcgaacaaaacaaatcggtgtggacaacgcattcgaatccgccttgttgattatcaatcgaagcgccgattgtcaataaatcgaattgtcagcggatgtgataactcaacttccctgctgacaagtgcaaattgttttctctgttcgacaaaagatcaaacacgtctgattctgcagcgttttttgcaaaaaccacaaaaaaatcaccgaaatcgataacaaatcatcgctgcgaaacgattagcatatttatctaaagcttggccgctggctggctttggcttcctttaattaatggcaaatttaagagtaataatttaaaaaatctcattttatttcgtcgcgatttgcatagcttattgatattcgtttaggccaacaacaaattgccaattggccgaacaacatttccactctaattaaaacacacaaaacgcgatcgacctatagaaaatgagtcgtcgaacaaaagatctcaaatttccggcgatcttttgtctagaaagacacagcgttttacttttttttttttttttgggaactggttcaggcacgtaaattaaattacttcgtttacgtttcatttttttttttccatttattttgggttttgtgtcagcttgaaatcatttgcattcttaatttgaaacacacaaattatcgaaagggtgcacggtgggaggaggaggaagggggggagggggtgtgtgtgtgggggcatttaaatatatatctttactaaaaaccatttgagcagaaaagtgcgatgtgaacatgtgtttgctgtttgttttagtttagtttgactgcggatgttttcaaagcaattagcatacacttgaaacaatttgttgaaaatgtcatttaattgaatttgaaactctcaatctcaatccaaagttgcacttcaattgagatacgttacgttttcgatccttttgtgtgtgtgccttcaaaattttacaatccaagataaatcgttacgattgcaaagtgaatgggggggcctaaatgatcttctgccactgttgaatggctggcagggcaattagcataaatttcatattcgatttggggactttatgatgtttctatgctaaaaactgctgccgcagcttagtcatgctttagtttatgaggttttaggttttttcttttttttttgtttcgtttctattttggcaaagacagcgattttatttgtcaactgtcagttggtgggaatttattaatggaaacaaactgtcgaacacaagcgaataattaagtgaataggtagataaggtattcgtgattcgttattcatgacaattggaatggaaccattgaatattaagcggtttaatgcatgaataatttttcacaagagttggtcaaaggtgaactgcatttttatttcgagtgcaatgaatgctaagtgttgctgtgtgtaaaatggcatttctttgcttctaaaatattagcttttttttgtaaataaagttcaacaatttcgtgattcataggatggcttgaaatctgcgcagatttcacttgctcattaagagccccacgcccaacaaaaaaaaaagacaaaaaagatcccgaaatacaatcttcatttgaagaagataaaaaaaaaaatttttgagagaggcccttgggctattggcctgctgaatttcacatgtcaatcaaaaatcaattttttttttcgaaatgttttttctgttctttgttaggcaccggcaattttcaattcaatgtaatttactcgaaaaccttttgggaagattgtgaacttagcaagagtgcgcggtgtttcttcgaagaattgagatccccaaagagttgtgttttggccacgctggctggctggctattgccagagctgtttcgttggtgccttttaattgtttaatttaattaaatgctctttaatggtcttaattagcgctggaaggggcgtggtcttgtccattggccttttaaggtgctcccgaggcggccaaaacacaaaaacccaaacccgttttaatggctgaaaaacatttctcaagaatcccagtgcagttggagttttggttcggcttacaaggcacaagcaaattaagtttaaatcacattattaaaaaggagaaaaacaaaaagagaacgaacagtataagaatgaaagaagaagcggcagtacgaaatcaaagtgaaccgaaacccggccataaaagagagtcccagagagagatactccactggagtttttttttttataatatatcattgtttttttttttttttttgttttgtggtaaccgaaaaaccggtcgaaactcctctaagcaatatacaagcacacacacacacacacacacacccgctcgaattaaacctctcggattgagatacaaatccagatccgaatctgaattcgaactgcaaaacggaagttgaggccagggacagattttatggtttccccggcattgcagtagcctggcagccagaccgagtttaattggtgttaacccgcgtttaattgctcctctcgcttctgttctaggtgcatgtgtcccacgggctacacgggaaaggattgcgacaccaagtacaagccctgctcgccatcgccgtgccagaatggcggaatttgccggtcgaacggtctgtcctacgagtgcaagtgccccaaaggtgagtgctagttattaagctaagctaaaaatttcataactacttcttcagtaggaaccagattaatcgagttagaaagaatgtaaattattaccaaagaatgggcacctttaatacaaattcaagttacaatagtttccacttaaaccgaaaatattggacatcaaattttattacaatataacctcttgtcgcgaactacccacatagcaaatttcatattcctaatctgaatcacagcaaagttacgatgggcatgcaatttggatattggtttggattattcctttgagccatagtccacccgaggctttgagttctcagcaatcaggcgaatgtttcgacgcttttcgatgagaacgtttcttcgttcgcctatcgataaccagttatcgatgatggtgagtcatgactcatgactggccacgagccaagtgggggaggagagaccgaaatagtcgcccacgccgaagtatctgaagtagctgccacaaggggcaaactcgtttgtcagctaagaaaaacccctttgccgactcgaccggcccagcatcattcatcagtttttgactgcaacttttacatcgcagcccattcccagtgcatttcattccattccaacgttccgggcgctttacaaatttaaagatcgtggccccatcaccgccgcctttcttctgtttcttctgcagcttccactcttcttcggcttccttggccgcttgtgttgcatgacctccttagggcgtaactgtgcttaagcatccaatccgccccgcagatcattggttaaagaattggtcggtgatgcgagtggatggaccaagaagacggggaaatgatagcctctggaattggcgcaattttcgccgagatttgctcacttgaataagcttttctgatgtttaaccgcctgggcatgaaactgttcaaaaatgaatggatgaagaatgctgggtaccaaaaaaaaaaaagcagaggaattcccctatataatcgtataatcgaagttacgataggttacccacggaatttcgagatgattcatttagttctgtttcgtttttttattttattttttttattttttttttttgagctagtctaattgtttatgcttacattttattgggttttaatttttcttcaaagggccgcttcaatctttttcctctttgtgtttgtcttagattatttttaacgttttccttgttactttttcggtgccctcaacttgttttcccagcgaacaattttagtgagttgccgcccgctgctgtgcttttatttttttttttctttattttgcataatgagtgcaactccgacctgcccctccccccttttttttacccctcccattatgtttttttttttttttttgcactcttattgcaacgtgatgtccacagggcgattcgtgtcgtgtcggtttcgttgtacgttgttcgttgtttggctgttcactggctgttgtaattcggttggaattgctcaacattagccaacagtctaagttttaaaaaaaacaacaataaaggcagagtgcgaaaaaggcgttataacatttcccagagcaataaatattgcaaattcctactttggtcacactttcacacgatcgctgcaagcatgggttaaatcaaaagcaaacttctatgcattcagcgttataattggttggagctccaaaggtctatccctagatacttcaatacccatttgtacaggatgattgtgtttttttttttaatttttttttttttcagcaaaacattcccaccgaagccaattaatacgagtccattttccgctataaatattgccaattcctgtttatagttgcctttttctttcacacgatctccggctgaaccgatctattttgcacttctcatatgcgctttctggctcattagaatttttgattggtcgcaattaaaaggccagacgacgaatatatagcgaagcttatcaaattgttttagctaccctcgctgcagtttgtgcagcttgtaaattgtcgtgtgcaattcgcatcaattggaatgaattaattgaaaattgcacacaaacacacatgtgggcaacctcacaaacacactcacacatgtgtgcttaaatgcaatgcgagcaatttacatgatgaatacgaaattacaataagaaaaaccctgaatgggtgacaattggcgacagaaggttaaagagctgatgtagaaaacggagggataagaccatcgggcccttgaggatctaagatatatgtacatacatactacatttgaaaacccagattataaaagtcggagaaatcaaaacctttaagaaatccttaaaacttttcaaaatttctaagtaaaccgaacattttaagatagcggaagtaaggttaattcgattgggttttcaaacagttttcagagttcaaagtgcggtcactaagtgactgggtgacttgaataaaatcgcagcaaatatgaaacagatgttgttgtaatgttgttatgttatgcgccatccctctctgctgggcatatttttaaatgaagggaaaaatggttaatggtgtgtggggtacacttaaaatgtcactttcatcacatttttttttttttgggttttttcctgttttcctttttctttccccctgcgatccagcaacaagttgcaattgcaaataataaaaataataataaatgccgcacacgcatgcataagcctgtgtgtgtgtgcttatgtatttgaagcccttcttttgtggcatggacacaaaaaaaaaccgaccaagcaagaaaatccattaaaagaaacaaatctcgtgggcgagagcgagagagcgatctttctaaaaaatataaaaaaaaaaaataccactgcaggcacataaaatgcgatttaattcctccaacacacacaaacaccaagaaaaataaagcgcaatgaacgaagtccaaaaactcgatcgagagagcaagaagagagcgaaaaaatgaagcataaacggcatttttccattgttgtgagagagggaaggcggcagtgcgagcgagagggcagatggcttggcgcgcatttgaccgcggcagcgacgcagccgtcgactgcggcagaggcttggggcaagatatgagaccgtgggaaagaacaacgaaagacatgacgttgctgtgtatttgtgagtggccgcatatatgctgtcacagcagcgggcacaaaagtagtgcactcacgaactatacaaaaatcccttaaaattttaccatgtattcatatcgaatagaatacaattttaactgaattcgaactaaaatgtcccttaaatttatattacaactgtttgctgttctgaaatccaagataacagcaaactttcttttatgctgccctctgttgtgcgagtgtgtttgtttgctcgattgctgatggctgtatgtgtgtgtgcgtctgcgcgctttttgccttgccttgtctgttttcacgttacactttgtttgcccattcgctccgcatgcgcagcagtgctgccagcgaaaggttcaaaaagtagccgaagcggagcaaagaaaaatgtagctgactttagggctcataattgtggccgcagttggcgggaaataagccaaaaggagcagcgctgatgcgctgccgtttatatgcgaagcgcaggcgcaacggtggagagagagagagagcgcatttgtcttgctctccttctcccccattgctctctgagaaaccaacatgtgcagcacagctgcagagcaactacagctttaagcggcccgttccttttgttcgattccttcgcttgcccgctcttccccttgtttgcattgttgttgctattattgctggtctctcaaccactttttgttgctttaaacgtttattattgaagtatttttatgatgttgccataaatctgtttatgcacttcattgcactgtgggtgcgagggagatagagcgcttagtcagcgaggggagtggggtggaagtgtgaccgttttacccagaaaactattctgttctaaaaaaaatgtaaatatttttcggaattacctattttattgaaaaactcaccttaaatatgatatgaaatagaaacttgtaaatggattttcttgaacgttcggccgccccttgaaaaatttgatagttctaaactacttgaagtggatattctagcattaaaacaaaagatcttcagtactaacggtgacattgtgatttatacccaaaggtttcgagggcaagaactgcgaacagaactacgacgattgcctgggacatctttgccagaacggaggaacctgcatcgatggcatctcggactacacctgccgctgtccaccgaacttcacgggcagattctgccaggacgatgtggacgagtgcgcccaacgggatcatccggtgtgccagaacggagccacctgtacaaacactcacggatcgtacagctgcatctgcgtgaatggctgggcgggcttggactgcagcaacaacacggatgactgcaaacaggcggcctgtttctacggagccacgtgcatcgatggcgttggcagcttctattgccagtgtacgaagggcaagacgggtctgttgtgccacctggacgatgcctgtacctcgaatccctgccatgcggacgccatttgtgacacgagtccgataaacggctcctatgcctgttcctgtgccaccggctacaagggcgtggattgttcagaggacatagatgaatgcgatcagggatcaccgtgcgaacacaatggcatatgcgtgaacacaccgggcagctacagatgcaattgctcccagggctttacgggtccgcgctgcgagacgaacatcaatgagtgcgaatcgcatccatgccagaacgagggatcttgcctggatgatccgggaacgttccgatgcgtctgtatgccaggattcacgggcacacagtgcgaaatcgacattgacgaatgccaatcgaatccctgcttgaacgatggaacttgccacgacaagatcaatggctttaaatgcagttgtgccctgggctttacgggcgcacgatgtcaaatcaatatagacgactgtcagtcgcaaccatgccggaatcgtggcatctgtcacgactctatagcgggctacagctgcgaatgtccgccgggatatacgggcaccagttgcgagatcaatatcaacgattgcgattcgaatccctgccatcggggcaagtgcatcgacgatgtgaacagtttcaagtgcctctgtgatcccggctacacgggctacatatgccagaagcagatcaacgaatgcgaatcgaatccgtgccagttcgatggccattgccaggatcgtgtgggcagctactattgtcagtgccaggcgggaaccagtggcaagaattgcgaggtcaatgtgaacgaatgccacagtaatccctgcaacaatggtgccacctgcatcgatggcatcaattcgtacaagtgccagtgtgtgcccggttttacgggtcagcactgcgagaagaacgtcgacgagtgcattagcagtccgtgtgccaacaatggtgtctgcatagatcaggtgaatggctacaagtgcgagtgtccgcgtggattctacgatgcccattgcctgagcgatgtggacgagtgcgcatcgaatccgtgcgtgaacgagggacgttgcgaggatggaatcaatgagttcatctgccactgtccgccaggatacacgggcaagcgttgtgagctggacatagacgagtgcagcagcaatccctgccagcatggtggcacctgttatgataagctcaacgccttcagttgccaatgcatgccgggctatacgggccaaaagtgcgaaacgaatattgacgactgtgtgaccaatccgtgcggaaatggaggcacctgcattgacaaggtcaacggctacaagtgcgtctgcaaagtgcccttcacgggcagggattgtgaaagcaaaatggatccctgcgccagcaatcgttgcaaaaacgaggcgaaatgcacgccaagctcgaatttcctggacttctcctgcacctgcaaactgggctatacgggtcgctattgcgatgaggacatagacgaatgctcactgagttcaccctgtcggaatggagctagctgtttgaatgttcccggatcgtataggtgcctctgcaccaagggctatgagggcagagattgcgccatcaatacggacgattgtgcctcgtttccgtgccagaacggtggaacctgtctggatgggatcggtgactatagctgcctgtgcgtggatggcttcgatggcaagcactgcgagacggacatcaatgagtgcttgagtcagccgtgccagaatggagccacgtgtagtcagtatgtgaatagctatacctgcacctgtccactcggattctccggcatcaattgtcagacgaacgatgaggattgcacggagagctcgtgcttaaacggtggcagttgcatcgatggcatcaatggctacaactgtagctgtttggctggatattccggtgccaattgtcagtacaagttgaataagtgcgattcgaatccctgtttgaacggagccacctgccacgagcaaaacaacgagtacacatgccattgtcccagtggctttacgggcaaacagtgttccgaatatgtggattggtgtggtcaatcgccgtgcgagaatggagcgacctgtagccagatgaagcatcagtttagctgcaaatgctcggcaggatggacgggtaagctgtgcgatgttcagacgatttcgtgtcaggatgcagcagatcggaagggtctgagcctgcggcagttgtgcaacaatggcacgtgcaaggattatggaaatagtcatgtgtgctactgctcccagggatacgcgggtagctattgccaaaaggagatcgacgagtgccaatcgcaaccgtgccagaatggtggaacgtgccgagatctcatcggagcctacgaatgccagtgtcgccagggatttcagggtcagaattgcgaactgaacatcgatgactgtgcaccgaatccctgccagaatggcggcacttgccacgaccgtgtgatgaactttagctgcagctgtccaccgggaacgatgggcatcatatgcgagatcaacaaggatgattgcaaaccgggagcatgccacaacaacggcagctgcatcgatcgcgttggaggcttcgagtgcgtctgtcagcccggttttgtgggtgcccgctgcgagggcgacatcaacgagtgcctaagcaatccctgttcgaatgccggcacactggactgcgtccagttggtcaataactatcactgcaactgtcgacctggacatatgggtcggcactgtgagcacaaggtggacttttgtgcccagagtccgtgccagaatggtggcaattgtaatatccgacagagtggccaccactgcatctgtaataatggattctacggtaagaactgtgagctgagtggtcaggattgtgattcgaatccctgccgtgtgggtaactgtgttgtcgcggacgagggattcggctatagatgcgagtgtccaaggggcacactgggtgagcactgcgagattgatacgctagacgaatgttcgccgaatccctgtgcccagggagctgcctgcgaggatttgctcggtgattacgaatgcctctgtccgagcaaatggaaaggcaaacgctgcgatatctatgatgccaactatccgggatggaatggcggttcgggatccggaaatgatcgctatgccgctgatttggagcaacaacgtgccatgtgcgataagcgaggttgcaccgaaaagcagggcaacggcatttgcgattccgattgcaatacgtatgcctgcaactttgatggaaacgattgctcactgggcatcaatccgtgggccaattgcacggccaacgagtgctggaacaaattcaagaacggcaaatgcaacgaggagtgcaacaatgctgcctgccactacgatggtcacgattgcgaacggaaattgaagagttgcgatagccttttcgatgcctactgccagaagcattacggcgatggtttctgcgactatggatgcaataatgcggaatgcagttgggacggactcgactgtgagaacaagacccagtcaccggttttggccgagggtgccatgtccgtggtgatgctaatgaatgtggaggcattccgcgagattcaggctcagttccttaggaatatgagccacatgctgcggacaacggtgcggttgaagaaggacgctcttggtcatgacatcattatcaattggaaggacaatgtgcgcgtgccggagatcgaggatacggactttgcgagaaaaaacaagattctgtacacccaacaggtccatcagacgggcattcaaatctatttggagattgacaatcgcaaatgcaccgaatgctttacgcacgccgttgaggcagccgaatttctggctgccacggcggccaaacatcagctgcggaacgattttcagatacacagtgttaggggcatcaagaatcccggcgatgaggacaatggtgagccgccggcgaatgtgaaatacgtaattactggcattatactggtcatcattgcattggccttctttggcatggtcttgagtacgcaaagaaagcgggcacatggcgtcacctggttcccggagggattccgtgcaccggcggcggttatgtcgcgacgtcgacgtgatccacacggccaagagatgcggaatctcaacaagcaggtggccatgcaatcgcagggtgttggccagccaggtgctcattggtccgacgatgaatcggatatgccgttgcccaagcgacagcgcagtgatcccgtttccggtgtcggtctgggcaacaatggtggctatgccagtgatcatacaatggtcagcgaatatgaggaggctgatcagcgggtctggtcgcaggcccatctggatgtggtcgatgtgcgggccataatgacaccgccggcgcatcaggatggtggcaagcacgatgtggatgcacgtggaccttgcggactgactccgctaatgattgctgccgtacgaggcggtggcctggacactggcgaggatatcgagaacaatgaggacagtactgcccaggtgatatcggatctattggcacagggagccgagttaaatgccacaatggataaaacgggcgagacatcattgcatttggcagcacgttttgctcgagcagatgccgccaagagattattggacgccggtgcggatgccaattgtcaggataacacgggcaggacaccgctgcacgctgctgtggccgccgatgccatgggtgtatttcagatattgcttaggaatagggctaccaatctaaatgctagaatgcatgacggcacaacgccactaatactggccgctcgtctagccatcgagggcatggtggaggatttgatcacagccgatgcggatattaatgcagcggataattccggcaagaccgctctccattgggcagcggcggttaacaataccgaagcggtgaacattctgctaatgcatcatgccaatcgcgatgcccaggacgataaggatgagacaccgctgtttctggccgcacgcgagggtagctatgaggcgtgcaaggcgctgttggataattttgccaatcgcgagattaccgatcacatggatcgattgccacgcgatgtggccagcgagcgactgcatcacgatattgtcaggctgctggacgagcatgtgccgcgatctccgcaaatgctgagcatgacaccgcaggcaatgatcggatccccgccgccgggtcaacagcagccgcagttgatcacacagccgacggtcatttccgccggaaatggtggcaacaatggcaatggcaatgccagcggaaagcagagcaaccaaacggccaaacagaaggcggccaagaaggccaaactaatcgagggcagtccggacaatgggctggatgccacgggcagtttgcgacgcaaggcaagttcaaaaaagacaagtgcggcctcaaaaaaggccgccaacttgaatggcctaaatccgggccagctgacggggggagtgtcgggcgtgccgggtgtaccgccaacgaattcagcggcacaagcagctgcagcggcagcggcagccgtggcggccatgtcccacgaactggagggttcgccggtgggcgtgggcatgggcgggaatctgcccagtccgtacgacaccagttcgatgtactcgaatgcgatggccgcaccgctggcgaacggcaatccgaacacgggcgccaagcagccgccgagctatgaggattgcatcaaggtaagtggagtcgactgtgagatgagtgacgatggaagtggaagtggaagtgggattgggtggttcactaaatgcactcatattacaattgcagaatgcgcaatcgatgcaatcgctgcagggcaatggtctggatatgatcaagctggataattatgcctactcgatgggctcgccatttcagcaggagctgctcaatggccaaggactcgggatgaatggtaatggccagcgaaatggagtcggtcccggcgttctgcccggcggcctatgcggaatgggcggtctgagtggagccggcaatggaaatagccacgaacagggactgagtccgccgtactcgaatcagtcgccgccgcattcggtgcagagcagcctggcgctatcgccccacgcctacttgggtgagtttcaagtctacgaagtattacaaatgggtttttatgtattaatctatttccatttacttgttacaggctcgccatcgccggccaagtcgcgacccagtctacccacctcgcccacccacattcaggcgatgaggcatgccacacagcagaagcaattcggtggcagtaatctgaatagtttgctgggcggtgccaatggcgggggcgtggtcggcggaggaggaggtggtggtggtggtgttggccaggggccacaaaactcacccgtaagcttgggaatcatctcgccgacgggcagcgatatgggcatcatgctcgccccgccccaatcctcgaagaatagtgcaataatgcaaacgatatcaccccagcaacagcagcagcagcagcaacagcaacagcagcaacatcagcagcagcaacagcagcagcaacagcagcagcagcaacagcagcagcaactcggaggcctggagttcggttcagcgggcttggacctgaatggattttgtggatctccgggtaagtggtcactcatgatggactctatggactagctaactagctaactaatcattctaccatcccaacttgcagactcatttcactcgggtcaaatgaatccgccctcgatacaaagttcaatgtccggctcatcgccgtcgaccaatatgttgtcgccgtcgtcgcagcacaatcagcaggccttctaccagtacctaacgccttcgagccaacattccggcggccatacgccgcagcatttggtccaaacgttggatagctatccgacgccctcgccggagtcacctggccactggtcctcctcgtcgccgcgatcgaattccgattggagcgagggcgttcagtcgccggcggcaaataatctttacatatccggtggccatcaggctaacaagggttccgaggccatctacatttgaccgtgatctggatgatttggtatgttgaatatcgcgcaaggataattggatggcttgccaaggataacagcaaaaggggactcttaaagagtccgcggctaagttcgatctaaaatatgctatatattgtaattctctaatctctacggattatgtattttttccaacgactctttttttttttttttgagtgtgtctataagttttagatgttagtgcgaaatacgcaattctagcggaagaagcgtcataaattgtagtaacttaaattttatttaatgcttgttgtacagtgcgcgccgatcgcatatatatatatatatatagatattgatatagatatatgtatatctactcatagatataccagttaagagctcgtcttgtggcgcattttattttattgtcgtaacgtcatcgtagcttccagtaaaaaaaaaaacaaaaaacaaaagaatcaacataaaaagatgagcaactaaacttagcgcaaattctgattggatcgattaaacgtttgtgggacaatttgtagttgtaagtgaccattatatcactaggccataagactacgctaagttttttttatcgaattctacattattaattatggccccacatgctatatataaatacataaatttcgtagttctgtaggttttgaaactgaagtgcttatataaacaaaattgttagaccgtacaccgcatcgaacctttttttttacaccaagttttttttttttattattattattattattatgactattatgtattattacatattgactaagctaaactgtaaaaagattctcataactgtttgatttaagttgacacatacaaaatacaaaaggatttgcaaaaaaaattacacaaaaatcaccaatggaaacgtataagtctaattgaaagaaagaaagaaaagaagaaaaaaaaggaaaaaaccacgaaaaagacagtaaccagccaagtttactatatatataaggacactcg

SEQ ID NO: 7589 - DNA, 8113 bp, DROSOPHILA
atgcaatcgcagcgcagccgacgtcgcagtcgcgcaccaaacacttggatttgtttttggattaacaaaatgcacgccgttgcgtcgctgccggcgtcgctgcctctgctgctgttgacgctggcgtttgcgaatttgccaaacaccgttcgcggaactgataccgcgttggtggccgcttcctgcacaagtgtcggttgccagaatggcggcacatgcgttacacaactcaatggcaaaacctactgcgcatgcgattcgcactatgtcggcgactactgtgaacaccgcaatccgtgcaattcgatgcgttgccaaaatggtggcacctgtcaggtgacctttcgcaacggccgtccgggcatctcgtgcaagtgtcctttgggcttcgacgagtccctgtgcgaaattgcggtaccgaatgcctgcgatcatgtgacctgcctcaatggaggcacctgtcagctaaagacactggaggagtacacgtgtgcgtgtgccaatggctatacaggtgaacgatgcgagacgaagaatctgtgcgcaagttctccctgccggaatggagccacctgcaccgctttggccggaagcagcagcttcacctgctcctgtccgccgggcttcaccggtgacacctgttcctatgacatcgaggagtgccagtcgaatccgtgcaaatacggcggcacatgtgtcaacacccacggatcttaccagtgcatgtgtcccacgggctacacgggaaaggattgcgacaccaagtacaagccctgctcgccatcgccgtgccagaatggcggaatttgccggtcgaacggtctgtcctacgagtgcaagtgccccaaaggtttcgagggcaagaactgcgaacagaactacgacgattgcctgggacatctttgccagaacggaggaacctgcatcgatggcatctcggactacacctgccgctgtccaccgaacttcacgggcagattctgccaggacgatgtggacgagtgcgcccaacgggatcatccggtgtgccagaacggagccacctgtacaaacactcacggatcgtacagctgcatctgcgtgaatggctgggcgggcttggactgcagcaacaacacggatgactgcaaacaggcggcctgtttctacggagccacgtgcatcgatggcgttggcagcttctattgccagtgtacgaagggcaagacgggtctgttgtgccacctggacgatgcctgtacctcgaatccctgccatgcggacgccatttgtgacacgagtccgataaacggctcctatgcctgttcctgtgccaccggctacaagggcgtggattgttcagaggacatagatgaatgcgatcagggatcaccgtgcgaacacaatggcatatgcgtgaacacaccgggcagctacagatgcaattgctcccagggctttacgggtccgcgctgcgagacgaacatcaatgagtgcgaatcgcatccatgccagaacgagggatcttgcctggatgatccgggaacgttccgatgcgtctgtatgccaggattcacgggcacacagtgcgaaatcgacattgacgaatgccaatcgaatccctgcttgaacgatggaacttgccacgacaagatcaatggctttaaatgcagttgtgccctgggctttacgggcgcacgatgtcaaatcaatatagacgactgtcagtcgcaaccatgccggaatcgtggcatctgtcacgactctatagcgggctacagctgcgaatgtccgccgggatatacgggcaccagttgcgagatcaatatcaacgattgcgattcgaatccctgccatcggggcaagtgcatcgacgatgtgaacagtttcaagtgcctctgtgatcccggctacacgggctacatatgccagaagcagatcaacgaatgcgaatcgaatccgtgccagttcgatggccattgccaggatcgtgtgggcagctactattgtcagtgccaggcgggaaccagtggcaagaattgcgaggtcaatgtgaacgaatgccacagtaatccctgcaacaatggtgccacctgcatcgatggcatcaattcgtacaagtgccagtgtgtgcccggttttacgggtcagcactgcgagaagaacgtcgacgagtgcattagcagtccgtgtgccaacaatggtgtctgcatagatcaggtgaatggctacaagtgcgagtgtccgcgtggattctacgatgcccattgcctgagcgatgtggacgagtgcgcatcgaatccgtgcgtgaacgagggacgttgcgaggatggaatcaatgagttcatctgccactgtccgccaggatacacgggcaagcgttgtgagctggacatagacgagtgcagcagcaatccctgccagcatggtggcacctgttatgataagctcaacgccttcagttgccaatgcatgccgggctatacgggccaaaagtgcgaaacgaatattgacgactgtgtgaccaatccgtgcggaaatggaggcacctgcattgacaaggtcaacggctacaagtgcgtctgcaaagtgcccttcacgggcagggattgtgaaagcaaaatggatccctgcgccagcaatcgttgcaaaaacgaggcgaaatgcacgccaagctcgaatttcctggacttctcctgcacctgcaaactgggctatacgggtcgctattgcgatgaggacatagacgaatgctcactgagttcaccctgtcggaatggagctagctgtttgaatgttcccggatcgtataggtgcctctgcaccaagggctatgagggcagagattgcgccatcaatacggacgattgtgcctcgtttccgtgccagaacggtggaacctgtctggatgggatcggtgactatagctgcctgtgcgtggatggcttcgatggcaagcactgcgagacggacatcaatgagtgcttgagtcagccgtgccagaatggagccacgtgtagtcagtatgtgaatagctatacctgcacctgtccactcggattctccggcatcaattgtcagacgaacgatgaggattgcacggagagctcgtgcttaaacggtggcagttgcatcgatggcatcaatggctacaactgtagctgtttggctggatattccggtgccaattgtcagtacaagttgaataagtgcgattcgaatccctgtttgaacggagccacctgccacgagcaaaacaacgagtacacatgccattgtcccagtggctttacgggcaaacagtgttccgaatatgtggattggtgtggtcaatcgccgtgcgagaatggagcgacctgtagccagatgaagcatcagtttagctgcaaatgctcggcaggatggacgggtaagctgtgcgatgttcagacgatttcgtgtcaggatgcagcagatcggaagggtctgagcctgcggcagttgtgcaacaatggcacgtgcaaggattatggaaatagtcatgtgtgctactgctcccagggatacgcgggtagctattgccaaaaggagatcgacgagtgccaatcgcaaccgtgccagaatggtggaacgtgccgagatctcatcggagcctacgaatgccagtgtcgccagggatttcagggtcagaattgcgaactgaacatcgatgactgtgcaccgaatccctgccagaatggcggcacttgccacgaccgtgtgatgaactttagctgcagctgtccaccgggaacgatgggcatcatatgcgagatcaacaaggatgattgcaaaccgggagcatgccacaacaacggcagctgcatcgatcgcgttggaggcttcgagtgcgtctgtcagcccggttttgtgggtgcccgctgcgagggcgacatcaacgagtgcctaagcaatccctgttcgaatgccggcacactggactgcgtccagttggtcaataactatcactgcaactgtcgacctggacatatgggtcggcactgtgagcacaaggtggacttttgtgcccagagtccgtgccagaatggtggcaattgtaatatccgacagagtggccaccactgcatctgtaataatggattctacggtaagaactgtgagctgagtggtcaggattgtgattcgaatccctgccgtgtgggtaactgtgttgtcgcggacgagggattcggctatagatgcgagtgtccaaggggcacactgggtgagcactgcgagattgatacgctagacgaatgttcgccgaatccctgtgcccagggagctgcctgcgaggatttgctcggtgattacgaatgcctctgtccgagcaaatggaaaggcaaacgctgcgatatctatgatgccaactatccgggatggaatggcggttcgggatccggaaatgatcgctatgccgctgatttggagcaacaacgtgccatgtgcgataagcgaggttgcaccgaaaagcagggcaacggcatttgcgattccgattgcaatacgtatgcctgcaactttgatggaaacgattgctcactgggcatcaatccgtgggccaattgcacggccaacgagtgctggaacaaattcaagaacggcaaatgcaacgaggagtgcaacaatgctgcctgccactacgatggtcacgattgcgaacggaaattgaagagttgcgatagccttttcgatgcctactgccagaagcattacggcgatggtttctgcgactatggatgcaataatgcggaatgcagttgggacggactcgactgtgagaacaagacccagtcaccggttttggccgagggtgccatgtccgtggtgatgctaatgaatgtggaggcattccgcgagattcaggctcagttccttaggaatatgagccacatgctgcggacaacggtgcggttgaagaaggacgctcttggtcatgacatcattatcaattggaaggacaatgtgcgcgtgccggagatcgaggatacggactttgcgagaaaaaacaagattctgtacacccaacaggtccatcagacgggcattcaaatctatttggagattgacaatcgcaaatgcaccgaatgctttacgcacgccgttgaggcagccgaatttctggctgccacggcggccaaacatcagctgcggaacgattttcagatacacagtgttaggggcatcaagaatcccggcgatgaggacaatggtgagccgccggcgaatgtgaaatacgtaattactggcattatactggtcatcattgcattggccttctttggcatggtcttgagtacgcaaagaaagcgggcacatggcgtcacctggttcccggagggattccgtgcaccggcggcggttatgtcgcgacgtcgacgtgatccacacggccaagagatgcggaatctcaacaagcaggtggccatgcaatcgcagggtgttggccagccaggtgctcattggtccgacgatgaatcggatatgccgttgcccaagcgacagcgcagtgatcccgtttccggtgtcggtctgggcaacaatggtggctatgccagtgatcatacaatggtcagcgaatatgaggaggctgatcagcgggtctggtcgcaggcccatctggatgtggtcgatgtgcgggccataatgacaccgccggcgcatcaggatggtggcaagcacgatgtggatgcacgtggaccttgcggactgactccgctaatgattgctgccgtacgaggcggtggcctggacactggcgaggatatcgagaacaatgaggacagtactgcccaggtgatatcggatctattggcacagggagccgagttaaatgccacaatggataaaacgggcgagacatcattgcatttggcagcacgttttgctcgagcagatgccgccaagagattattggacgccggtgcggatgccaattgtcaggataacacgggcaggacaccgctgcacgctgctgtggccgccgatgccatgggtgtatttcagatattgcttaggaatagggctaccaatctaaatgctagaatgcatgacggcacaacgccactaatactggccgctcgtctagccatcgagggcatggtggaggatttgatcacagccgatgcggatattaatgcagcggataattccggcaagaccgctctccattgggcagcggcggttaacaataccgaagcggtgaacattctgctaatgcatcatgccaatcgcgatgcccaggacgataaggatgagacaccgctgtttctggccgcacgcgagggtagctatgaggcgtgcaaggcgctgttggataattttgccaatcgcgagattaccgatcacatggatcgattgccacgcgatgtggccagcgagcgactgcatcacgatattgtcaggctgctggacgagcatgtgccgcgatctccgcaaatgctgagcatgacaccgcaggcaatgatcggatccccgccgccgggtcaacagcagccgcagttgatcacacagccgacggtcatttccgccggaaatggtggcaacaatggcaatggcaatgccagcggaaagcagagcaaccaaacggccaaacagaaggcggccaagaaggccaaactaatcgagggcagtccggacaatgggctggatgccacgggcagtttgcgacgcaaggcaagttcaaaaaagacaagtgcggcctcaaaaaaggccgccaacttgaatggcctaaatccgggccagctgacggggggagtgtcgggcgtgccgggtgtaccgccaacgaattcagcggcacaagcagctgcagcggcagcggcagccgtggcggccatgtcccacgaactggagggttcgccggtgggcgtgggcatgggcgggaatctgcccagtccgtacgacaccagttcgatgtactcgaatgcgatggccgcaccgctggcgaacggcaatccgaacacgggcgccaagcagccgccgagctatgaggattgcatcaagaatgcgcaatcgatgcaatcgctgcagggcaatggtctggatatgatcaagctggataattatgcctactcgatgggctcgccatttcagcaggagctgctcaatggccaaggactcgggatgaatggtaatggccagcgaaatggagtcggtcccggcgttctgcccggcggcctatgcggaatgggcggtctgagtggagccggcaatggaaatagccacgaacagggactgagtccgccgtactcgaatcagtcgccgccgcattcggtgcagagcagcctggcgctatcgccccacgcctacttgggctcgccatcgccggccaagtcgcgacccagtctacccacctcgcccacccacattcaggcgatgaggcatgccacacagcagaagcaattcggtggcagtaatctgaatagtttgctgggcggtgccaatggcgggggcgtggtcggcggaggaggaggtggtggtggtggtgttggccaggggccacaaaactcacccgtaagcttgggaatcatctcgccgacgggcagcgatatgggcatcatgctcgccccgccccaatcctcgaagaatagtgcaataatgcaaacgatatcaccccagcaacagcagcagcagcagcaacagcaacagcagcaacatcagcagcagcaacagcagcagcaacagcagcagcagcaacagcagcagcaactcggaggcctggagttcggttcagcgggcttggacctgaatggattttgtggatctccggactcatttcactcgggtcaaatgaatccgccctcgatacaaagttcaatgtccggctcatcgccgtcgaccaatatgttgtcgccgtcgtcgcagcacaatcagcaggccttctaccagtacctaacgccttcgagccaacattccggcggccatacgccgcagcatttggtccaaacgttggatagctatccgacgccctcgccggagtcacctggccactggtcctcctcgtcgccgcgatcgaattccgattggagcgagggcgttcagtcgccggcggcaaataatctttacatatccggtggccatcaggctaacaagggttccgaggccatctacatttgac

SEQ ID NO: 7590 - protein, 2703 aa, DROSOPHILA
MQSQRSRRRSRAPNTWICFWINKMHAVASLPASLPLLLLTLAFANLPNTVRGTDTALVAASCTSVGCQNGGTCVTQLNGKTYCACDSHYVGDYCEHRNPCNSMRCQNGGTCQVTFRNGRPGISCKCPLGFDESLCEIAVPNACDHVTCLNGGTCQLKTLEEYTCACANGYTGERCETKNLCASSPCRNGATCTALAGSSSFTCSCPPGFTGDTCSYDIEECQSNPCKYGGTCVNTHGSYQCMCPTGYTGKDCDTKYKPCSPSPCQNGGICRSNGLSYECKCPKGFEGKNCEQNYDDCLGHLCQNGGTCIDGISDYTCRCPPNFTGRFCQDDVDECAQRDHPVCQNGATCTNTHGSYSCICVNGWAGLDCSNNTDDCKQAACFYGATCIDGVGSFYCQCTKGKTGLLCHLDDACTSNPCHADAICDTSPINGSYACSCATGYKGVDCSEDIDECDQGSPCEHNGICVNTPGSYRCNCSQGFTGPRCETNINECESHPCQNEGSCLDDPGTFRCVCMPGFTGTQCEIDIDECQSNPCLNDGTCHDKINGFKCSCALGFTGARCQINIDDCQSQPCRNRGICHDSIAGYSCECPPGYTGTSCEININDCDSNPCHRGKCIDDVNSFKCLCDPGYTGYICQKQINECESNPCQFDGHCQDRVGSYYCQCQAGTSGKNCEVNVNECHSNPCNNGATCIDGINSYKCQCVPGFTGQHCEKNVDECISSPCANNGVCIDQVNGYKCECPRGFYDAHCLSDVDECASNPCVNEGRCEDGINEFICHCPPGYTGKRCELDIDECSSNPCQHGGTCYDKLNAFSCQCMPGYTGQKCETNIDDCVTNPCGNGGTCIDKVNGYKCVCKVPFTGRDCESKMDPCASNRCKNEAKCTPSSNFLDFSCTCKLGYTGRYCDEDIDECSLSSPCRNGASCLNVPGSYRCLCTKGYEGRDCAINTDDCASFPCQNGGTCLDGIGDYSCLCVDGFDGKHCETDINECLSQPCQNGATCSQYVNSYTCTCPLGFSGINCQTNDEDCTESSCLNGGSCIDGINGYNCSCLAGYSGANCQYKLNKCDSNPCLNGATCHEQNNEYTCHCPSGFTGKQCSEYVDWCGQSPCENGATCSQMKHQFSCKCSAGWTGKLCDVQTISCQDAADRKGLSLRQLCNNGTCKDYGNSHVCYCSQGYAGSYCQKEIDECQSQPCQNGGTCRDLIGAYECQCRQGFQGQNCELNIDDCAPNPCQNGGTCHDRVMNFSCSCPPGTMGIICEINKDDCKPGACHNNGSCIDRVGGFECVCQPGFVGARCEGDINECLSNPCSNAGTLDCVQLVNNYHCNCRPGHMGRHCEHKVDFCAQSPCQNGGNCNIRQSGHHCICNNGFYGKNCELSGQDCDSNPCRVGNCVVADEGFGYRCECPRGTLGEHCEIDTLDECSPNPCAQGAACEDLLGDYECLCPSKWKGKRCDIYDANYPGWNGGSGSGNDRYAADLEQQRAMCDKRGCTEKQGNGICDSDCNTYACNFDGNDCSLGINPWANCTANECWNKFKNGKCNEECNNAACHYDGHDCERKLKSCDSLFDAYCQKHYGDGFCDYGCNNAECSWDGLDCENKTQSPVLAEGAMSVVMLMNVEAFREIQAQFLRNMSHMLRTTVRLKKDALGHDIIINWKDNVRVPEIEDTDFARKNKILYTQQVHQTGIQIYLEIDNRKCTECFTHAVEAAEFLAATAAKHQLRNDFQIHSVRGIKNPGDEDNGEPPANVKYVITGIILVIIALAFFGMVLSTQRKRAHGVTWFPEGFRAPAAVMSRRRRDPHGQEMRNLNKQVAMQSQGVGQPGAHWSDDESDMPLPKRQRSDPVSGVGLGNNGGYASDHTMVSEYEEADQRVWSQAHLDVVDVRAIMTPPAHQDGGKHDVDARGPCGLTPLMIAAVRGGGLDTGEDIENNEDSTAQVISDLLAQGAELNATMDKTGETSLHLAARFARADAAKRLLDAGADANCQDNTGRTPLHAAVAADAMGVFQILLRNRATNLNARMHDGTTPLILAARLAIEGMVEDLITADADINAADNSGKTALHWAAAVNNTEAVNILLMHHANRDAQDDKDETPLFLAAREGSYEACKALLDNFANREITDHMDRLPRDVASERLHHDIVRLLDEHVPRSPQMLSMTPQAMIGSPPPGQQQPQLITQPTVISAGNGGNNGNGNASGKQSNQTAKQKAAKKAKLIEGSPDNGLDATGSLRRKASSKKTSAASKKAANLNGLNPGQLTGGVSGVPGVPPTNSAAQAAAAAAAAVAAMSHELEGSPVGVGMGGNLPSPYDTSSMYSNAMAAPLANGNPNTGAKQPPSYEDCIKNAQSMQSLQGNGLDMIKLDNYAYSMGSPFQQELLNGQGLGMNGNGQRNGVGPGVLPGGLCGMGGLSGAGNGNSHEQGLSPPYSNQSPPHSVQSSLALSPHAYLGSPSPAKSRPSLPTSPTHIQAMRHATQQKQFGGSNLNSLLGGANGGGVVGGGGGGGGGVGQGPQNSPVSLGIISPTGSDMGIMLAPPQSSKNSAIMQTISPQQQQQQQQQQQQQHQQQQQQQQQQQQQQQQQLGGLEFGSAGLDLNGFCGSPDSFHSGQMNPPSIQSSMSGSSPSTNMLSPSSQHNQQAFYQYLTPSSQHSGGHTPQHLVQTLDSYPTPSPESPGHWSSSSPRSNSDWSEGVQSPAANNLYISGGHQANKGSEAIYI

SEQ ID NO: 7591 - DNA, 23253 bp, DROSOPHILA
cttgaccaaaaacaaagtggccaaggtggcttgcttcgctgagtgggtggatggtgcagcagggcgcagatttgccgacactttttactacgcgactttcgaactggagaaagcggcgcgactcgacgcgagaaaacgagaagcgcgaacggagagacgagacgagagatttatttggctgcgcggcttcgtctcttcggctttttggcgctcacaattattgcaccaccacaggcactcgctcacgtacatacattatacatatacacagatatctgtattggattttttttccaaagtttggattttgatgatatcctgcggggtatacagcgattttcgaactggctttgaaacttgaaactaaactttatggccagccaaaagcactttaagccttttaagtgtgaaaattaatattgcactttgagttggtactggttttcccttatgtgttttatcggtttagcggattgcattgggcagaatagaattttcgtttggacgcgatttctgctcggaacgcatccacactcgccagattctcgccacgaactgagtgcgctctgtggggccagatagctgctcttggggcacgattccttgatacctcgccattcgaacttgcttcctctcaattcgaatttggccaaaaccgttggggttgctttgagccagtgatgccagatgggttcgttaccctctgttaaccgcttccacaacaacgctagcggttcagaatgttggcagtttgcagagctatcgatataaaggtcaaagtgcaaccgttctgaattgccgccctgttttcaaatataaagcggtttatttgaatcctaatgcattcaacaaggtagtgtctaaaatgtcctacaaatagtatgttttctggttatcttcagtcgcatatttttgtatacttgtttcaagacatgcaatattttatgaccacatttaccacgttgcgcacctaatgatgaatcccattgaaaatgaaacatttgaattgatttcagttttatttacaaaagtatatatagtagcatatgtgccatagtataagaccacatatacttacacacacacacacatacataaccacataggaacagccatacacaaaatcatagaatgcccttaggatataagtcataaaatcatgtatccaataagaacccaaattctggtgacaataacaaatccagcctaccctaatgtaaacattaacatccgctgccgaatcagttattcccaccaaagggtcaaaaccgcttacgcagcccaagttctcggctgatcagtacccatgagtgatccactcaagaaggcacccaatccaacagacataaacatccgcagccgcattcgcgactcccaccagagggtcgaaactgctaacacagctttaagggtcaaaactttccacgtagctcaaactcggctgatctatatccatgcgcaatccactcaagagagcgcctaattaacgtaaacataaatgagagcctatgtacgctcaatatgaagaagtaaataagctcagccaagggtttgctaagcgttcgctttgcaaattagatttagattttattcatacttcaattgtgtaagacgtgaatttgtctccgacattcgcttaagtttttgatcaataaaaatacttttttttataaaccaacaaaccgcgaagttgtaattatatttatttactcattcaattcaacttgatttgtttagtttacgattttgcgatcgtttatttattaacatcaaatcatggatataagcgtagttctgaaattatttaaaattaaattcataattttaaaatgattattgcttttaaaactacaaataaaacataaatagattagtttttttttttgtttgcttttcttttagttgttttttgtttgtttttgttttcaatccagccttaatcgtatgaacacttacatgttatttatgcctaagctaacgaataataatatttttctaccttgcgtggttgccttttgaatgtacataaaatattttaagccatataaagaattgtacacttatataataatatattatatgcgtttcagttacggttaattcttgtttttgtgcgttttgtattgttttgttttatgtacagaatttatttgcttagcaaattatggcaaattagtctaattaaaaaaattttacaatgatgtatatatgaatacatatagtctgttctggggtttcaattcatgaatatttaattctttacttcttcaattgccattttctttttgtcactccatgtcagctgtggacttgtcttgtttgttgattcattgttagtaggattaatggtcgaatgaaatgcattagtagagttagatagattccctcgacttatatgctaattttagttgattagtcaagtactgtgctctgggccgctactgccccctcttctgtttgtcagttttagttttgttagttgctgcttggtgattggtgatatcaaatgattgactgactggttgaaagctaaacatgtatgattgcgaacatattttgttgtttcatttttgaggcacccaacttggtttgtgagagcgtcacaccactgaattctggatagtgttgtgctccttttcagcaggtattagtctaatggttaattcagttttgtctggtctgctatactataagtgtatgtgtatatatatatatataagcttgagcgctttatagatagtgtacatttaaaattatatttctgttttttctataaatacacaaagttaaatattaagctgagcgaggaaaatgattatatcgcgagttgagaatcaagagcgcgtagataatttcaaattaaatatgtttgtagcataggaattaggcaactaataacttttcacttaacaaaaataatttaaatataagaaacacttaacgtagactgtttgggcgggtgtggtgagtgtgagaggatgatggccaagagcagtgaggcgaatctctcagggattgcttctactgctgcagctggtcaccgaattgttgctgctgctcttgccgcccttgttactggcggcagtgttgcagcatgtggttgtggaggagatgccgctcctggcccccgtctcatcgccctcatcgcccaggtactcgtccggcttgtgactagaggcgggaggcgtcagaagactttcgggagcgcgcagcgcggtggccggggaagcttgaatcctagcgcgcatggcatgcgccgcatcctgggccataagcacttcgtcctgaaagatagaagtttcaataagtaactgacggaataaagtacgctttatattcagagtgaatcgaatacatatttggacgtatgcacacttctgtatacacttagatatacttacatacatatccatggtagttgtgtgcgtttggataatgtgcgagtcgtcggtgacaatattggggcagattagtcccaggccaaatttgttgctgacttgctcattctgctcgttcagctgcaggtagggggccttctgggagatcactcggaagaatggctccatccagcgagcacaaggctgaatcacctgccaatccagaccagaacagcgtaaagccatctccctaaaaacgaaaaatattcggtaagataaccatgtcgtatgggatgcaacttccattccaacttaccgactaaatgtatgactgatggcggccgctgccagcaccgagtaggaatagttggccatgcccacgtccagggtgcacagatctagcagctgtgaggtttgcacaaactcaaagccagagaattgcgggtagataaaggcatcgtccgcctccgcgctcttttgcctgccaatctgggagaacgaggccggagtgcggttgttcacattcagttgcatatagacgcccagccagccggtaatggtgatggggctgatgtcccagtcgagcgcctgcagcagaatcttctcgtggttaaggatgtcccgctctgtgcaggcgccatccgtcacataagcaaactccccgatctttggcggataaatctcctctaccttggcggccacaaacaggcaggtgatgccgatcaactgcaagtgcgtcttctgcaccttatgcgccacatgcaaatagcgatccaggtagtcgacggccaagtagaaggtctcccgatgcagcttgtaaacttcacagacctcgatcaaccagtccaagagaatggcacgcatacgtggttgcagtccgggatgctgttccagcatcgaaatgctgcgcagacgcgagtcctgctcatcccggtgacacatcaggcgccaaacatcggcggcgttagcccaggcgagcgcaggaagtgggcactggcgcagaccgttctccacagccggcgacatgggcgtccgcatgttaatcatcaggtcactgaccggatgatggatctgctcctgatgttttggcaggccgggagtacgctctccattcaccgcctgctgctggctgcagccggaggaggctggagaaattgtggaggagtagatctccacgtcgtcgtcctcctcctcaacgtcatcctcatcatcctcgtcgtacgagtagtcctcgcagctgtcgtccaaaaggtcatcatcctccgtcttctgcgtgaccaccgtactggtcaccacctgctccgcagcgtagcgcaccaccactggcgtctgcttgcttccacgatccggactcggcggactgtccgggctgtccggcagcggactgtgtggcgcctccgacagatcctcggccggtgagctacgtatgctgagcagctcctgggtactctggccatcaaccgagacaacgggcgaggtgtagaccgaggaggcaaccgatgacagattgccctgctcgctgccgtacaaagcgggcagtcgctgctggcgcttagctgatggaggctcaaaaccgagttcagggtcctgaaaatgaaggacagatgtttgaataagtaaatcatacaagtgaatgctttaaattgaaatgaactaagatagtagacaatcaaatataattactaagctatattcagatattactttcttaaatagtagttcatatttctcaaaggtgtcagcaattattaccatttcaataaatttgcgcttctgttccaacttcataataacatgaacaaatgagtggagaggatactcaagacaataacaggatcacacgactggcggaattagaaacgtgctccgaatttaattagcgaaggaggtttggggaaatttatgtgggcacgcctgtcaaaattggtaatccttgatagatggactgctggctggaccgaatgcacccgcacaaaatgaggagccaggacttcacacaaaagatcaaggactatggaatggcatggaggtaagacaatagcacttggttggattttctcgtgggaacgaacgggtttcgttttgctctttgtttcttttgaatatttttggtatgatcaacatatagacacgatatcgttattgcacttttaactttaatgttataaatttagtagcagtctttggaaataattttgttgcgtcgtttctctttggtatgattaaataattgtgcaaacagattttttggttatagcatttaaacaattttggcttcgttttgtttttttggtagttgttgttgttgttggtgggtgatcttggcaaatccggttcttaaattagttctttgcactcgttcttggtggtttatataaatatatttatcagtcttaacatttgctacttggcaacgaataattttggaatttcgaatttcgtttcagtttgtctgggtatgtattattatttggctaactccgctcttggcttgatcgagtaccaatcgcgttgacgtgcgctgtgcaactgagctcgacgttctccgttccagatcgccgatccccgaattccccgattaccgatcgtcgttatcctgcccaacgaatgcaacggtctcgaaaataggggttgcttttctctgcaacaacaacagcggtaaaaacaggatcgccaaactaacgtgccgtccctttccaacgggggttgcttgcctaagatatccccgtatatcttgagacgacaacttgtgttgtttttgtctttgcagcagcattgcatttttcgcctctgggtgtttatcggcccaacaacaaatcccactgacggctgtggctcctggatcctttttacaattatttttgtcaacattttcgttcaggtagacgcaagacgtttggaaaatcactacctacatcataatcctcaaaatagcgacacataatatagtacataggaagtatataaattacgatttgctagcttttggctcgagctgccagcggctgcattaagaatctcctgcatcttaaaggctactcaaataataaattatcttttgacattgatcagagggatggaggcggtgccaaagccaaaagtagagcgatcctaatggaacctcataagattacagcacaaaaatgacaaaaacaaaaaaacgaaaatggaaccgaaaatcgaaaatcgaaaacaattgagatccttgaccattgttcttcttgcagacagatgattgaaaacagaagccaaaatcagaaagtccataaagtacaataaaatgtagtcagcatgggacacagatgtctgagattgctgataccataaaaaatacataaatgaacgtatttcgcttaaaaaactattgggaatgttttgaaagttatctcaagaaacccataatttcttggctttctcttttttttttaatgcatagtaaaagatatttatttataagatactgaaatatatcaaaaatagcatttaaagctattctgaaagttttggaagcttggatttccatgttttaaatgtttggcacaattatttgcatttatatatactttgaatgaaaaatatacatcaaaaatatttgaaattgcccaatatctgcacataaaactaagcaatacaaaagatataaaatccacataatattcgcatcagtttctctacaatttcctttggtttacgattgcaattgatctcttctttgattgaaaaaggtgtgcagtgcacaccatataatttatcaaatactgactgcatttcgtcaactttcttaacagtcaatctcacacatcgtaaaagcttaacaatatcaaccaaccctgctggccattaaagattttcacataatttcttgggcgaaaaatggggggaaatattgcgatatttatgtgacaattttaattgtctgagtaggtttgccttctctcgacaaacataccgagcagaactcccctcctgaagtcgagaataaatactttttttttttttttgttcaggcaagacaggaaggtccaagacgcatgacaaatttaatttctcattcttctggccaacaaactgcaacaaccctccggaggagaagatgatgtaggtataaccgggaacggcaatcgtagaatgaaaatgaaaatgaaaatggacatggatatggacatggacacatgtcaaggcacccagatgcaatgtaattaaaatcaaagcgtgcaatggcctaagaagccatctccctggacaatggaaattccgttcctctagccttattatttcacttcatttttgcttttggtgcgtggacattgcatctgccgtttggatttggtcaagcgttatggaatcacaaagattatgcacgaaaattctcagtttacttaacgacttgacggattcgaagagaaagatcgtcggagtgagtgtgagaaattagtgaactgtaaagtgggctggaatctggaccaatatggacccgaagggttgcattccaagtttaacaagggttaaactgggtggttgcccttaagccaccgccgtcgccgctgccttcaaggatttaagtctcaactccaagcaggcagctgctgcaatcgtccttcgcatctcgatcagctccttcaaaatcgaagcccacaaggaaggcacccaaaacatctctcgaaatctcactgggagggagaccatgggtcgccggcgacagatgatgcagttcctcaagttatgggtacatacagaaagcagacaagaagcaattcgattgttaggcgacaacctctgctgcgtcgccgacctcaatactcgatgtcctggtgccccattgtgtcgctctccctctccttttcgcctaccctataaagtcctgcgcttatgtgtcgtaatctttcgacggccgtctgctcgaaaccgaaacacctttagttttcagaccttggcgtgggtccaggtgtaactttttcaccgctgttttcgtgtaatatgctgcattgttgtttccatttatttttcttttcttacagtttttttctttttttttcaattctcccccaagtcctttgataacatttaatttcatactacaatgtgcggtagttgttaatatttttacagtttgaaaagattatgattttcttgaaattcaggatcaagctagaggttttttcttcagatatttcatttttcatgaaggactcataaaagtctgatgatcgttcaaaattagctaaagtcctgtctactttttgggacatcgctgctgctctgcttttaataaatgatatgcaaacaacatgccagtggacaaatccccgaaggaccataacaaacactcatatttcaaaccaattcaactgacccctggtcagtccagaaagggttaatccaacacaacactttcgcggtgacattgctggttttatcatcgcggaaaatggaaaattcggtgggtcagggggacgttgaaattgcttggacatgtaattaatcatgcaattggttagatccatgacaaaacgaattaaagcatatcacattggtgaaacgggaggagggtaagtggacaaaggacaaaccgcgaatgaattttgaatgcgaaaaatgaattttgattaattgtcaggaaagacaattttctttaggggatatgccaacttcttaggtgtaagcctttaataattgaatatctcttgatatatttactgcaattacgttttcccctgttttatctaataatttaccttttaaaattatctgctcaaaaactagtttcttatcagtcgaatcttaatgtaattaatctgaaaacagatcgctgcccaagtttaccattatctcttgtttacctccagctaaataaaatcctctgtaaaatgaaaaaagaaaactttgaattacaaagcaggcgacgcatgatcccaaatcgggatgcaatctgggaaagtgaaacttgaattcagtttcccacaatatcccgatactgacttgacagaaatcaagacccacacttgattgcatcgaaaggaaacccgagcgaaagcaaacccaactccccttttcgggacaaaagaaacaaagaagtttcccaaaaaaaaaaaataacaaggaactttcggcgatttcatgcctgccatgtaaggagtaagaaaaaggggtttacattacactgacaaattggtaaaataataccataattttgatcctgtgccagcagcaaaacaaatattgtataatatttcaagaccgcattccgatgcagacgcgttctccgtgtcccgaaaagcagatgacacaagagttttaagaaggaaaagcctgatgatttgcataaaagtttaacggaaatctaatgagcagacgtcgcaggatcggccaaggcatttgcataaggataacatgtcccgaaacggggtagcaaaatgcaacccagttggaaagaattttttttgttatgctccgaatcttctgcagaagcaaatgtcgtctcgatgaatatttaattagagacgaaaagaaaagggaaaaactcggcccagtgatccttgaaaaggataaggcgttgctcaacccctccgtcggttcgttcgtgtgttgcggtttcagctctgtcccattccggtagtcaccacgatcccttacccatcaccgtccccccatcccgatgccaatcccttaaactgtcttgatctagttcttctgcctcaagctaacctataactatcgcaatttcaaattcttaccacggccctaacggacatttgccgacgccttgacttttggaaaaacccacccctggagaactcggacttggactcaaggtgtgcgcgcatgcgcaacgacgccttctgtccttgttctgcgtctcctgctcctgcgcctgcttctggtccggctcctttgtcctggcatgcatatgctcggcatactgccaaagaccccttcggggaattcccttactcaacaaagttcgcctgagagggggccagacatttccttgccatccacttttttcgtaccagaatgacatttgtttggcacggaagcaggcgcaaaaaccattgcaaaaacaaaaaactcaaaaaaaaaacagcaaaaaaaataaccaaggcagatatcatttgtttggcaacagactgtttgtataccctggtcactacattttaattttacgatatattctcagtacaaaccaaggcaccttataaataatataaatttctatatttccactttatcaataagatatgctgagttctaaaacagtccttttaacatgcctaagatttaatatatgaaaacttatagatattcataatcttgcaaagataaagatacccatctagagggtaccaaactatcaaacaagaaaacaatttctgcaagttcattgcacgtataggagaatattctctcccctacatacatatttcatatggcactggagaaaaaaatcctttgcaccaacacagctgcccatcgtgaggagccgccaggagatgagaaggaagccattgttctccgccttgattgcagctacttgagaggagatctgacttcaaggcttccaaggatgctgctaaatgagcccttttcagtaagtagcgtttatttttgggctcatctttgcattgtgcccgcgcaaaagtgccaagaagtagctgtctacgtgctcaacggcttatttggccaaaactcaagcagcgaaagatcaaatgaagatcggcagccaaacgagtggaagccaccaaagggctgtccattcaaatggaagtacaaataaaagatcgtttgccaaacataataataaaaatggagaattgtttagcgatcgctgatcaatgaaaacaattgggaaactataatcaaatagataaatatataaaatggctattgctcaaattcaaaaagaaatatcacctgcacggttcaaatatgtatgtacattgtttagttataatctcaaatttacattattattattaacagagttcacaagcaatcagattattcagcttggaaataaatctttgagcttataaacagcctaaccttcaattaatagattaaattaatagattcttatttaggctaaaatgaaagtggcaatcactgatcgacgagaatttagagaacagagaattcccagagttcaagagttcgttaaatagaaacatttaattaatttcaaatgcataggcactttttgaaacacactagagctaatcatcggcttcctagaatgccagaatgcctcttgccatttccctgataagattgcaaaaatcaacgaggtcacatgacatgataaagcacttcattcataaaacttatctgcgctgtgtctggctttatgtttaaattacgattcgttttggattacgtacctcgtttgaatcgctgcttaaacgccgtttacgtttattgccattggaagtcgcggctgtggatgctgcaagattctggctatcacaagagcacatctcgtcggttctggaggctgctgaggttcctggtagctcctcttcacttcgttgcgacgctgaagagaacgatgttgatgggattggatctggatgtggaaggatagcgattgggctatcgctgctgctactgatactactgctgctgacgacgacgactatgctgctgctcacttctccgttgctgggggcggttgtgactatgctgccatttggctcagtgctgctggtagaacaaacactgcaaaagaaagtgagtggaattagcagtggggtactaaataataatactaaataatttaaattatatagttgaatgtccccaaagagcagctatttgatagaatacttcaacatagctgcctatatttttgtagatttaaaagacatgattgtatcaaaaacccttccatttaaagaatcccccatatttttgtaaacccaaacccaaactctggagcgcagttatttccaatttctccactttttttttttttttgcaaaatagagaaattcaatatgccacggaggcagggcagcaaatcacataggggcgttctaaaatagatacaaacgaaacgaacataaattcattgaattttgacacggcattcgaatttcgaatcgcgatgcaagactcgagattaaggcgcccaacggatatattaatatttaacatccgggaaattgaaatcgagatgactgatcggggggggaaatggaaatggaaatgggatcgttgtgagggccccggggaaagcctttcctcctcgagattgagcaattttggcaaatttgcatgcacattagcataatgcaggaggctggcaaacgggaagaatacaattttccatactttccaaaggacagatgttatatccttgcgtcgcaactctcaagtgttgcgatccaagcaactgcactttaagcaattcgatgcgcgaatttttgcaatttgagcgaggagctcaggagaacgagagaaaaaaaaacgaaatctaacccttgggaccaaaaacccttcttaaggaactcgtgaaaagggataatagaaaaaaaaaataaaaaagggctgctgcccatacataaattcaaatgctttagccatttctttcttggccagaggctcggcattgcagcctcctgttttgatccttgccctgcactatcgatcgggtttaatggtttaatgaacaagaaaaagtaatcacgtagtaaattacgaggaaatgaaatcgctttaaaaatgagttatggcgagaaaggactaatggagcgtacgtgcacgcggcctgcaactttttcccgctttctttcattgtactcagggtttcggggtcaggggtttccagtcatctccgcggcttaaggttcaaactgaaatttgtcatttcgaggtgaaagtttcctttcctttgcggcaaatgcagatactttgtttcggtttcgtttccccttttctattccgtttcaaatccgaatccctgtaggtagcaaaaggctagggtgactatctcggagatgatatgatgaaaaaattcgaagaagtatttcctggaatctggtccagtggataataagtggactatcgaaggatcgatctttctcacatgataaattataaagcaacggcgacttttcgattagaaattagttatttatgcgtttaacttggtatcaacgaaacagttatgtttcggaatttatgtgtttgatcctaaactcttaaggttacaagaattttgtcattttttgaacatttttatgtgagttccttgtactacttgtactaccatgccctcaaaagtatgcaatggaatctggaaaacctgaacttccgtgacatttttttgataaattccgttatagatggcagggaaatagcttcgcaacacataccaataattatgtcgcacacaagctgaccacgaaatatgtccataaaatggactatcacttaagtgatcgcagtgatcagtgggtgatgatgatgatgatgatgatgatgttgaatgccaaaacggggacgcaactgacaaaaccaaatgactaggcaattatgcaattatggtcatgcgcaggcagctactacaagcaaaaagaatgaatatatagtgcagggtgaaaacatattaaactcaattaatttttgtccaggacatgactgcaaaagccacaaaaagtgtgtgtctgcagtgacagcattatcaagagccgaccaaacaaacccccttcataacccaaccccctgaatgaccaaactgacctgaaccgtcccacaactaaacacttttctaatgacattttcgcgcgcaattatatactaatcacacgcaggacctcggaaaggtcctgtaaaggtatgcaagagtgttgaggaatgcggcacttggttatcaacgctgcctcgactttaacacctacaaacagatggcttttttttttttgttttgaaaattgacagtgaaaatgcattttagattatcgcacttgagtcagaaggttggaacagtaggatcccgagtggttatagctcctgcgggtccaactttcccgcggcgtattcgggcataaccagttgggctctgtcgctttataattacgaaatagctattagataaacatcacttttggttaagagaattaaagggagacgcgctgcctaccaggatagtgttgttagtggttaaaaaggaagtcgatcggatgtcgccacaggaagtcgccgagcgttagaaacaaatggtagctcagtccgttggggagtcagtcgcctcttggctttcatgtggggtgctaattagtttggtcagggctgcggaggaagtggaagtcacgaaaagtgtttgatgggaaaaggaaatgtctaagatcataagagatgtcaagaaaaacatgcaggttcgcttgaaactaagatttttacaaactcaaatcgaacttggggtttgcaagaataatttacctcttaaaacatcgaaaattaaattaaattatttaaaagtaagccagtagaatttaaaatgaataaagtactcataagcttacctcttggcatttaaacccataattgtacggccttgagaagccgtcaaggttctttatcctgaatcttgtttttaagctgctcgtcaaaagcagaaatgttttgcatgaaatgtacaatttaaagaggactgcaagtaaattaaacaaaatataaacttaataaaatataataaacaacatttaaataatattgtaaagcaatcattaaaaactaaaaatggcatataaactaattggataagagtttctaggatatggtcatcacatgcgacgcgttttcgagtttttacgacttcacaaaacctatcaacagttagtaaaacattatctgtagatccttgtggaaaaaacaacatatgatccttgagggaaactcacacacagcatgtggccgaaaagtctccttgcatcgaaaaccccaaacaaatttgtttacgtgagtttttctcgaaaaacatatatatacaccaactttttgcttttagcaaaacgaagaaagaaagtaaatatttttctttggggtgcaaagtgtgtctaagatattcaaattacttaaatagaaagatgggtgggaagaccattttggagttgggtcatcttaacaggtagtcacggaatggtcatctttttatcataatagaatttccacgagtctcgattgatgccttctgctgcagtttcagcttcagctgctccccttgaatttcctttacacttgaaaaacataactatacaattcaaacaactgaaagtgctattaaattatagaaatcaatagagttctgttgttgcaagtacgatgtattgttgataaatacttttttaactccgtaatgcttgacttatgagataatttaattttttgagtgtaccgatgtcaggtgcatcgcattcggcgcatgcgcaacgtccgcattttctagtggtttacaacgcttaattatatcgaggagccgagtccttagtgcccctgttgcacctgttgtggctagagttgatcgctgaccttctgttagaactgtaagtatgggttcgatgcgatgcggggcaggtgagtagagtcgatgggattggagaaggggagtggagtggcagctgttgaagatcctaccccaactaaaaggattctggcaatgtctctgctgttgcttttgtaacttcaattgacttccccctcgctaattgtatcctgtcgcgtttccttttcccctagccctacccctccctcccctcctcgcttcctttcttccttcatttattttcctttttccgtgtgacatatgggcctggcgttatattcgccacgatttatggacctcccttcggcctaccattcagttcgacacctttttttcctaccccatatgcgaatgctttttagccaacgactttctttcccctactttcttgttcttacgcaacggattgtctattttcctcactttttgcctcgcttttcttttgcgttttccggccttttctcatgcacaatattttgctgtttccaaccatcattttcacactaattgcggatatgccttctaattaattgggttccctctgcttccccgaagtccttttagagcatttttgctttcttagttttcaaccccctaactattctacttacaacaaagaaatttccttacacagaaaaataagtctctttggtcatttaagaatatgttaaaaatcttaaaacaattaataagatcatcatttaaatcgtaatcccaatataaagatctgggttttgtaaatattcgagctcaaaaaacattatgaaacaatttgtatctttaagatacagcagaaacctaaaaacgcaatagaatagacatttatctctcagttgtaatcatgttacacatctaacatcatttatagtcggattaatgtaatcttttttgtaaatcacaaaacgtcctaaaattaatattcgttaataaggatgcgataatatcctttagttttacaaaacagttgacagcggctcttggcaaacaaatgactgtattatcgctagagcaatccaattcttgtccaaataccagtgactaagatagattcctacctaattgcaggaactgcccacacgcaggctgcggctgcaacttcctctaatgaagattaagtgaagaaggctgcgagttcgggcgaaatccgcggcgacaggtatacaaatatgaataatgccgcggatcgagcggataaactcgggggtttcctttgcgcacagcgcctaattaaaggtgtacgatgcatgagtgaatctgtttacctggacggggtccttcaaggtcatttaactggaaaaccgagtgtcgaaaataaagtcgaccgtatttttttccctcatcttcggaatatttgctttgtgcggaagatttcccacaaggaaatgggaccaagtctcgagatacaatatgaaatgcaacttgaggcaatgcaaagaagaatgcgcaaaatgcgcaaagaagagcgcaaaaaaaattatatacaaatatgtatgtatctcgagtatatgccagactatatacatatgtacatatgtagagggaaaacaggtctcgagttatccggcgtcttcaactgtctgggcctgcaatttttgtgcgtcctttttgggctgcattttgggctcctctgcacatgcggcgagatacattcctgagatactcgagataaaaatgcacatgcatctgggcatttgtggcgttgtccatgccaatgccgcctcctctccattgttgtggtttggccaccactcttgcaattagttggaactcggtggaccgaaagtctgcaggagttgtgtaacaacatagctacataatgctgatagggtaagagggtgaagttcattaggaagatattttctcaaatcgaaagcctaatcatatttgcataatatgaaactataaataatactactaaaagtttaaaccaatacacgaagattgctttataagcatcattgaattgaacccgatctttgatgcttccttttcatactcatgaatgcgtttaaattctaatggtcaattggcccaagtttgctgtgttgcttcagtcgcatatgcccaccctacccagaactacagggtactgcaaacgagaacaggaaagtcgatcctcgcctgcgcgcatcagtgtatctgtgagtccgagtatctgagtatctgtgtgccgggtatctaaagagcgccgcctgggcaaaacggcgtgtgaaagtaaagtcggcccagccgatggaggagaacaaatcaaagttcttgaatggagcggcagcggcggcgatggcgacggcggcgttccagttccaagaatcgatggccttgaagtagccgttaggacatcgggacgcgctcaattgactatttagtttatatttagcagcgtctaaaaggatgcccacagcgagtcagctagctcaagtggcctgcgtcctgtctcttccccgctccacaaatcgccagtcggacggactatcctttgtttgtctgggaataactggaaactgtttatcattgttgtttctgctcctcatacatacggcttcacctcattccgattccgaatcggattcttctgccgcagcgacaaaaatgtgtatggactataaaaaaaaaatgcccacatatacatacatatgtacatatgaaccatttatttaaggagttactattcacaactcatccttttggagaacatgtaatatttgtaaaacattccgcacttgtaattgagaaatattgttggtattttactaggaattcgggttaatatggccagttgatatgtgtggattcctataaccatttacgtatgtatgtacatatgatgagaaaatattcgagatcagtttgggttcccatctcgtctagaaaatcctttgatgacataccgctttcgaaggtggcaagcacttggaggatcatgagcagaattgaaaggtgttgactaggatttgaatagatcatataaggagtgtttaggtgggtcaaacaaaagaaaatgttgggaaaatatacaaaattcacgacactgaatcatcaaaaacttgatgctcttacttttttcaaaatcacttctaagaaaaacaatttatttccccatggtttaaactggccaaatctaaacataagcggctgattttcggcacgatcatgacataatcgaaaaattaagtatacaaaaatccaccccatcaacaatacaccacccaccccccacgcacacccccgccgcgatcgctccaaaagtttaacggcgcaaaaagcgaacacgcaaactaaaaaacgtcaaaagaatgcaaaaaataaagaagaaagcaaaaattgcgaagaaaacaacaacaaaatgaatgtggcaggtaaatggaagcagaggagaagaggaaagaacgaagatggcgcgaagcaaggtggagacgaaggggaagcgaaagcaaaacgccgagaaatatcaatgaactccattctccacttggcagtctatctcgctcactcattggttgggagcacgtacatagagtaactactcacaaaaataaatataaccacgattttacaataattaaaatactattattaattctacatatgtaaacatacatacatatgtatgtacgtagattgtgggtaagggctaaatgccactaccaatctttttcttcgtgtaccaaagatatttgcgccacttttgacataattcattattttgttcttcactcgtttactccattttgctttgaacctctgcttcgtgttcgtcaagttttcgaaaggtccgtcgactgatcggcgattttccgaattttttcgacgtcgcagtcaaatgctctctttttttccgttttagagcgcagtactaaaacgtttttgtttgttgttggtgttgggaaggggaaaataacttgactcgctgttctgattggaataaaacggaagagagcgagagaaagagagcttactctctctcttagcgagcgcatttcttccaagtttgtgcttgtgtgtgtgtcattggaggaagcgtataaaaatgaaatgagcatgggaaaagaatggagaaacgcaaagtggcgcgaattaggcgtttgggctggggcagttttgttttaccgcccaaaatctatgcgaatggcgggaaaaagtgcaattcgggcgggagaaagattagaaagttggcccaaacagcagggtaaaccataagctgcatctcaagccttctatagtaagaaaagctgtaatagttcactgaactcccgttacgcattagaaactcagtgcacttttagacgtgattagaagctttcatttatttcataggattttccaatttgttcccattggataacggtttaattctaataggacacttttccttatagggggaacactaaaacactgtgtgggggagacaatttgtagttggacaccccgtctcttgccaatcagaaagcaacggttaaatcctacagcgtgtcaattttcttataagaggatgttgtatttgtagcaaaaaatgcaaagacacgacggcaaacgcagcattctctcccgctctttccttcactgttccacacacacttgtcaccgcacacgcgtcataaattttattccactctgaataacgtattgccttttatccactaaaaccattgtgcaattggttttaccttctagtaagcggaaaaatgcttaacataatatccccggtgttttcacttgtttttcttaaagggaattgaacaacgtttttcgagagtttttcgtcgtcgtcgtcgccggccacgaaaaaacttcacgagcagcggagcggcggcagcaaagtgatcgctttggaaccgaaaaaaaaattggtggaactgggtatcaaaagcagcgacgtcgactgcggcgagtgtgcatgaggaacgcgccaaaacaggcggatccgaagcgccaaaaaatgcaacaaacacagggggcaactttgttgtactctaggggagggacggagatggggcgagcatctccagcgcaaagaacagagcgtgagaaagcgagacggggcgatgaagccgctggtggcaagcttggcattttattgaatggagtctgcaattggagtccccagtccccaacaggctagtcagactacaattggaggttcgacgtccagtcagctgggtggtcgaaaaacagctgacgaggatgccagaagggcggatttagtcggatatatcgtggttatatataaatacctaagatttatttctatgtcatatgccaattttaattcaaatatgaccttcagaaaataaatatttaaattttaatatgaaactattttttttaatatatttttaaagcgctccaaaatcaattcaaggttaaaataaatttatcttgaagggtattcataaatctttaaaattttaattatttatttattcttcagaagcctgaaattacatggtttaatatgcttttctagtagtttttatgaactgcagccaaataacatatgacaagatgactgaggtcgaactaggtggtaacgctgctttgaaaccaaacaaaccactgccactttgttgttttcatcgattaacattcgagcatttttggcaccaacttcgagcgcttataaatcaggtaagctaaatgaaaaaccatgcgtgcctataaccaattgaaagatcaaaactcgcagaatctgatttttcactaaaatcgaaaatcccgttcaattcggccaaattagaatcgattgaacttgatgatttcccgcgcgcgggaacccgacgtcggcgcgcgctgctgacagcgatgacagctgcgcgcgcaaagagaaggcgcggaagagagcgcgagaggggcaggggaacagagagagaaagaggcaaaaacgtcgacgtcgctgctcacgttttttttccattacttttcgactgctacaatatcgatggagaaaacggggtctaaaggaaatggcttaaaaagcaagttcacgaacttttgaaccctgcacctgctgcaaatcgaatgggccaattggccggcatcactcacctgctgttgggcaggattcgggcaaattctcagcgggattgcacactgaaaaacacacgcggactggaatggtgatgaaaaaaattgcacacaccgccgcacacatacacacgcacgccagccagcaagacagtatagcctcctttttgtcacctttttcgacagatttatcgtggttctgcggtctttttcacggctagctcaaccccacggcagtcaaggccaattcgatgcgatccccgcgatttttcagcgactccaaagtaacacaatgatcgcaagtggcactgtgacgagatcgaaatcgagagagcgatgaaagagcaaaaaaaaaggccataatcatctggccacacggcgcaaagagagagtcggagtttagtggcagcggcgttgccactacggccgatcgcgttgcgggatttttattggcgcgttattcaaattttgaaaaataacttctatgttagcctgacttttactgctctgcatatttagttcactatttttccgggctgatcatatctggaaatcgggtatttaaaataataaaagatgtgcaacgtgcttaatgttaaatggggttttagaaaagaaattgtattatataaattttgctttgattgttcgattaacggatattaaataattggattttccgttgggagcgtaatttgaaacgcatatttgatacgcttatattgtttttgttttattgttatattcttgtttttatcatgcgactatctagtaattaaattcaaacagaatactcaagtaagaattttgtattttaggaaatacttaaagtattttcactcgatttaatttttggcgcacttttcaaacaataacggatgtcactcaaatgatttaatggttttcaactttaatgctcttttttgttgcttaactcacatattgattttgttttattatagcaaatttcgtataataaatgttagaattacacgaacactttacttttcgatttgaatttgtttgattttaatccacctcactgaattgcagattttttcggcgtgctgttatttatccacaaaataataatttttaggcagtaataactaacaattagcgaatatttgtctttagggaactttgctaattttcatgttcatgctaatgttagctattggttttgaattttatatttaatattaaaaagttaaataattaacttctgataaatattttttaatatagcttgtatttttagaactcttattaattcactcaatcacttttgataataaatttcctcacacaaac

SEQ ID NO: 7592 - DNA, 3875 bp, DROSOPHILA
tcacagtgccacttgcgatcattgtgttactttggagtcgctgaaaaatcgcggggatcgcatcgaattggccttgactgccgtggggttgagctagccgtgaaaaagaccgcagaaccacgataaatctgtcgaaaaaggtgacaaaaaggaggctatactgtcttgctggctggcgtgcgtgtgtatgtgtgcggcggtgtgtgcaatttttttcatcaccattccagtccgcgtgtgtttttcagtgtgcaatcccgctgagaatttgcccgaatcctgcccaacagcagtcctctttaaattgtacatttcatgcaaaacatttctgcttttgacgagcagcttaaaaacaagattcaggataaagaaccttgacggcttctcaaggccgtacaattatgggtttaaatgccaagagtgtttgttctaccagcagcactgagccaaatggcagcatagtcacaaccgcccccagcaacggagaagtgagcagcagcatagtcgtcgtcgtcagcagcagtagtatcagtagcagcagcgatagcccaatcgctatccttccacatccagatccaatcccatcaacatcgttctcttcagcgtcgcaacgaagtgaagaggagctaccaggaacctcagcagcctccagaaccgacgagatgtgctcttgtgatagccagaatcttgcagcatccacagccgcgacttccaatggcaataaacgtaaacggcgtttaagcagcgattcaaacgaggaccctgaactcggttttgagcctccatcagctaagcgccagcagcgactgcccgctttgtacggcagcgagcagggcaatctgtcatcggttgcctcctcggtctacacctcgcccgttgtctcggttgatggccagagtacccaggagctgctcagcatacgtagctcaccggccgaggatctgtcggaggcgccacacagtccgctgccggacagcccggacagtccgccgagtccggatcgtggaagcaagcagacgccagtggtggtgcgctacgctgcggagcaggtggtgaccagtacggtggtcacgcagaagacggaggatgatgaccttttggacgacagctgcgaggactactcgtacgacgaggatgatgaggatgacgttgaggaggaggacgacgacgtggagatctactcctccacaatttctccagcctcctccggctgcagccagcagcaggcggtgaatggagagcgtactcccggcctgccaaaacatcaggagcagatccatcatccggtcagtgacctgatgattaacatgcggacgcccatgtcgccggctgtggagaacggtctgcgccagtgcccacttcctgcgctcgcctgggctaacgccgccgatgtttggcgcctgatgtgtcaccgggatgagcaggactcgcgtctgcgcagcatttcgatgctggaacagcatcccggactgcaaccacgtatgcgtgccattctcttggactggttgatcgaggtctgtgaagtttacaagctgcatcgggagaccttctacttggccgtcgactacctggatcgctatttgcatgtggcgcataaggtgcagaagacgcacttgcagttgatcggcatcacctgcctgtttgtggccgccaaggtagaggagatttatccgccaaagatcggggagtttgcttatgtgacggatggcgcctgcacagagcgggacatccttaaccacgagaagattctgctgcaggcgctcgactgggacatcagccccatcaccattaccggctggctgggcgtctatatgcaactgaatgtgaacaaccgcactccggcctcgttctcccagattggcaggcaaaagagcgcggaggcggacgatgcctttatctacccgcaattctctggctttgagtttgtgcaaacctcacagctgctagatctgtgcaccctggacgtgggcatggccaactattcctactcggtgctggcagcggccgccatcagtcatacatttagtcgggagatggctttacgctgttctggtctggattggcaggtgattcagccttgtgctcgctggatggagccattcttccgagtgatctcccagaaggccccctacctgcagctgaacgagcagaatgagcaagtcagcaacaaatttggcctgggactaatctgccccaatattgtcaccgacgactcgcacattatccaaacgcacacaactaccatggatatgtatgacgaagtgcttatggcccaggatgcggcgcatgccatgcgcgctaggattcaagcttccccggccaccgcgctgcgcgctcccgaaagtcttctgacgcctcccgcctctagtcacaagccggacgagtacctgggcgatgagggcgatgagacgggggccaggagcggcatctcctccacaaccacatgctgcaacactgccgccagtaacaagggcggcaagagcagcagcaacaattcggtgaccagctgcagcagtagaagcaatccctgagagattcgcctcactgctcttggccatcatcctctcacactcaccacacccgcccaaacagtctacgttaagtgtttcttatatttaaattatttttgttaagtgaaaagttattagttgcctaattcctatgctacaaacatatttaatttgaaattatctacgcgctcttgattctcaactcgcgatataatcattttcctcgctcagcttaatatttaactttgtgtatttatagaaaaaacagaaatataattttaaatgtacactatctataaagcgctcaagcttatatatatatatatacacatacacttatagtatagcagaccagacaaaactgaattaaccattagactaatacctgctgaaaaggagcacaacactatccagaattcagtggtgtgacgctctcacaaaccaagttgggtgcctcaaaaatgaaacaacaaaatatgttcgcaatcatacatgtttagctttcaaccagtcagtcaatcatttgatatcaccaatcaccaagcagcaactaacaaaactaaaactgacaaacagaagagggggcagtagcggcccagagcacagtacttgactaatcaactaaaattagcatataagtcgagggaatctatctaactctactaatgcatttcattcgaccattaatcctactaacaatgaatcaacaaacaagacaagtccacagctgacatggagtgacaaaaagaaaatggcaattgaagaagtaaagaattaaatattcatgaattgaaaccccagaacagactatatgtattcatatatacatcattgtaaaatttttttaattagactaatttgccataatttgctaagcaaataaattctgtacataaaacaaaacaatacaaaacgcacaaaaacaagaattaaccgtaactgaaacgcatataatatattattatataagtgtacaattctttatatggcttaaaatattttatgtacattcaaaaggcaaccacgcaaggtagaaaaatattattattcgttagcttaggcataaataacatgtaagtgttcatacgattaaggctggattgaaaacaaaaacaaacaaaaaacaactaaaagaaaagcaaacaaaaaaaaaaactaatctatttatgttttatttgtagttttaaaagcaataatcattttaaaattatgaatttaattttaaataatttcagaactacgcttatatccatgatttgatgttaataaataaacgatcgcaaaatcgtaaactaaacaaatcaagttgaattgaatgagtaaataaatatatacttttgtaaataaaactgaaatcaattcaaa

SEQ ID NO: 7593 - protein, 709 aa, DROSOPHILA
MGLNAKSVCSTSSTEPNGSIVTTAPSNGEVSSSIVVVVSSSSISSSSDSPIAILPHPDPIPSTSFSSASQRSEEELPGTSAASRTDEMCSCDSQNLAASTAATSNGNKRKRRLSSDSNEDPELGFEPPSAKRQQRLPALYGSEQGNLSSVASSVYTSPVVSVDGQSTQELLSIRSSPAEDLSEAPHSPLPDSPDSPPSPDRGSKQTPVVVRYAAEQVVTSTVVTQKTEDDDLLDDSCEDYSYDEDDEDDVEEEDDDVEIYSSTISPASSGCSQQQAVNGERTPGLPKHQEQIHHPVSDLMINMRTPMSPAVENGLRQCPLPALAWANAADVWRLMCHRDEQDSRLRSISMLEQHPGLQPRMRAILLDWLIEVCEVYKLHRETFYLAVDYLDRYLHVAHKVQKTHLQLIGITCLFVAAKVEEIYPPKIGEFAYVTDGACTERDILNHEKILLQALDWDISPITITGWLGVYMQLNVNNRTPASFSQIGRQKSAEADDAFIYPQFSGFEFVQTSQLLDLCTLDVGMANYSYSVLAAAAISHTFSREMALRCSGLDWQVIQPCARWMEPFFRVISQKAPYLQLNEQNEQVSNKFGLGLICPNIVTDDSHIIQTHTTTMDMYDEVLMAQDAAHAMRARIQASPATALRAPESLLTPPASSHKPDEYLGDEGDETGARSGISSTTTCCNTAASNKGGKSSSNNSVTSCSSRSNP

SEQ ID NO: 7594 - DNA, 2832 bp, DROSOPHILA
cctgaggcaactgatcctggcggagcggtacctaaagcgactccgctcaaatcaggagttgtacaagctgcaccagcaggtccatcaaacctaccaaaagatgcacaattcaccgggactcaaacagtcggctatggtgaagcacttcaccgtccaacccattccgtgcgagcagcacggttacgtccttgacctgggttccatggccaggaactccgtgcggcgcttccagctaaagctgcacttcttcggacccggcaaactcattgcagcagcacgcacggccgtcaggattccgggcttatatgtggacttcaatgtcacggatgccaagcagtaagtagtataatctgatgcattttaatttataagaaactcaaataatatcaatatccctaagctccgacaaaaagttctccttctgggctgagaagtgcacggcactggagtattttaagaaaaagtacaggaatatgatggagcgactgatggacgcggagcaggatcccaaggtgaagcacgcccactcctttgacctggacactatggtccagcaccagcgggatctggcgcccaaggaccgacgcctaatcgaggaatactacaacagcctgaaccgttccgtttatccagaccacaagcaccacttcacgctggccaagatcttctcaggctgcttgtccaactattccggagtggacgtgaccatggttgggctctttaagccggagtcgcggttctacaagaaggatcagcacgtggaggactacctcttcatcgatgtaagttacactgacataagctgagctaatccttaaatgctaacacgtatcccacagttgcacatgggaccgactcttcccatcctactgaaggccgtgctcgtatcctagtgaagtccttaagatttgtatgcatttattgtgggtttcattccattcggagtgtatgggggcttcttagtcttatgtgcagtaataaagcttatactccaaagtcctcagcagtacatgttgagctggcggaagaagtagtggaaaatgagcagaacgcagaaggagctggtcacgggcagaccagccgccttgatccatccgaggatgttgaagtcgtccgggtagaactcgaactgctccgtgggtatctcgccgcagttggagatcaccacgggttccacggggaagtcatccgtatcggtttttacctggaacgaaaaatgtgtcagaaaaagtttcttacatttctgtgtggtggctatgcgtttaagccacgattgtggttccggtttgcttgaatactcacatcctcaatggcatagatggtgtccattccctccagcaccttgccgaaaacggtgtgctttccgtccagccacttggcgcccacggtggtcacataaaactggcagccattggtgtccgggccccgattggccatgcccaagtaaccgggtctgttgtgctccaccgccagagccttatcctcgtccggaaagtagtccccatagatgctaatggagccagttccgtcgccgttcacaatgtcgccgccttggacgagaaagcggtccaccacgcgatggaatcgcgagcccacgtagctggtcccgttgatgccgcgcaagcaaatgtgccggaagttggccaccgtcttgggagccagcttcccgaacagtccaaacgtgatcctgcccaccggcttcttgttgtgcttcacatccatgtagatccgagacgtgaccgtgaagctcagaccactggccacggccagaaaggcgctgcacaggattatccgattgagcaatgacttcatgattttacggacctaacgcgctgatgaaatacacgtaactgaaacgaagactggactgtggaaactatacgagtagaaagtcaattctgggtcgcgggcctggaaacggaagccacaaaagtttcaggttaagtgcaagcaccgcatgatgatggcataccctctgcagacatcgatttcagcacccggcagcaaacatcttgttcggtttaatggcaaacgtaatgtttggctcaactatgttaataactaaaacttcaaaagtatcgtttctaaaagtgcattcaattcgtttcactaaataaatcaactgcattggctttgcatcatatgacttgatatttaattgtgtaaatttaaacttataaatatttaaccttatggtaatcagcataataataaagttagcggggcagggaattgaacccagatcttaggctaaaaacttagggatagactgcgtctacacaaaaatataccgaatacatatatacacttagattaacttgcggcggctaacctggatacagtcttcatgtggggactcgatttcggaaatcttggcctccgttgcgcgtctgagatctatgcagctgaatcttccgcagaagattcgggtaggtcctacaagcgcttcttctgcggatgcacatacttgcagttcttgcccatgttgcagtgtcctcgcatgaactgcttgcagacgccggtgttgccattgcctcctccacctcctcgattggggccagatcctgctgagcgccagttgccgccggagttctcctggaagttgttgcccccgctgcgccagatgccgccgccgttgtttttgttcctgttgttgttgttgttgttattcctaggtccgcccatcatcagtcctggccccattccattgggcggcccgttcatcatgggtccattgggtgggccgttcatcatggggccgttgggtcccatcactggaccattgggtcccattaccggtcccggacctggtccattcatcatcatgggcgg

SEQ ID NO: 7595 - DNA, 734 bp, DROSOPHILA
cgcgttaggtccgtaaaatcatgaagtcattgctcaatcggataatcctgtgcagcgcctttctggccgtggccagtggtctgagcttcacggtcacgtctcggatctacatggatgtgaagcacaacaagaagccggtgggcaggatcacgtttggactgttcgggaagctggctcccaagacggtggccaacttccggcacatttgcttgcgcggcatcaacgggaccagctacgtgggctcgcgattccatcgcgtggtggaccgctttctcgtccaaggcggcgacattgtgaacggcgacggaactggctccattagcatctatggggactactttccggacgaggataaggctctggcggtggagcacaacagacccggttacttgggcatggccaatcggggcccggacaccaatggctgccagttttatgtgaccaccgtgggcgccaagtggctggacggaaagcacaccgttttcggcaaggtgctggagggaatggacaccatctatgccattgaggatgtaaaaaccgatacggatgacttccccgtggaacccgtggtgatctccaactgcggcgagatacccacggagcagttcgagttctacccggacgacttcaacatcctcggatggatcaaggcggctggtctgcccgtgaccagctccttctgcgttctgctcattttccactacttcttccgccagctcaacatgtactgctga

SEQ ID NO: 7596 - protein, 237 aa, DROSOPHILA
MKSLLNRIILCSAFLAVASGLSFTVTSRIYMDVKHNKKPVGRITFGLFGKLAPKTVANFRHICLRGINGTSYVGSRFHRVVDRFLVQGGDIVNGDGTGSISIYGDYFPDEDKALAVEHNRPGYLGMANRGPDTNGCQFYVTTVGAKWLDGKHTVFGKVLEGMDTIYAIEDVKTDTDDFPVEPVVISNCGEIPTEQFEFYPDDFNILGWIKAAGLPVTSSFCVLLIFHYFFRQLNMYC

SEQ ID NO: 7597 - DNA, 4662 bp, DROSOPHILA
cctgcttttttgctatttcagcctggttcatttcgcattttcccatttgatttcaaattcacctgcggtcgtgtgcgccctcgttgaccgcaaatttctaataacaatttgtaattgccataaattaaatcactttcggcgccccagtctcccgctgatccattcacaccatcgaactttctatcgagttaccgaaactatttcgattattagttttttgcggcctatggaattctgcaaaatcatttattactaccccataaatattccgtatagaagatgctctgtttcgttgtcaggttaaccatattccggcgatttttcaccattttattgctgatattttcgtggcttgtaaaactattgtgggcctctcagattgtttagttttaattaaaattattcttatcattattcgctcgttaatataatcatttaaatgaaacagtaaaatccaaaggttacatataatatgtataagggtggaagcagataagaaccacaatatcaacgcacagtttacaaaaatcaacccaactgcagatgtaacattttgctaacatactttcgggggtaagactttcacgcactttcactgcaataattcccaactgcttctggccatcagctcatggaaacccattccctgagctgaggaaagcatacttacctggcgtagaggttaaccgtgatcacgaaggcggttcctccggagtgaggcttggccattgcacctcggctgagttgacctctgcgattattcctaatgtgaataactcgtgcgtgtaatttttggtagccgggaatggcgttcgcgccgtcccgacatctgcaataaattttaaaagtatcattattttcatatatgtagcctgccttgcaactacattgatagaatgaataaatgacccccgaaagtatatttctaccgatgaggaacgttccttccttttcaaattgtggggtcctctttagatatattgaaaacagggccacttttacttggttttcgaaagtttattagactttttgcacaccttactagctaggtatcagacactctaaaaacatccgcgctcattcagtagatcgttccgtgatcgttttccggatttcgcaatcgaagccgcacacacaacgacgacgctcagaacttgaagtacttggtgtagtaatcgttgaagaaggtgtagtcgaagtggccgtagttggagtagctcttgtacttgtagtagggctccatggtgtcggcgtggtagatggacacgtccttgaagtacatgttgggcacgaagaactcgtactcgtcgatcgcacggtcgaagggatagccgaagggcaggctgtccacgtagcgcgctccggatccgataccacaggagtaggtgtagtcgaaggtggagaactgctcgtgggcgggggccacgtacggcaccaccatgaagaacatctgcatgggcatgcccttctgccagcccatgggcaggacgaggcggtcggggaatccgcagtggggctcgctgatgtccagggggaagtcgtacttgccgtcgaaggccatcatcgtgtagtagtagagctcggtgtaggtggtgcggtccttgacggtccagtagaactcgctggacttgcgagtgatcttgttggtgccggccttcagctcgtagtagaactcgtcgatctccatgaagttcatgcggttctcggccagggaaatgactttgccgaactcgtcgaacttgggtcccaggaaggcgcggatgaccaccttctcgaccttctcggactcgatggtgtaggtgtaggtgaagggcttgtggttgaggcgcatctggcgggcgaacagcgacatgtcccacacgaacttgccgtcctggaagatcatcttgtcgttgagcatgttggtcacatcgaaatcgaccaggtcgaagtaggtggttaggtcgctgacctccacgttcttcatggtcacgccgggcatcaggagctgctccttggtgtacttgggcaggtagtgcatgaactggaagtacacctgggcgatggacttgtagaacatgtagtacatcgggtcgcgcatcatggtctcgaagttaagcatcacgttggggtacacgtccatctggtaatagtcggcgtcagcgaagtacatgtgggcgagcatgtaccagaactggtagaacatcttgtccatggcgtccacgttgccctgcagcatgttgccaatgaactcgatggcctcgggtttgcgcagatcgatggtgtggccatcggcggtcttgtagtagcccatttcgacgatgttgtgaatgcgcttcaggaagccggtgatcttgtccagcatatcgtagttggcgtaggtctccatctcgtagtagttcttgcggaagctgtagccaatgccgttgtagtagatcagctgggggtcgtagcccatctcgatctgctggtaccaggagaactcggggatctcgccgaatccgtgcgacaggcgctccatgtagtatctgctgagcagctggtgcacgttgtagagccaccactcgccgcgacggtcgttcttgagatcgaaggtgttgccgtccaggaagaaggagtagtccatgttcagatagtaccagtaggcgttccagcccagatcctcggtgaagtaggacagcttggactccttgttgtagaggttcaggtcgcgggtgtagtccacgggcatgtagaacttcttcacgtccttcatcatcgacagccacttggtctcctggttgaactcgtagatgttctcgcgcagaatgaacttgtcctcggtgtaccagtgctcgcccagacccatcagtttccaccactgccaggtcttgaagtccttcatgtaggtgtagtcgctggaccggtacatggttgagtagtcgtatccgttggtcttgtagtacacatccatgtactccttctcgtacatcgtcatcttcatccacatctcgtagtcgaacttctccgcttcgaacacaaacttgctgttgaagaagaactgtgggaagatctcgtagatcgagggcagcatcagtccatggaagtcgttgcggtggatcacggccatggtcagggcgtagacgaacatgccctcattcacgtgcatgcgggcccaggccacgttggcggcgaaggtctcccagtccttggcgtagtagaagaagttgaacagaccgcgggcctgcttggcgtgggacatgaccagggcgccgaagaactcgcccttgggcagcagggcgtgagccttgtaggcctcgaagaacttcttcatgtacatgtcgtagtgctggaagggatcacaatgatcagtgattagggagaggcacaacttcagccagtgctatatccacttacagtgtagtaggactcctcaaagtagaatttctcgccctgcttgatgtggtcctcgaacatcagcggatcctccacgcggtagacgatctcgaagaggaacttctgcttcatcaggaaggccttgtcggcgatcttgacttcgtgggtctggtggaagctggcagcggcggccaggcccaggcaggccagcaatgcgatggcgatcttcatgttgacggattcctgcaactctacacttgacactcaactgctccggatcagatgcacccagtggatccaatgcctaaagactgttgcctcactgccgtccacctggctgcttttatacccaagagtcccgcctacgatcgcagtgtccggagctcggaatctgctcggagatatcgcggtgcagcttgggggtcactgggtgtatctcaggtgctgcgatcgcgccatctgtccatctgtgccggactacctcttatcgccttgctaccctcttgtctcttatcaaagccagacttctattcatctggttgccaagagccagctctgcaggtgcaatcaagccggcattacgtcaaccaaattcaaatccgtgaccagctatctcaaatttcgttcaatgcatctttgtttgtgccaatttatttttagaattggtgcttcttctgcgccagaaaagataaatcagactggcgacatgtcctcaaaaatgtagatagttagaaatatgtatatgatacgtatatacatatatgatatggaaatccctacagtctacgtgcattaattgacttggcccacacacattcatctgcggaccagaagaggaggaactgcgtcaacttttgtgccgccatatgaggcagcgtgaaatccaatcaactttttctaatcaggcaaagtataaagtaaattcaattacgcggctactttgtaaatcccccaggatcacacgcctaggaaaaggaggcgtcctgcctgctgcgtgtgtgacattcatgtgggcagagtgtcgcgtcccaaaagaaattttcgaaaataaatagaattccggcaaagtcaaagcagggtaaacaagtgcaaagtgttgggcgccgaaggggaatccatggcaactaatcagaaattccgtctcatgcgctgatgtgaagtgtgccagtgccaccaaaaaaaaaaaaaaaacataaaaaggagcgacagacagcacaggacgaagacggacccgcgataaggagatccaggacagaagcccaggacagaaacccagcccaagtggcatcgctgcggcgcctgggatta

SEQ ID NO: 7598 - DNA, 2594 bp, DROSOPHILA
ttaggcattggatccactgggtgcatctgatccggagcagttgagtgtcaagtgtagagttgcaggaatccgtcaacatgaagatcgccatcgcattgctggcctgcctgggcctggccgccgctgccagcttccaccagacccacgaagtcaagatcgccgacaaggccttcctgatgaagcagaagttcctcttcgagatcgtctaccgcgtggaggatccgctgatgttcgaggaccacatcaagcagggcgagaaattctactttgaggagtcctactacactcactacgacatgtacatgaagaagttcttcgaggcctacaaggctcacgccctgctgcccaagggcgagttcttcggcgccctggtcatgtcccacgccaagcaggcccgcggtctgttcaacttcttctactacgccaaggactgggagaccttcgccgccaacgtggcctgggcccgcatgcacgtgaatgagggcatgttcgtctacgccctgaccatggccgtgatccaccgcaacgacttccatggactgatgctgccctcgatctacgagatcttcccacagttcttcttcaacagcaagtttgtgttcgaagcggagaagttcgactacgagatgtggatgaagatgacgatgtacgagaaggagtacatggatgtgtactacaagaccaacggatacgactactcaaccatgtaccggtccagcgactacacctacatgaaggacttcaagacctggcagtggtggaaactgatgggtctgggcgagcactggtacaccgaggacaagttcattctgcgcgagaacatctacgagttcaaccaggagaccaagtggctgtcgatgatgaaggacgtgaagaagttctacatgcccgtggactacacccgcgacctgaacctctacaacaaggagtccaagctgtcctacttcaccgaggatctgggctggaacgcctactggtactatctgaacatggactactccttcttcctggacggcaacaccttcgatctcaagaacgaccgtcgcggcgagtggtggctctacaacgtgcaccagctgctcagcagatactacatggagcgcctgtcgcacggattcggcgagatccccgagttctcctggtaccagcagatcgagatgggctacgacccccagctgatctactacaacggcattggctacagcttccgcaagaactactacgagatggagacctacgccaactacgatatgctggacaagatcaccggcttcctgaagcgcattcacaacatcgtcgaaatgggctactacaagaccgccgatggccacaccatcgatctgcgcaaacccgaggccatcgagttcattggcaacatgctgcagggcaacgtggacgccatggacaagatgttctaccagttctggtacatgctcgcccacatgtacttcgctgacgccgactattaccagatggacgtgtaccccaacgtgatgcttaacttcgagaccatgatgcgcgacccgatgtactacatgttctacaagtccatcgcccaggtgtacttccagttcatgcactacctgcccaagtacaccaaggagcagctcctgatgcccggcgtgaccatgaagaacgtggaggtcagcgacctaaccacctacttcgacctggtcgatttcgatgtgaccaacatgctcaacgacaagatgatcttccaggacggcaagttcgtgtgggacatgtcgctgttcgcccgccagatgcgcctcaaccacaagcccttcacctacacctacaccatcgagtccgagaaggtcgagaaggtggtcatccgcgccttcctgggacccaagttcgacgagttcggcaaagtcatttccctggccgagaaccgcatgaacttcatggagatcgacgagttctactacgagctgaaggccggcaccaacaagatcactcgcaagtccagcgagttctactggaccgtcaaggaccgcaccacctacaccgagctctactactacacgatgatggccttcgacggcaagtacgacttccccctggacatcagcgagccccactgcggattccccgaccgcctcgtcctgcccatgggctggcagaagggcatgcccatgcagatgttcttcatggtggtgccgtacgtggcccccgcccacgagcagttctccaccttcgactacacctactcctgtggtatcggatccggagcgcgctacgtggacagcctgcccttcggctatcccttcgaccgtgcgatcgacgagtacgagttcttcgtgcccaacatgtacttcaaggacgtgtccatctaccacgccgacaccatggagccctactacaagtacaagagctactccaactacggccacttcgactacaccttcttcaacgattactacaccaagtacttcaagttctgagcgtcgtcgttgtgtgtgcggcttcgattgcgaaatccggaaaacgatcacggaacgatctactgaatgagcgcggatgtttttagagtgtctgatacctagctagtaaggtgtgcaaaaagtctaataaactttcgaaaaccaagt

SEQ ID NO: 7599 - protein, 789 aa, DROSOPHILA
MKIAIALLACLGLAAAASFHQTHEVKIADKAFLMKQKFLFEIVYRVEDPLMFEDHIKQGEKFYFEESYYTHYDMYMKKFFEAYKAHALLPKGEFFGALVMSHAKQARGLFNFFYYAKDWETFAANVAWARMHVNEGMFVYALTMAVIHRNDFHGLMLPSIYEIFPQFFFNSKFVFEAEKFDYEMWMKMTMYEKEYMDVYYKTNGYDYSTMYRSSDYTYMKDFKTWQWWKLMGLGEHWYTEDKFILRENIYEFNQETKWLSMMKDVKKFYMPVDYTRDLNLYNKESKLSYFTEDLGWNAYWYYLNMDYSFFLDGNTFDLKNDRRGEWWLYNVHQLLSRYYMERLSHGFGEIPEFSWYQQIEMGYDPQLIYYNGIGYSFRKNYYEMETYANYDMLDKITGFLKRIHNIVEMGYYKTADGHTIDLRKPEAIEFIGNMLQGNVDAMDKMFYQFWYMLAHMYFADADYYQMDVYPNVMLNFETMMRDPMYYMFYKSIAQVYFQFMHYLPKYTKEQLLMPGVTMKNVEVSDLTTYFDLVDFDVTNMLNDKMIFQDGKFVWDMSLFARQMRLNHKPFTYTYTIESEKVEKVVIRAFLGPKFDEFGKVISLAENRMNFMEIDEFYYELKAGTNKITRKSSEFYWTVKDRTTYTELYYYTMMAFDGKYDFPLDISEPHCGFPDRLVLPMGWQKGMPMQMFFMVVPYVAPAHEQFSTFDYTYSCGIGSGARYVDSLPFGYPFDRAIDEYEFFVPNMYFKDVSIYHADTMEPYYKYKSYSNYGHFDYTFFNDYYTKYFKF

SEQ ID NO: 7600 - DNA, 5640 bp, DROSOPHILA
acaaaataattaaaaattgaacacacagaactgcggagcagacaaacaaacggctagcaaatgacacttgccacggagtggaatggaatgcaatgcgatatggcggcaagcggcacttcacacttgggaaaatgaaatggacaaatcattaaaaaaaatcatagggagacttaactttaggatcttccattaaggagtttaagcgaaattgctgatctatatagatggtaaaagatagttacagcatataaaatacaactgttctctaaacattttaaaataaaataccaattgctcaagttacacttaatttttgtgagtgcacagcactctatattgtcagcgggcaacatcttgttgttgttttttggtgctggaaccgtcgctgtcgttgtcattgctgctcattttacacaaaccaacaagggccaaaggctacccaacacgacacggcaatctccgcagcaggggcttcttggtccttcgtccttcgtcctggcacccttccccccgctggtggtcccgtttggcgctcatctcgcctgcagctgcttaaataattttcgcgatggggagcgagttcgtgttcgtcagttgccggatataaaatgtcaataaggtccaataacgcaattgacaagctgagacagcccctttcgcctcgccaggagctcaactgcggcaacaataaactgagaacggctgccaaggacgaggagcagcaagggttaatgcagttggccaccgaaccgaacactaacttcctgcatcgacatctcgtgttgcccgcggtatcagaaaggaatcccccgccaagtaatttcaagcttaaaggagctccaaattgattacggctcagtggatgggcgtagttctcattgggcgtagttcattgagcactgagcgaaaattggctatcaaaagcaagtttaaaaatcacatatttattttataaattaaatgtattataacttttttttttgttaaacacatgcacagcttagacccttgcctccttttctccccttcctgcgttgttacttcccgaggaggaaccagatccttgggccatttcgcgcatctcctccgatgaacgcccgatgacaactcggcggctcgacttgggagtgcggtccagtgacttatccaatgatcttcgcggtgtagtcctgacactggagattggagtgcctgccacgatgggtttcctattgttccatacgcaaagcacaaagcggatctccttcttgaaggcgtccttaaaagtgagctgtgaaaaatattcgacacgttttaatatgttcagcatcgattatctgattgatcagatcaattgagataagcctcaccctttcttccaaagccacttgctgcacgtagaccaaaaactccgtaatgccgatgagaaaggcaatcaggattccggcgtagagcgtgtagaatatgccgcgcagctcctcgaaggtcatgtcaggagtggcatcgggatcgggttcctcgaagcagctggcattcgggttcttccaccacttttgcttgagatcgtacagctcaccccgctcactcagcttcaggatggccacactcaggttggatctgtactcagccccaaagggaaccgcaatggcgtagtgcttctccccgaacttttctccaacggagcgcaggtcgcagttctgctcgcgatggtactccaaggtggtggtctccatgaggaacatgtagtcccctcgattcttccgcacgcggtcaacaccttccagattgtcctttgtgtaggcggatgggtcgtcgttgttcatgagattgaaggccaggcgatagacggtctcgttggagtcagccaggagattgtacgtactcccgccgtagatggtaccgaacttcactttcttctgggcactcagatccttcaggttggctatgctgccctccattttggagctggtcaaaaacgcagctaagttggccgtataggagttggctatgatgatggcaaaaatccaccacgtggcctcaaacattcgcacctgaagacaggctagttgtagtgtttcgtaatgggctcattttggagtctcacctgtggacttctcggtagaatgtcgcatcctgctgtcatgatggaggccacagtcaaccagccagtattgtggatgcgccactgattctcgagtacctcgggatcccgattgcacggatgtgggttctcccagtccattttggagatcctcgctactatggtcttgaggaaggtcattacgaacacggatatgagaatccagatccagacttctcccccaaaaggtgccaggtatgcatcgagtgtcttttccacatgcggacttttgtatgccaggatactgacacccagctgcataaagggcactgtaaaatccacagcggtctttcgcgcttgggtgatggtcaggtcgcagattcccatgtgtgcatcctaagaaagcagttgatattacatcctgagcactcgtccttaccacttacattattgattatctcgccaatgatgccgttccactgcttggtttccttgtccagttttccgtactgctgatcagccacgggaacgaagacgtactcgaatcccacgtgtctggcaatggcgtcgataaggtccacggcatatccttgatagagggcgttgcccgtcagattcagctccctcgcagtctcgttgtacgagaagtatggtgggccaattctggtggccacccggtaaatcatcttcttctgcgccttgacgtccacattgagctgcgttatctgaccccgagggtcccagatggctatgccaatgccgtccaaggggtcgtagacctcgatgttgaacgttatccgctgtccatcctcgtcgaactgcaggatacttgtccgaaagttcgtgttgttcacgccggaagtctgcaacacacacctcgcagattaacgtttcgattcctcggtttatgcggaaagtagttcttacccctttcatgaggcgtgccagataacgccccatggcccaggtgcgacctccggatgcggcaaagtcgcaggttattcgcggcaccaccatcctgtccgggtagaagaagctggcattgcgccaggactgcgcaaaaagctgcagtgcatcatgtatcaagtcgtggatgagggtgcgaggcggatcgctgctttcgtaaacgatgttgtccctttgggtgacatatccgtaaggtagggagtactgcgaaaccaaaatgagttagtgtgcccaagggaatagggctttgtctgcttcatttaccggcggaggatcgggattgaccaaaagacgagcagcagttatgttcacggcaaatgtttcgttatccgccgctagttcctccagatgatcggtgtaggtttccaggttcgtcaggaatatatgctgttttaaagtttataaaagctgtttctcttagtggatcccatggattactcacattgtactgtccagtcagaccgaactcagtggaggaattcagaagctccaccagcatgttgggctcacagtccaaaaccactcgccgctcgccccgtatgctcttccacatgacccggaagtcgtcatccttgtggaactttcgcacccgcaccacatcattgtgaacctctcgcagctgcagaagatcctgcagtcgagctgctgccctggctgtgggaagttcgtcctggatataaacaaattctcttgaatgctcctactcaccatcgtccgcatcgtagacaatggtgaacttgcgccacccaaagttttgtacaatatccgcgtaggccttggacaatatggcctgggccgggtagaggttaagggtcatttggtggttgggcttctcggcctgaatgccctcgtccgatatgtcgaactctatgtgcggaatgccggtactattgcacaccaaggccacaatgtctgcaaaaagagagtagaggtctgctcattaaacagatgatatgatacccatgacgaatacgctctgttggcaaacaaatctgggagatgccgtcaaagttttcgtcgattttcttgtgcccaattttcctcgcgttctattttgctttcgcgttctacacaagattttcccgcactctcttaccgctcgccgcctttgaacttggtccgaaaatagccgcgacaccattatctatgagatcgcaggctgaaagcgaaaatatgttcgagttatttggaatagagtgcgtggatgggtggactcaccatgttcctgcattgtgacactcccatcctcgggcttcaggcgctttatgagcggatagaaacgcatcgtctgttccgattcaggtccattgatggcattgaccaccgtcatgaactctttctccagctccagctcatcgtcgtagaagaaggcgcctgcgggttgcacaaaaaagtaggtagctgctttttcccactcctaaccacaactcaccaatgttgatttgttgcccccggctgcggcacatgaaaaatgcactccacatgcagccgagcaaaagtatgcgctgccacatgcctgcttctctggaattcccaccgaacatctgtggccagcgggctgagctatttccggacagttcttttttcatgcgagcacacgggctggcgattccatggcaactgggaaagctcttcgggccattggagatcgaatgcgacaagtggagatcggagatcagctgactgggaaagctctgtcagctgacatgctgtactatataagattctaagcaaatatttccaatatttaatttagttttgtttagctgacgaaggatcagcgattggctccccgtggagcagagaccattaaagccggacacggttcaatcagccgcagtctttcacccacgagcggagctcccggttccaggtgctccattgaaaggcgatgaggtgtcaatttttcatggcaaccagacgacagcgaaggccttccagccatctccttttgggggatttgcataaagggagcattcggcattcagccgagcgtacttttaatggctggggactacatacaacaatatagccgctggtgtcattttagcctttgccctgtgtgtgtttgctcaaaggattttgcggatgcggaacacgtttcgtgttttagcccggccaccttttgtcgaaatttgaataattcccaaccagagtgcggaggtaggtgagtcccggccaaccgttaatattcatttgcggagtgggcaaaaagccaaatattcaatatgcctcgagtcaggctgctgatgatgataaatgctcatctgggcagggcgactattccgagtattgaatacgtagcccggtttgtgccattagcgtggaatttcccgatctttcttctccttttcgattaaactttgcccggaattcgctggccgtaatcaagccaaagccaagaagtaagcaaaaaaaaaaaaaacagccagagcaaagcacttacacaacattttctattacacgaaatatttatggttatcatgcggaggcaaaaacagggccacctatgaacacagagtggaaaggaatgccctgcagctggccaaaggagctggcaaaaccgaaacccacaccaaatgcgcactctggtccacagcaaagctcaccgaaca

SEQ ID NO: 7601 - DNA, 2930 bp, DROSOPHILA
atggaatcgccagcccgtgtgctcgcatgaaaaaagaactgtccggaaatagctcagcccgctggccacagatgttcggtgggaattccagagaagcaggcatgtggcagcgcatacttttgctcggctgcatgtggagtgcatttttcatgtgccgcagccgggggcaacaaatcaacattggcgccttcttctacgacgatgagctggagctggagaaagagttcatgacggtggtcaatgccatcaatggacctgaatcggaacagacgatgcgtttctatccgctcataaagcgcctgaagcccgaggatgggagtgtcacaatgcaggaacatgcctgcgatctcatagataatggtgtcgcggctattttcggaccaagttcaaaggcggcgagcgacattgtggccttggtgtgcaatagtaccggcattccgcacatagagttcgacatatcggacgagggcattcaggccgagaagcccaaccaccaaatgacccttaacctctacccggcccaggccatattgtccaaggcctacgcggatattgtacaaaactttgggtggcgcaagttcaccattgtctacgatgcggacgatgccagggcagcagctcgactgcaggatcttctgcagctgcgagaggttcacaatgatgtggtgcgggtgcgaaagttccacaaggatgacgacttccgggtcatgtggaagagcatacggggcgagcggcgagtggttttggactgtgagcccaacatgctggtggagcttctgaattcctccactgagttcggtctgactggacagtacaatcatatattcctgacgaacctggaaacctacaccgatcatctggaggaactagcggcggataacgaaacatttgccgtgaacataactgctgctcgtcttttggtcaatcccgatcctccgccgtactccctaccttacggatatgtcacccaaagggacaacatcgtttacgaaagcagcgatccgcctcgcaccctcatccacgacttgatacatgatgcactgcagctttttgcgcagtcctggcgcaatgccagcttcttctacccggacaggatggtggtgccgcgaataacctgcgactttgccgcatccggaggtcgcacctgggccatggggcgttatctggcacgcctcatgaaaggggtaagaactactttccgcataaaccgaggaatcgaaacgttaatctgcgagttcgacgaggatggacagcggataacgttcaacatcgaggtctacgaccccttggacggcattggcatagccatctgggaccctcggggtcagataacgcagctcaatgtggacgtcaaggcgcagaagaagatgatttaccgggtggccaccagaattggcccaccatacttctcgtacaacgagactgcgagggagctgaatctgacgggcaacgccctctatcaaggatatgccgtggaccttatcgacgccattgccagacacgtgggattcgagtacgtcttcgttcccgtggctgatcagcagtacggaaaactggacaaggaaaccaagcagtggaacggcatcattggcgagataatcaataatgatgcacacatgggaatctgcgacctgaccatcacccaagcgcgaaagaccgctgtggattttacagtgccctttatgcagctgggtgtcagtatcctggcatacaaaagtccgcatgtggaaaagacactcgatgcatacctggcaccttttgggggagaagtctggatctggattctcatatccgtgttcgtaatgaccttcctcaagaccatagtagcgaggatctccaaaatggactgggagaacccacatccgtgcaatcgggatcccgaggtactcgagaatcagtggcgcatccacaatactggctggttgactgtggcctccatcatgacagcaggatgcgacattctaccgagaagtccacaggtgcgaatgtttgaggccacgtggtggatttttgccatcatcatagccaactcctatacggccaacttagctgcgtttttgaccagctccaaaatggagggcagcatagccaacctgaaggatctgagtgcccagaagaaagtgaagttcggtaccatctacggcgggagtacgtacaatctcctggctgactccaacgagaccgtctatcgcctggccttcaatctcatgaacaacgacgacccatccgcctacacaaaggacaatctggaaggtgttgaccgcgtgcggaagaatcgaggggactacatgttcctcatggagaccaccaccttggagtaccatcgcgagcagaactgcgacctgcgctccgttggagaaaagttcggggagaagcactacgccattgcggttccctttggggctgagtacagatccaacctgagtgtggccatcctgaagctgagtgagcggggtgagctgtacgatctcaagcaaaagtggtggaagaacccgaatgccagctgcttcgaggaacccgatcccgatgccactcctgacatgaccttcgaggagctgcgcggcatattctacacgctctacgccggaatcctgattgcctttctcatcggcattacggagtttttggtctacgtgcagcaagtggctttggaagaaaggctcacttttaaggacgccttcaagaaggagatccgctttgtgctttgcgtatggaacaataggaaacccatcgtggcaggcactccaatctccagtgtcaggactacaccgcgaagatcattggataagtcactggaccgcactcccaagtcgagccgccgagttgtcatcgggcgttcatcggaggagatgcgcgaaatggcccaaggatctggttcctcctcgggaagtaacaacgcaggaaggggagaaaaggaggcaagggtctaa

SEQ ID NO: 7602 - protein, 942 aa, DROSOPHILA
MWQRILLLGCMWSAFFMCRSRGQQINIGAFFYDDELELEKEFMTVVNAINGPESEQTMRFYPLIKRLKPEDGSVTMQEHACDLIDNGVAAIFGPSSKAASDIVALVCNSTGIPHIEFDISDEGIQAEKPNHQMTLNLYPAQAILSKAYADIVQNFGWRKFTIVYDADDARAAARLQDLLQLREVHNDVVRVRKFHKDDDFRVMWKSIRGERRVVLDCEPNMLVELLNSSTEFGLTGQYNHIFLTNLETYTDHLEELAADNETFAVNITAARLLVNPDPPPYSLPYGYVTQRDNIVYESSDPPRTLIHDLIHDALQLFAQSWRNASFFYPDRMVVPRITCDFAASGGRTWAMGRYLARLMKGVRTTFRINRGIETLICEFDEDGQRITFNIEVYDPLDGIGIAIWDPRGQITQLNVDVKAQKKMIYRVATRIGPPYFSYNETARELNLTGNALYQGYAVDLIDAIARHVGFEYVFVPVADQQYGKLDKETKQWNGIIGEIINNDAHMGICDLTITQARKTAVDFTVPFMQLGVSILAYKSPHVEKTLDAYLAPFGGEVWIWILISVFVMTFLKTIVARISKMDWENPHPCNRDPEVLENQWRIHNTGWLTVASIMTAGCDILPRSPQVRMFEATWWIFAIIIANSYTANLAAFLTSSKMEGSIANLKDLSAQKKVKFGTIYGGSTYNLLADSNETVYRLAFNLMNNDDPSAYTKDNLEGVDRVRKNRGDYMFLMETTTLEYHREQNCDLRSVGEKFGEKHYAIAVPFGAEYRSNLSVAILKLSERGELYDLKQKWWKNPNASCFEEPDPDATPDMTFEELRGIFYTLYAGILIAFLIGITEFLVYVQQVALEERLTFKDAFKKEIRFVLCVWNNRKPIVAGTPISSVRTTPRRSLDKSLDRTPKSSRRVVIGRSSEEMREMAQGSGSSSGSNNAGRGEKEARV

SEQ ID NO: 7603 - DNA, 3605 bp, DROSOPHILA
gtttaaaacaaagaacaagaatgatttatttacggattaccctccgagctcgatttaacccgcagaaggggctgcgtggcttgagttagcatcgtgtctttgtacttctggtcgggtatgtacatattaaaagttttaaagtagtgcagtatgttttctaaaaagggaaaagttagactgaggtattctgagaacacattttcttttaggtttaccaactagaggctccttaagcttgtactcattggctatcttcttggctggccaggattcaggatccaactggtggtcattgatgaacttaagcgcctggcgcagtgtgcaatgaccggggctaatgcggttgggctccagatatccgtactcaaaatcatccggcgttttgcgttccaggggcagtggtcgctgttccacattgtccgccgccgcctcagctgcctggcgctcctgcactcgcttgatctagggaacatatagcaggttccatattagtattggtcgaaagtaccttctaaggtattaacccacaaatcgatcctgcgaggttacataaacgtctttcaatcgtccgtccaagctggagtctttcatattgagcttgtccacgaacttgggatccactgtaatggggaaaatgaagcattacactccaagggtgtttaattttacttacattccaaggtgcgctccatgtctctcaaattcgagtcaaatttgggcgccggcgttggcttctcgcgctcgaggacgcgatgtgcacgattctcgacattgaagcgattggcccggcgggcaaccattgaaaccacctgacccatgccaaaaatatattatgttttatttatgttgctaataattcacgtgaaatcgagaaaaaccaaaagaattataaaagcatggccagctgttatatgttttcgaatcagctgttcgttatgctatcgataagttattgggttttgcaacagttgactggccaattaccgggtagtgttgttagcaatacacagctgatgcttgtaaacaaacgaaaagttcacttaattttcaatttgttaaaaatcttaagaaatgctgcccctgcgatgcagttggtcctttgcccgggccaactatagcaccaaaaaggaactggtgactcgctacagcggcgatttccccgagaaactgctcaaccggaagcaaaaggttcccactcacatgtacattgcaaattcggaggctgctgcaaggattaaccagtacctggagccccatttccagagctccggttgcgataccgtgatggaactcaattccggtgctgggtactttacccggcatctgttggacagggaatcccagtttcgacgcataattctgcttgagagcatggatcactttatgcccaaaatccaggagctacacacgctatatccggaacgtgtgaaggtgcgccaaggagactttgtgaacctgtggaagttggtgtacatggacaaaatggacggtggttccagggtggcggatctcctgagtgatgtgccccagaaagcgtttacagatggtaagcccatattggctattcaatatatcctcgaacttatttttttcctatagatatcaacatgctagtcttcggcgccgtgggctcctatccattcttcaagcacttgatcaactccctcatttttcagaccagccttttcaaccttggacgctgtgagatgatcctcgccatgccgccacccatatacatagtaaataagcttattatccctgaaatatatcacgcttatatcactcatttccctccgttagcatctcacctgcaacaacgagattggctacctcatttaccgatcgaccagcgtactgtttcaaattctgtttgagcacaaattcatagccaaggtgccgcgcgaggattttctacctcagcagatggcctatagccccaccaagagtagcaagttgggtaaggtgcagtccatcaatcccgagtacttgtacttggtgaaattcactccgcgccgcaatcttcatgagctgtgccagtcgcaggatctacccgctctctggttcttcattaagcagaactatgtaagccgacgaaacagaataatacccaatttagagtaggtaacacaatcaaatcatctggggttatttttataaattcaattattatttgtgtagaaagtgggttcccggctgtggacctcggcttatcattaatccgaagtcctccgagtccgtaacacccatctatccagatgaattgcccaagaaactaccacagtactcgtgccagagtactacaatgagcaccagaaactactatcccggcatcaacatctacacacagttcggagatctcctgcccagtcagattctgacgctatttagtcagtttcgtcagtggccggagtacggcgagagctctttcctcgcctcgctggaaaatgcgctgctcaagctggagactgccaatgacgaaccaaacctagaggatggcgtcacgttgccagaagaggatgatgccgaagcagatgaaattatcgaagaagaaagccctgtacccgccaccactcccgtcaagaggcgcaggaaagccagttcttagttgtacataatagcgttttgcttgtgcaagaaaaataaagaattgccttcattttgagaaatggtatgtaatcatattatatctgtcttaaacatggaacaaattcgctattcttcactggcctccacacattaccaaacagaacacaatacatttaagcacataatgttaaaatcctttaaggacactttccctgagccattaggcgactgccgcgtgcgcatttctcggccaaatcaacgtagtattccggcggagcctgctccgtgtccgaaatacgcgtctccagttgaacggacagcttcacacagtccaccatcaagttggtgggattcacgccaagtacaaaggaagcctcctggtaaggacacgggttttcttccttcttggtgtttccgaactcatagcatgtgtcgcgaatcataaagtgtccgtccctgttacatggatttcgtacgcacttcgggatgatctcctccttgtagagcaccagaatctgtccagcctcacagggtccctgtcggtaggccggatagcagccatcggtctccgggtaatacagtgtggctatcgaaggggaagtacccatacggagattattatgtcatcgccatggtagctccattatgaccgctcacctggcgcgcagtcgcaaacccagtcgttctgcttctgctggtcccccggataaagaagctggtgcttggggcatcgggctggcgaatacagtggcttgcgaccctgttgatgaggagaaagcggaggggtgtgaggcaggaattcgattgattattgccaatggggcttgcatacactaccaaaacagtccccgtattttgaaattcacttcaaacacacactttagaagtttaaaggtttgaaactctcaaagtcaccacagtgataaaataaatgtatttcttatttttaacaaaaaaaaaaatttttcaatcacgttcaacagtatccatacaattaaaagtctgttattataattatt

SEQ ID NO: 7604 - DNA, 1349 bp, DROSOPHILA
caatacacagctgatgcttgtaaacaaacgaaaagttcacttaattttcaatttgttaaaaatcttaagaaatgctgcccctgcgatgcagttggtcctttgcccgggccaactatagcaccaaaaaggaactggtgactcgctacagcggcgatttccccgagaaactgctcaaccggaagcaaaaggttcccactcacatgtacattgcaaattcggaggctgctgcaaggattaaccagtacctggagccccatttccagagctccggttgcgataccgtgatggaactcaattccggtgctgggtactttacccggcatctgttggacagggaatcccagtttcgacgcataattctgcttgagagcatggatcactttatgcccaaaatccaggagctacacacgctatatccggaacgtgtgaaggtgcgccaaggagactttgtgaacctgtggaagttggtgtacatggacaaaatggacggtggttccagggtggcggatctcctgagtgatgtgccccagaaagcgtttacagatgatatcaacatgctagtcttcggcgccgtgggctcctatccattcttcaagcacttgatcaactccctcatttttcagaccagccttttcaaccttggacgctgtgagatgatcctcgccatgccgccacccatatacatacatctcacctgcaacaacgagattggctacctcatttaccgatcgaccagcgtactgtttcaaattctgtttgagcacaaattcatagccaaggtgccgcgcgaggattttctacctcagcagatggcctatagccccaccaagagtagcaagttgggtaaggtgcagtccatcaatcccgagtacttgtacttggtgaaattcactccgcgccgcaatcttcatgagctgtgccagtcgcaggatctacccgctctctggttcttcattaagcagaactattcctccgagtccgtaacacccatctatccagatgaattgcccaagaaactaccacagtactcgtgccagagtactacaatgagcaccagaaactactatcccggcatcaacatctacacacagttcggagatctcctgcccagtcagattctgacgctatttagtcagtttcgtcagtggccggagtacggcgagagctctttcctcgcctcgctggaaaatgcgctgctcaagctggagactgccaatgacgaaccaaacctagaggatggcgtcacgttgccagaagaggatgatgccgaagcagatgaaattatcgaagaagaaagccctgtacccgccaccactcccgtcaagaggcgcaggaaagccagttcttag

SEQ ID NO: 7605 - protein, 425 aa, DROSOPHILA
MLPLRCSWSFARANYSTKKELVTRYSGDFPEKLLNRKQKVPTHMYIANSEAAARINQYLEPHFQSSGCDTVMELNSGAGYFTRHLLDRESQFRRIILLESMDHFMPKIQELHTLYPERVKVRQGDFVNLWKLVYMDKMDGGSRVADLLSDVPQKAFTDDINMLVFGAVGSYPFFKHLINSLIFQTSLFNLGRCEMILAMPPPIYIHLTCNNEIGYLIYRSTSVLFQILFEHKFIAKVPREDFLPQQMAYSPTKSSKLGKVQSINPEYLYLVKFTPRRNLHELCQSQDLPALWFFIKQNYSSESVTPIYPDELPKKLPQYSCQSTTMSTRNYYPGINIYTQFGDLLPSQILTLFSQFRQWPEYGESSFLASLENALLKLETANDEPNLEDGVTLPEEDDAEADEIIEEESPVPATTPVKRRRKASS

SEQ ID NO: 7606 - DNA, 3581 bp, DROSOPHILA
agaaggcggacgatgaggaacgcgaacgggaaacagagacaccttccaatgaggatgtgatagtaacgccagtgccgcgacccataggttcgtcaaatgctcacaggaaactcagtgccagttccctggcggtggccaacgcttcaacgagcagcgatactccgttggctgtgacgacactggacaaatatctagacgaacagcgtgcctcgggtgcgttaatggagcacaagatggacgccattctgcaggccatgaatcgcatgggcggccagtcgagtgttgcgcccaagaagcccagtgatccgctgctggaacgcgacagcgaggacgagatgctggagctggagcagaagctgctcaacttgaagcgggagaatcgagcgctaatgcgcaacctcaaggcacgcgaacaggcgctggaggatctacgctgctcggcgtgcgccctttgcgaggagctactagtccagaatggcgagctcaagtcgcagaatgcccagctgttgttagccagccagcatatttccgattcaagcacagctgcttcgcctgcccattgccgcaattgcgagtcgtcttcccggcaaatagccaaaatgcagctacacatttccgcactgcaggaagcgctgcgaatctttcagaaatcaggcgactccagctccagttcgggtcggttatagcacctaacgtaggcgtattatatatgttcggtattactatcgaaaagtgtattaaatcatttgttaggtcgcgtaacatatccacaaatacaagccagacactattagctatctttaagtcattagattgccatgttattgggctcatttacaaagcgattttctaatctattacaactattattactaaatgtgagatataaaatatgttgcggaagattataattaatagcaacccatgctttgctctctctcaattatgaaaaactccgacttcctcttgtacaaactaatttgttgtatttgcagcacacatcgggctgaaatttaaggtatagggacaagtctacggtttgcgcgtctcataatccgtgggaagagttcatggagaagttgttttggggcctggaactggaagtggaactggcagtctctctgtggaagtgaggagcggaaaggatgggctggcggtcctgctcctttacgtttttacggctaaaatggaaagcgagctagtttgcggagcgagtgctttgggaggcagctgtctatccatcctgatgctgatccagatccagatacagatccacatctagattctcttgctgatccagttaatccttgtttgtttcttttctttctcagtaggtgctgctgtcgctgaggctgctcaggtagctgctgccggcggtcggagcaccggatccgccggcacgatgtcgcttccgcttcgccttggtcttcttgcgtcgcagcatggccgtgtccgtggacttgcgcttgtacttgccctgccgcttcttcttgcgtccgtactcatccgattcactggtgctggactcctcgttgtcgctggaatccgattcagacgaatcgctcgatgtggaggagtcatcactcgaatcatcgctcgatgacgacgatgagctgctggttgatgacgaggaggaggaggaggacgacgacgacgacgacgaatccgagctagaggtggaggatgatcgtcgtcgttttgacttcttgttggtgctgccgctgctcggtcgcttgcctgttttggttttggccagctcgctgctgctgttgctgctgctattgttggtgtttgtggtctttttgtgcttccggctcctcttcttgccatgcttcttgtgccgcaccgacttcttgtccttgctcttctcggccagcttgtggctgctctttgagtggctacgcttcttgtccttgctccggctacccttctccttctctttctccttcaccttctctctctcccgctccctttcccgcttcttcgccttgagcctgtcgcggctcttgtccttgctcctgtcccgtttgcctgccgcgggaagcaccgctggctccgttggcggcggcacctcagcgccactcttcagctcctgggctctcagttcggtgagcggcgtaaggtagtccagctccgagtctgagctggtgctctccacatccagcaggatctccttgttggggtccacctgttcaggatagcggttagcggcggataaaagcaacataaacatgcggtctatgcgattggtgcgcttaccttgagaaaattgcggcattggtaggtcaggtgaccggcgtagccgcatttcttgcaggcagcccgcaacgtatccttgttgacgctcgccagtgggaagttcatggttgccgctccgctgccggtcgtacctttgcggcgtttggcgggctggggctggggctctggcgttgggcgggcttgtccactgactgattattatttcgcctcgcgcaccattaattgatatgtgcacaacaacaacaacaacgataccaacaacaatggggtaaaaatgaaacgcgagttgaagtaaatcgcgtttttagtgcggccatgcggccgcgtttcgaacataccatgccggcagcacaccggtccgcttagccgtgacaagcaccgataggctgcggtatgctagctggggtgacactggcacggaaataccgttgcccgaacaagagctggtcacactgcacgccagcacggcttagttgtttaccaaatttgaagctctacggttgatccgcgcatgaaagggcgccataaaacaataaataacttgaagagacgaatccgcgaaacgtttaacagttatcataatatccagcctattggcgtagttcgctgcgccgactgtgttattaactacgctgtttgtttttgttttttgcaagtgcttttgagtgccgaagttaaaaaaaaagtccgtgcgtaagccagcgccagttcaatccgcccgcttgcgtgaaggacccagttttagccatggcccaaacagaggccaaaaccacgtgcacgcggcgtcgccgccagtttttgccccatggccaaaataggcagcagcagctgcagcagaagcggcaacaacaacattgttagcggtttccactcaaaaatataccgtgtgctacataatgccgttagatatttgtaacggcttagatcgcataccgttaatcgtggattgtggcactaactgaactggtcgtacgattgttgtgattatccttgctgcggatcccgactattaaaagtggggataagcattggcaacagttggcaattcgtaagcagtcatcaggtgagtggagagttcattataaaaaaattaaattgaaagtggtataaaattaaaaactatgcacactgcaatcgtttaaaacgaatacggttaattaaaagaaaatgattgcatagttaattttgtgccatttaagtgtcggcagttaattcattcgagtgtcaaatttcgtacggtgcgactgttttattgtcggccagtgtgaccaatgtgcattgcaatgcattcatcgcctaggcgaccaaaacctcggcgtatt

SEQ ID NO: 7607 - DNA, 1510 bp, DROSOPHILA
gccgcatggccgcactaaaaacgcgatttacttcaactcgcgtttcatttttaccccattgttgttggtatcgttgttgttgttgttgtgcacatatcaattaatggtgcgcgaggcgaaataataatcagtcagtggacaagcccgcccaacgccagagccccagccccagcccgccaaacgccgcaaaggtacgaccggcagcggagcggcaaccatgaacttcccactggcgagcgtcaacaaggatacgttgcgggctgcctgcaagaaatgcggctacgccggtcacctgacctaccaatgccgcaattttctcaaggtggaccccaacaaggagatcctgctggatgtggagagcaccagctcagactcggagctggactaccttacgccgctcaccgaactgagagcccaggagctgaagagtggcgctgaggtgccgccgccaacggagccagcggtgcttcccgcggcaggcaaacgggacaggagcaaggacaagagccgcgacaggctcaaggcgaagaagcgggaaagggagcgggagagagagaaggtgaaggagaaagagaaggagaagggtagccggagcaaggacaagaagcgtagccactcaaagagcagccacaagctggccgagaagagcaaggacaagaagtcggtgcggcacaagaagcatggcaagaagaggagccggaagcacaaaaagaccacaaacaccaacaatagcagcagcaacagcagcagcgagctggccaaaaccaaaacaggcaagcgaccgagcagcggcagcaccaacaagaagtcaaaacgacgacgatcatcctccacctctagctcggattcgtcgtcgtcgtcgtcgtcctcctcctcctcctcgtcatcaaccagcagctcatcgtcgtcatcgagcgatgattcgagtgatgactcctccacatcgagcgattcgtctgaatcggattccagcgacaacgaggagtccagcaccagtgaatcggatgagtacggacgcaagaagaagcggcagggcaagtacaagcgcaagtccacggacacggccatgctgcgacgcaagaagaccaaggcgaagcggaagcgacatcgtgccggcggatccggtgctccgaccgccggcagcagctacctgagcagcctcagcgacagcagcacctactgagaaagaaaagaaacaaacaaggattaactggatcagcaagagaatctagatgtggatctgtatctggatctggatcagcatcaggatggatagacagctgcctcccaaagcactcgctccgcaaactagctcgctttccattttagccgtaaaaacgtaaaggagcaggaccgccagcccatcctttccgctcctcacttccacagagagactgccagttccacttccagttccaggccccaaaacaacttctccatgaactcttcccacggattatgagacgcgcaaaccgtagacttgtccctataccttaaatttcagcccgat

SEQ ID NO: 7608 - protein, 321 aa, DROSOPHILA
MNFPLASVNKDTLRAACKKCGYAGHLTYQCRNFLKVDPNKEILLDVESTSSDSELDYLTPLTELRAQELKSGAEVPPPTEPAVLPAAGKRDRSKDKSRDRLKAKKREREREREKVKEKEKEKGSRSKDKKRSHSKSSHKLAEKSKDKKSVRHKKHGKKRSRKHKKTTNTNNSSSNSSSELAKTKTGKRPSSGSTNKKSKRRRSSSTSSSDSSSSSSSSSSSSSSTSSSSSSSSDDSSDDSSTSSDSSESDSSDNEESSTSESDEYGRKKKRQGKYKRKSTDTAMLRRKKTKAKRKRHRAGGSGAPTAGSSYLSSLSDSSTY

SEQ ID NO: 7609 - DNA, 4387 bp, DROSOPHILA
gtaaagagacagtcatgtgtacaaagccatgttttatttaaaggagggattcctttcagccgcctaatccttagaaaatcccctaagctacgaaaccaaatgctaggaatgatgtcgagactagtttattatattcgatgcatgagaataacatttaaatgccatttaggcactgtcgtacttccttagaagcatggcccatacgtccgggtatctagtttgcagaaatgtggtcagcttttgcgctttttgagcctgttgtggggagcagttcctgcatttcctggttataacttctggcagggcagctgtaagaaccaaattcgaaataattacattttgggctctttaccaattggcgaagaacttgaaaagaactttggacttaaaatgatgttgtatctgaacgaacattaaacgaatatgtttattacctttgagttgaagtcccagttggtcgcattcgctcttgcccaggatgcacataatctggcggctgaccaccacctggttgttcagcagcttgttaatgtttctctcatccgcttggacactcgatgaaatgagaatgataagaaaaataaaattaacgaccaaagaaatcactcggtttttatttaaaagtagcatcctttctgaacgcgagacggtatagtataactgaatgtggagcagaaactgtgtatctgtatcccgcagatattcgtgcatgcgcaaaggagctggacttcgcaaaatcacggaaagggtaatgattgctaagcactgtgattacaatccgaatatctgatgagatgccacgtactctatatacatggcaatctttcgtatatgatagcattccttcaaattggctatcttggtattctattcagttgtaagcatctgagatatgttcaaagcatttttgtacccaatttgcaatgggcagcccagaaagtaagtcagcacctgctgttccatgcgataagaaggtaaataaagagctttcaatgtttttgcgttgtgcttaaaagttatgttttactaaaacaacacattaagtactttgcaaggcagtcaagacaagaacagaagtatcctacggtttaattaattataatagatagtgtgtagagtagacgacttaaggtacaattatatagatttaatatgtatgtatgtcttatatacatttcctaaaacttgaaagctttatttaaatatttttacatgcaagtatgaaaatacatttgacaatatagcgaaatattatgttttattaagttctattgcgatacaatggggctctttttatctatgtcagatatattcgcgttgttctgcggggcagctccgttcccagggctggccgggatggctcccgcccggtcgatgctccacggattcgagccggatatgggcgagtcggcgtgtccaaagccggtgtgattatcgtgctccacggcattggttccgtcgtattgcgtgttctctagccgggtgatcagccgctcgtcctcctcaccaaactcgccgcccatcagcgtcggctcgcccaccaccatcacgtcctgggaggagagggagaaactgggaccggagggggaacgcttctggttcgtcacaggcggagtgttcgagttgttgccaccacccgagttggagcccttccgtttgcgcctcttgttgggtggtcgttgcggatccttcttgccgggcggagccaccatgcgctgccacttctggaacaacgttgtcttcaggcagtcgcgcggactcagtgcgtacgccttgtgccgcgacatcagctcctgcatcggttcgaggatgacgcagaggcgcagatagttgagggtggagttggtgatgccagcgcgcgtgatgttcttggttatttgatctagcagcatcgggtcaggcggcagactggtgccgatcacggaccttggaatgagctcgcggtgtcccttgatggtcatgtgccatgacttgatgcgcatgtagtcgtcgtacatgaactccaagatcagtcttgcgtcggcgcagaccttcgtgaagaagggcttgccgtgctgcgtgatcaccgtgcactggtcgcagtccaacgtgatggacgtgttgtggaacgactccttggcatgcttcagctgaaagtacaggtccgaaacgccgccctcgtatatgctgcggaagaagcgcgggatgagcgtgcgcccgatggtgtaccgcttcggtccgtcctccaggcagaacagaatggtcagccgggcatcatcctcgaagaactccgtggtaaacgagtcccaccagcagttgtcgctctcctcgttgcgctgctgcagccgcttgtttagctcaaagacgcggtgttccgtgtggctaaagtaggaattgtgccgcctgaagccctggtcgatgcgttccatctgctgcggcccgcccatcatcgggtggttgcctccgtggccgaatggcgacgccggcggcatcggattgaattgcccgccaacgctgaataccgtgggcgatgagaagtgcccggcctggccactgttaaacggagtgcccgagctggccggccggctgaactggccgagtcccgaggatggcgagccgaagggcccgccaactggaccattgaaattgcccgccgtcgccgactgcgggtagttgccgggaatgttctgcgcaccaacaggtccgggtgtcgatgagcccgagggagcaggtgaggaggtatactgaggtgtgttcgagccaggctggttggagttctggaacacgatggactggttgccggctggcgaggattggccggcgggcgggtacggattcccggccgagttgtacggcaggccgccctgcgcgaagccgctctggttgctcccgtccggattgaggaccgccgaattggacgcgggcagcattgatccgccctcggagaccgccttccagctgccgtcgtcaatgttcgcttgagaagtcatcgtattgccagcgttcaaacccctacgattcatgcctgtggtcggttctatcgggcattcgcgtcggcctgtgaatggagaggaatccattagtttgaacccattattatttcggcgttttgggggtttcgggttcggtatatttttatggtgcccatgcgtatgtgtatgcacttgtctgtatgtcgcactgcatttacaaaatatgtgtgtacacacacacacttttcacggcccgttcgcgttcgaaatggaaaacgctgcgaagggccggatcggccggatttcagtgcaggcagactgctcccgtatacgcaccttgcaaaaggcatacaatattttaattcttaaagcacaaacacatataaatgtatctacaatttaagaaaactgattggcctccaccgatagttttgccatcgctttccaaatagcagatttcgataggtgagaacgcaagcgtgggtttgtctcgcgtttggaatgaacggaaaaacgacctatcgcctggagggttttcatgttcttgaacaaattttttgtatgacgttaaataaaactaacgattcaagactgtttctcatagtttgtttttagtttcttcgaaatctcataccacccttaacgtattgtacatcaattgccacatataccctctaaataattgattaattgtaaagaaaaacctatcgaccgactcaagcagattccatttccattccgtttcactttgtcccacgccgcacccttgacttaataatttagtatgtgccgtgccgtaaaaatttgtaatcaaaatatggttgtaagactgttgctttaacgtcggtagtttattttatatttatgtaattttggcctgtgacactgcaagcccgtggtgtgatgcgaaagtgttcgatttttatatactagagtacgtgtttaggtatgttatttataaactgcattaatttcgcacatcttccagtgtccgttgaatggtaaacatatttttcgccattgaataatcagaaataagcggaaacttattggccaacagccgacgaaatccctctgcttatttccaagggcttgtgaaaatgtgcttcgctatgcagttatatatgcacattcctgtgtatgcatgtgtgtgctgcagtgtgcgtttcctacactctaaaaaatgttctttcccttgcagagcgagaaaaatgtcaaccgagagtttgaacagtttgagcgacaaggaactgcacaggaagctaatccagagcggcttccccagcactccggtgacggaaacaacgcgagcggtcctcatcgagaagttgagaaagcacacgcgagccgacaagctgaaaaagaggagcaacaagtacgtgctgtactccaaggagcagcaagagtcgcccccatttccacagtaccaccagtac

SEQ ID NO: 7610 - DNA, 2137 bp, DROSOPHILA
ggcaaaactatcggtggaggccaatcagttttcttaaattgtagatacatttatatgtgtttgtgctttaagaattaaaatattgtatgccttttgcaaggccgacgcgaatgcccgatagaaccgaccacaggcatgaatcgtaggggtttgaacgctggcaatacgatgacttctcaagcgaacattgacgacggcagctggaaggcggtctccgagggcggatcaatgctgcccgcgtccaattcggcggtcctcaatccggacgggagcaaccagagcggcttcgcgcagggcggcctgccgtacaactcggccgggaatccgtacccgcccgccggccaatcctcgccagccggcaaccagtccatcgtgttccagaactccaaccagcctggctcgaacacacctcagtatacctcctcacctgctccctcgggctcatcgacacccggacctgttggtgcgcagaacattcccggcaactacccgcagtcggcgacggcgggcaatttcaatggtccagttggcgggcccttcggctcgccatcctcgggactcggccagttcagccggccggccagctcgggcactccgtttaacagtggccaggccgggcacttctcatcgcccacggtattcagcgttggcgggcaattcaatccgatgccgccggcgtcgccattcggccacggaggcaaccacccgatgatgggcgggccgcagcagatggaacgcatcgaccagggcttcaggcggcacaattcctactttagccacacggaacaccgcgtctttgagctaaacaagcggctgcagcagcgcaacgaggagagcgacaactgctggtgggactcgtttaccacggagttcttcgaggatgatgcccggctgaccattctgttctgcctggaggacggaccgaagcggtacaccatcgggcgcacgctcatcccgcgcttcttccgcagcatatacgagggcggcgtttcggacctgtactttcagctgaagcatgccaaggagtcgttccacaacacgtccatcacgttggactgcgaccagtgcacggtgatcacgcagcacggcaagcccttcttcacgaaggtctgcgccgacgcaagactgatcttggagttcatgtacgacgactacatgcgcatcaagtcatggcacatgaccatcaagggacaccgcgagctcattccaaggtccgtgatcggcaccagtctgccgcctgacccgatgctgctagatcaaataaccaagaacatcacgcgcgctggcatcaccaactccaccctcaactatctgcgcctctgcgtcatcctcgaaccgatgcaggagctgatgtcgcggcacaaggcgtacgcactgagtccgcgcgactgcctgaagacaacgttgttccagaagtggcagcgcatggtggctccgcccggcaagaaggatccgcaacgaccacccaacaagaggcgcaaacggaagggctccaactcgggtggtggcaacaactcgaacactccgcctgtgacgaaccagaagcgttccccctccggtcccagtttctccctctcctcccaggacgtgatggtggtgggcgagccgacgctgatgggcggcgagtttggtgaggaggacgagcggctgatcacccggctagagaacacgcaatacgacggaaccaatgccgtggagcacgataatcacaccggctttggacacgccgactcgcccatatccggctcgaatccgtggagcatcgaccgggcgggagccatcccggccagccctgggaacggagctgccccgcagaacaacgcgaatatatctgacatagataaaaagagccccattgtatcgcaatagaacttaataaaacataatatttcgctatattgtcaaatgtattttcatacttgcatgtaaaaatatttaaataaagctttcaagttttaggaaatgtatataagacatacatacatattaaatctatataattgtaccttaagtcgtctactctacacactatctattataattaattaaaccgtaggatacttctgttcttgtcttgactgccttgcaaagtacttaatgtgttgttttagtaaaacataacttttaagcacaacgc

SEQ ID NO: 7611 - protein, 577 aa, DROSOPHILA
MNRRGLNAGNTMTSQANIDDGSWKAVSEGGSMLPASNSAVLNPDGSNQSGFAQGGLPYNSAGNPYPPAGQSSPAGNQSIVFQNSNQPGSNTPQYTSSPAPSGSSTPGPVGAQNIPGNYPQSATAGNFNGPVGGPFGSPSSGLGQFSRPASSGTPFNSGQAGHFSSPTVFSVGGQFNPMPPASPFGHGGNHPMMGGPQQMERIDQGFRRHNSYFSHTEHRVFELNKRLQQRNEESDNCWWDSFTTEFFEDDARLTILFCLEDGPKRYTIGRTLIPRFFRSIYEGGVSDLYFQLKHAKESFHNTSITLDCDQCTVITQHGKPFFTKVCADARLILEFMYDDYMRIKSWHMTIKGHRELIPRSVIGTSLPPDPMLLDQITKNITRAGITNSTLNYLRLCVILEPMQELMSRHKAYALSPRDCLKTTLFQKWQRMVAPPGKKDPQRPPNKRRKRKGSNSGGGNNSNTPPVTNQKRSPSGPSFSLSSQDVMVVGEPTLMGGEFGEEDERLITRLENTQYDGTNAVEHDNHTGFGHADSPISGSNPWSIDRAGAIPASPGNGAAPQNNANISDIDKKSPIVSQ

SEQ ID NO: 7612 - DNA, 14092 bp, DROSOPHILA
ggtgagagtgcttgccataattattgttgttccgttatgttcagctcgctatccaaaggatcctttgcaccccagctccctcctttccttttggccaggcttttggccatgtgtgagcgttaagcgaagtatggcacatttgggggcacaaacaagaggcgaacgcactcatttagtcaaacaattatatccaattgcacacagatactctacgcacccacacacacacacacgcattcgaggtctggctctgttcatttgtgtggaaatatctcatttgggtgtggagccatccccccttcccgcccccctttggtttctattaaatcagtctataaacgtcggccaaattgctttaatgtgcagcgaaagtttagcaaaaagcagttacaatggggttgcaaagggggtgctaggggtggaagtgaggaaagtagtggcacataacaataaaaacagcagcgaactgaaaccagactacagctgttgaaacatgactttgtgcttgtttagaaacacttgcaaaatattattgcagcaccaacaacaaaaggcaaattccaaaggggctgctaaaagtaagaacaacagggcggatgcgcaatgttccgtagatccagaaggcattgaaactgaatccaaacagaggcattagtatattggatcagctggaagaagaaagagaaagagaaagggaactggagcaaagagtggaatcagagcgaaaggaacccagaatgtaatgggttaagcgaagccgggaacatcgtgccacgcatttgaatggcatcattagggagaaagttgtcgaagtacttgtactcgcaccacggaggaaattacgaggcgaggagccaagaaaagttggaaattaatttccacggaactgcgagcatgtcctcctgttttatggagattactggatcgacaaatggctgactaacctgagcagcagcaggaacaggtgctaattaaaaatgttgttgtcgccccattaaagaaatttgtaaatcaacctactcagcagggggtgaagtcaagctccacggggggatgttcagtgaaaaggggagctgactatcaaggccttgggagttctacacccagtgaaagtcggcgacacgtaaaccattaatggatttactactgttgttgcttttgattaaaaggcattacttacattcggaacaaaacttgggtagaggttgaaaaagagaatgacagttaatgggtgtcgtggtatgtgaccagccaggtgacgaatccaaggggttaagccggcgaacaaaagccgtcgccaaaggttgacaaattacccaaacgtcggtcgatatttttttcaagtcgctcaactctcagccatccatccgttggggattcccctttggtcaggcaaactgcggcggatgcttttgtctggcattacactatattgattgcttcctgtcagccgcaggagagacaaacggaagtggcggatgtatcttttgttccgattttcctttgtggtccaaggaccaaagaccaggcgctgccccaaccccttttccttgcggtgccatttacacactgcactttactttttgcgttggcgcaacatggaaatcaccgaaaacgaattagagtacacgacttctccattaaaatggccgccttcagctttaattgacagatttcgttggtcacttaaagtaccggtcttgggagcaacgaactgagccaaactgcagaccagtcagtagcaaattaatttaatttgctaagtcaacaaaccgagaaaatcaatcgaactccgtgcgggacatgtgtaaattgtgcaaccgcattattaaatgctgagccaaaaggtggtggtgaaaatagtgggaagtgtgggaagagggggtggggcagacaggtaagtaccttggggcgtggccagagcacgcaatggctaattgaaaggcaattatgcgtgattaagtgcgtgtaagcggcgactttggttaagtatgcgccacctttaattagaaaccagtaaaacgccggccagccgacatcttctcctcttcaattatgcattagtcgaaagaacctttttggttgccccaaaaacgcttattaaacgacgggcctaacgaggtcggactcatcaaaatgccatgcatcaaaaagtatggcgaggggtgtggcggttcgggccatggccaaatcgatcagccataaatcaaacgaaattcaaattagttggtgccggcaaattagaaggcacacacagtttgttctggcagcatcggccatgcaaatgccaaaataatgagagttcagttagttgggtcggaaaaaaaaaattggaaaggctgagggaaaagtcagacagagaggctttccaccttgattaaaggcttttccccaggggaaagcgggtaggaagggggatggtaccaaaatggccaaaagacctgttgtcgggtaaattgaaatataattgagccaacggcgtgcaggacgcactgtcagctccacctggcagccagcttttcatctggtttcacttcactgccatggcttattaggagaaggcgacaggtcgtatacgtgatacgtacaaaatgctgtcattgcctcatctaaagtaaaattcagtgctagtgggaaaataacgcagaaagtgcatgcacacaacatagcaacagcatgaacagcattttgcatagttgcattttgtgtcaacaattttttggcacagtggtttttaaacaatgcttggagaaatccgagttcacttattaacgcaatacaaataaaagtgtctaaaatagtctaaaaaccaaagtaacatttaattttttatacctcaatagctgactttatgcatttatattcatattttcggatgcacacaatcgttgagtttatacgaatttgatttataaccttactcgacattttggttaattaattaatgtataacagactgcacttttaaatttctctctctctctctcgttgtgtattaaaagaaaagtttcccaccgaattttgttcgaggttgcccaacacgaaagttgccgcggtgagactttattaaaatatttacgcccacccggcccactgtgcggcgttggaaaattgtgtgaaaatgttgtgctgcttttccctcggctgcttgccaaaaagttggactgcagcttcggtttgccggcaagtgacgtgctgacgggcgacgttctggcaaaattgtcatcaagcgtttttaattacaagcgggattggtccaccgacggagggcgtggcgggggcggtgtagaagtggagtgctggagcggttgacgatggcgacgatggttgcggttgttgttcctgcgggcagccatagagctgcaagtgacataagcaaatcagacgcctgtcaagtcgtgtgtgtttcgttgtttgtgcttacgtcatttgcaggacacagccaggacccaacagcgccctcctttcaccccggttgtcattagaaatgtcacaacagccaagcagcagccacagcaacagcagctgcaatcctgtcctcaaacagctatctagtccgtatccttgacgcccagctgcaaattctgtttcgaaatccaagctccccatgcccatcgtttcacgatcaaaaatggtcgaggccatttggcaattggcagttatttttggcctgcttggccatttcgaatttcaaatgaaatggcaagcaataatgccccgtcgtttgacattcgcatttaatatcgaaaaccgaaatgaacattttcatttgcaatttaaactgggtgggcagcactcctataaaatccattgcccccttctttatttattggcaacaaacattggcccaatttggttttaattttactgacatttttcgcatttattggccagctcacacagaggaaaatctgaagtatttcctcaatgacaatcagctaagatggagagcaataaggccatgagagcacaagtcaattgaagtgcacaattggtttattttaaactgaactgtgtccttaaactatttgctaagccactcaaagtgctttggaaaagttgcaagattgataaaagggcgatttgtaatgcttctagaaatgctgaagagttttaatttgtttactgaagaggtcactttaggtacacgaaatatgtatattaatgccaattaagtagaacgaattgccaagagtttgtttacaggctacaaagcaattataatttaaatgcagagatttctttaataagaagttaactctgttcaattgctttttcgtcatttattgttgaacggactaatcaaattgtaattgccgttgaactgggctcattaacacattaaggcacacgttctgccagagctttaaggcatgccacaaaggattcaggatgcggccaggactcgtaatgaaaccagacaggttcaaggtctggcagacaatctggatctccggatgggcgaacggggcggcgcctttgcatgtgaatctctgaggatttatggctcagcgaggacatgccccaccagttgaccaatcgcagccagccagccagggatctcctcgtccactttctcatcccactcggcgggacagctttgatgatggagtgcgatattgttgcgttttaattgaattttctttgtgggccaaaagcagcagcaaacgcggcagcaacagcagcagcggcagcacgacaaacacaataaaggacaaacagcaggagtcgcaggcgggcagcaggacatcaggggctgccccccccctttcaggaaagtggcaatgaaggcaataatgaaatgaaattcactaacaaaaggcagccaactattgtttttattgccttttgtcgctgtggctgttgcgaatgtgctgcaattgtgtcgtttggcttcctcgcggcggtcgtgtccttttgtcctgccttttgcgggagctgttgtcagaccacaccaaataatataattcccgcatattgccgtcggtggcttttaataaaaacgccatccacctgctgctccagctcctgctcctcccgctgctcccgctgatcctgctcctgaaacctgatggagatttagtgtccagggaaaagccactcgaatccacttgaactcggccgcagttatgcagatttccgagggagttgtgctgatttttcttgtgtttattagaccgagtttctcttagtttttttttttttttttcgttttttatctatttttgtttcggccaactgtttcatgttgtgcgggaataaatgtgctgtgtaggctgaaatttaagcgagcgaaccgagttggtgtgctctgctagccccattccatagccgactttctggttatctggcagcagactttgtttgcccaagacgagttcgcaatttcctacagctgagctccccagttccagctacggaaaattcaagctccccatcaaccgacggctgtgcaaacataatgctcggcgaattaaagcttttttgccagccaataaattattcatgctgtaagacaagcgagcggatgggtgggaggggggggggggttcgaggggctaaattatagctgaagaagatgtgggagtgccttggagcggaaacggaactcaattcattaaaatgaatgaacggaggagcgcagccgagtgcatgactaacggtaaacggatgcaagtcgaaagatgcaaatccggcagctgaaattgctgtttctgttgccaaagtccttgccagttggccttttttttggggggggggggctctctggtggcgaagggtccttagttggcccaaattagatggggcacggaaatatggaaatttatacagtttccttgactcaagtgtcctgccactgagcagcttacttgagcggaaacccctttcccgaagtaatcttgattgcaatattggatcaaagtcacctaaacacggggggtagatcgccgcccatcgttttggatactcgaattttcacacgcacacgttgcacattcactgcttatatattaattgctgaattcattattaatagctttgtgtgttgggtgcaatcaacacaaaattttataaattcaatgcttaaatagcgtttaatacatgtggcaagttgagtgaataattttaatgtcaatatacatttcaaacatttcgattggaatgaagtgtgtgtgtataaactgtataaatattaggactataacaatgccagtggtttgttattatgtttatttattttgcattaaattaatttcattcatttttgctttcagccttgcagcctatcgacgccgaagagcatccgaagcaacggcaatggcaactgcaccagcggaagtggcagcctaagcctttttggaggcatccccaccggcagcaccatcaccatggccagtcacggggagaagggtaaccaacggctgcgacggataaccagcgtccagcccggtgccctcagctacgaggagctggtcaaggagggcaccttcggccggatttacgccggcaagctgggcgagtcatgcgaggcgctcgtaaagaccgtcatcgatggcgcatcgctcacccaggtggcctgcctgctgcaggacgcctccctgctgatcggcgtcagtcatcagcacatcctggcaccgctgttggccaacacggagctgccgggtccaccggagattgcctatccccatccgtccaagggcaatctcaagatgtaagtacaaaatggaaggtgtaagggagtttaggaaatctctaaagacctatatatatatcaaacaattattaattcttaaatcacattcttaatacttaaggtacttgcaaaagtcgcgggaatcgagcacagcattgagtacgcgccaactggttgagtttgggctgcacatcaccaagggattggcctatctgcactcactgggaatcgttcacaaggacattgctacacgcaattgctagtgagtattcaacatatataccgcattcggtctaccactattgattatttaaacaaaataaataataataataaataaattataaataaattattattttatcacaccttcttacagccttgacgaagagtcctatgtgaagatctgcgatagcgccctctctcgcgatctcttcccagacgactacgactgtctgggcgacaatgagaatcgcccgctgaagtggctgtcgctggaatccctccagaagcgggtctatgccacccagggcgacgtgtgggccttgggcgtgacctactgggagctggtcactctggcgcagatgccgcacgaggaggtggatatattcgagcttaccaattacttggctgccggcttccggctggagcagccagtcaactgcccagatgaattgtaagtagcccctggaaaatattgctgaatttacgaaaaatataaatataaatttcactctcttcccttacaccgtaactttaaccaacccttagctttacggttatgaactgctgctggcactgcgaggccaaacagcgacctacgccctcacagttgctatcgtatctgcaggacttccatgcggatctgggcatgtacatctaagcgagacgaaggactgacgacggatgagcggtatccaggtggagtcaagcggagcgaagcccaaaataaattaattgaaacttttgcattttaaatgtgagattaaatgtgaatttacctgttagagtttggcgcaaaaccaattacactgaaagccagctaacttcagatacgtaagcacacgcatatacacacaccagtacactgggatggacctcaatgagttgaaaataactattaaaattaataaaagcagttaaattaacatgtagcttaatatcacggaaactgcctcaagaaatataccacaaggctatgctaatagggtaaattaacatgggccacactgcgtatgagcgatgtgtataccagctagtgcgcacaaatgaacatcgaatgctttaaggccacacggcgtatgagtgatgcaattttctggccttaatgttgaatctttcctcgaacaaatggccacactgcgtatgcgtaatgctttagaccaacgcactgcccttgaaagccatacatcaaagcaagtcaaaagtcaaataacaactgaggtccacccaacaatagaaaagctatgattttccaacccgttgacacaaggcccgggtcgaactggccacccgagtggcatgtgggttaagcgttagataaaactgacatttaagtagttagcaattgaataacaaacactcacacgcggcgaaacacatagaatcacacagacacatacacgaaccttaaatgataaatgaatgtgaattattgatgtgcatattttattgaatgtgtgtagagtgtaagcacaggacgaaggattgaacgggaagagatgcgacaacaggatgcggaatcttttgttcacaaatgttgtcctcgagattgttacgaatgcgatatatttatttaccttgattattattattactattgcgtatgtcataagggaggaagttcaaaacagaatctgaatcaggtgaaaagcaaaaaagagcaaatgttaagccgatggcaaacaaccgatgaacattattcacacccacgaccacaaacacaactacacactcgcttgcatagagctcccttagcaccttaaccccagaatgccctgcatcgtttacaacctccacaacttgtcccaacttgctcgtataacgcactaattcagtttcggagaaacttgtcgcaatcgtttcgttgctcaattatttcgaagtcaaaggacagggggaataatctccgcttctggcaggatacgccatgaaaaatgcaatatgcagctggcttttcgctcagtgcatttgtgagtgtctgcgttcgcttctcaaactgtcacttggccccaatccgagccaaaatctccagcttaagacgtccctgctgcttgtgtacgccttttagttgaattagccagaaattgtttctgtttctgtttctatctctgtatccatttcctcagagttgtgtattaatttgcctttccgttagccaactcaggcggcaacttaaagttgtcaagcccccccacaaaaaaaaaaaacacccacaacccccagaagatttggaaaatgcaatgggatgagagtggatgtgcccaaaagactttagagaaggcagacacccatcccaaaatattttccaattaataaatagctaaaggccgccacttaaacgtagtttaaatgttctccgtagtaatcaaagaaaaaagaatctgaaagaaatgcaaataagaacacaacaaccagtcacgcaccgaattaactaaggtcgaaatagaaaatagttccaaaccagcagctgcttattattcgtctagctacgtaagccatctccgatattgtttattcttaagcttcgcactcgactatggaaacgttactaagcaaatactgaactgtaaactatcaaagctctctgcatttaataaatatccccaaaaataaggctgccaggcagccaactaaactcagcacactcacagaaaacacccacacgaacaacaacaattaaagataaccggggatgacgaggagaactttaaatatattataaagctaaggagacggagctctggaatcaaaggagcagcccactactataactaactgaatgtgtttcatgtttatatatgtgtacgtgagtgtatgtctatgactaaacgtatattttgtcgtcaaattgaaaactaactgtaaaggctattaagaggaaaagcaaccccaataccaacaaacgtgtaaagcccggaaggcagcggctaaaacacacacaaccagacgcacactcacacacatctacacatacacacacacactcacattcacagagcggaagcctagaaaccacaaagcaaaacaagttgtcattcactctacatatgtctcactctttaactctatatagatgtatatccctgtatcctacttttagatatactctagcgtatgattgtatgtgtatacaaaaactcgaaactaatgtgttttcgtctagaaacgaaatgaagaaggaatatatctgctaaggcacacaaacattcgcaacactcgaaacactcaaaatactcaaaacacactgacacctttgagaccccacccccctctatctattcgaacgctattctaagtgggcgtggcaccaagataaagctaagaaccagaacgacaaccttaagcagaaattcaatttttgtgaagagcggcagccggaaacgaaaaacagaagaaacagaaaaactcggaaacaaaacaaacaaaaaacaaagcaaataaattaaatgttccttttgaatcataaacaacaaaaaattgcaatcgagcaatcccagtgctttattaatcaactgacggtttgtataatggggggcagtccaaagaaaaaaatcaggatgcattaagggcggagccgctggacgggcggcatccattccatgcgagggcacgttcgcacacaacaggagcggttcaaggacccgcgccaaaaaggggcccattgaatgaactgaccccatgcatgtgctatatttactttaaaaaacaacattatttagtgctttttatgatgttaagccgaaggaaggtaagtgaaatcaatgggctcttgtcttggttgaaccgctcctggacagggtccgctatccttcgagccagaaaaacatatttgccgtgcgtgtcaaaaactgagcgatgcgcatttgctgaccccatgctaccctttcttgatgggctgcgtttgtgccgctctaattacgaataattttaggacagggtatcgaactgcatataccctaaaacgaaaaaaaaatactcttcgatatcgttagttgctaaagagaattagttagctttttcataagtggggacttagaagctctacaggaacttagtatattgtaaatgattttagataattgaaggcctaactctttaagaaaagacatttcttgacatccttgatgcttaaactagcagtactatttaatggtaaatatttaattagctgtgccaaaaacatactcattactatagaaagagtacccaaagatgccatatcgccttaagtcgactgtagtacgccgggtggacttaatcgcttttctcttgttggtagctgtcagtggacattcgctttttctgccatcctccaaacgacaaaactttgagtagcagcccctctagagggaggggggggtggcgtgtccagcgggggttgccgctgtgttatgtgtttgcctttgagtcggcaaaaaaaaaatggaatcggaaaacaaaacaaactaaatgggaaaatccggacgcaagtttgccgtggaacaacaccgttggccctgcgtacgaggaaaatgggaaatcggaagtgcgggaagcggaagtctacaacgcggatatacgcatatatgtatgtacatatgcatcaacaggtgttatttttgggggggtaacggcctttccatgggattaagttttgtaattagccgagtctgattgaattggaaatcatgtttgggaattaatgagcaattagttgacgcattatgagcacgtctctcccatcgatttgcggctggttgccttgataagatcgccgaattagatggggcttataaataatttgttttgcactctatgaagaagcttaatttaaaagtaacgaaggagtttaatagatcagatatatatttatgatagctaaagcttaaacgatttaaacagaagtttaaaaaacaaactattttttgcctaactccgtgtaagtcaagtcattttacatgttaattattcatgatgatgatgatagaacgataaaaatggcattcatactaaaagtattaataaatacttcaatgtgcaacagtgcaggctagttgaagagcgtgggtatgcatttcactgcgctgaacaagcctatttggcaggcataaatcagaatttctgattgagtttatcgctattttgccattttaatctatttagcatttaattggcagccagaggagctgggaactggcatgaaatatgcaaaacgctttttaaatcatttaaaaggctttattatttatgaattccgatgatttgtggcactatgaacacgccggaaatcgataccgccaggcactaaaccaattaaatatgagtaaacatatcaagcggtctttgactggccacgatcgaaatgttagattacaatataatgtatgtttttatcctgcggttttaacagtgcattttttacgcgccattttcaactcaatcggtttaattgtttatgcagtccgcgttttgcctggaatgttaaacaaattgcggtattgcgggcacattgcatttttatctgcaccgcattatgtgcactcgctgcggcacatgtgttttttaccacttttaattaaaattatgtataaatccacatatgtacatacatatgtatatacggcgaactgcaaaccacaaaataaatagactatccatccattcgaatggcaggaaatcgcacaactgaaactgcgattatgtttacgagtactccggcacaaggcacactggatgtattgttattacagctaccagttatcgcagaggattttccatttgattaaacgtaaatattgtaccaaaaacaatgaacaaaaactacaagctgccagacttgcgccaccgccaattggttgcgaaagttcatcaatttgacagcgaaattcaatggattttgctgctccttgttagttatagtagttatacgctgcaattgcattaattaaaatttttcgccagactgcacggcgagcaacaataaccactggaataattcaacttgattgtcttgatagacagccaaaccggcaattaagcactcgctgcgcccaagatcgaatctaatgttgtgtctgccacaacagcaactgccaacttatcgccagctgcagcttttggccatttccgccgcccaattttgggggtggggccatcgtagtgccgacagcgatggattgcaaaatcagtcaaaataaatcaaagtgccgcttgcgaatgacgtatatattactcagctgcatggcacaactatttgaattaatttttatatgtgtcttacaatgctaaaatgtagttgaaatgctctattcatcatgaacaactaacagttttatacacccttttttaaaagacttctttattgcagaactttgatggaaacttataaaaaacaagctgacagtgatcaaatttgtaatatattactttaacataaatatgaattcatgaatttgtatatatattaaatgagttaccttcaataatttactgatttcttgcctttgctgattttatatttttgcaattatgtagacctagctataaaaacgccagtttcgcatgcctgatgcttcgactattgataaaataaaaatggcaaaaacagtttacaactttcgaccgtttacaactaacaaagggtcacaaatcaagttggtcgtagggttggctcgtgactaaccggaagtcgccatgtgcaagaattccgccagccagccatctcacacccttaaatcgcaccgactccacaccaaccacccccccccccccttcgtttacctagttgggccgcctgcagtgttgcgatttaattaaagcgccattaagtcagcaattaacaacaacaacagcagcagcaacagcaacaacaatgccagcaaaagcagcaacaacagtaacagccagcaaaacaaagggcaaacaactttgacgccccggcttcgcatcggctttagattttccttttgtttttcccgcttccgtttccgctcttcccgctttcattatgtttgcatttgctgctgctggcgcattaaattcaagggggccattcattgggcctcccttatgtttctggccaggaaccattttgcatattgcttaaaaaaaaaaaacaaaggaggaccctgcacaggaatcacactgtcgtggaaaagtcgcaaccctttgattttcccagctaactgcagcccacac

SEQ ID NO: 7613 - DNA, 1869 bp, DROSOPHILA
aaatttgtaaatcaacctactcagcagggggtgaagtcaagctccacggggggatgttcagtgaaaaggggagctgactatcaaggccttgggagttctacacccagtgaaagtcggcgacacccttgcagcctatcgacgccgaagagcatccgaagcaacggcaatggcaactgcaccagcggaagtggcagcctaagcctttttggaggcatccccaccggcagcaccatcaccatggccagtcacggggagaagggtaaccaacggctgcgacggataaccagcgtccagcccggtgccctcagctacgaggagctggtcaaggagggcaccttcggccggatttacgccggcaagctgggcgagtcatgcgaggcgctcgtaaagaccgtcatcgatggcgcatcgctcacccaggtggcctgcctgctgcaggacgcctccctgctgatcggcgtcagtcatcagcacatcctggcaccgctgttggccaacacggagctgccgggtccaccggagattgcctatccccatccgtccaagggcaatctcaagatgtacttgcaaaagtcgcgggaatcgagcacagcattgagtacgcgccaactggttgagtttgggctgcacatcaccaagggattggcctatctgcactcactgggaatcgttcacaaggacattgctacacgcaattgctaccttgacgaagagtcctatgtgaagatctgcgatagcgccctctctcgcgatctcttcccagacgactacgactgtctgggcgacaatgagaatcgcccgctgaagtggctgtcgctggaatccctccagaagcgggtctatgccacccagggcgacgtgtgggccttgggcgtgacctactgggagctggtcactctggcgcagatgccgcacgaggaggtggatatattcgagcttaccaattacttggctgccggcttccggctggagcagccagtcaactgcccagatgaattgacttccatgcggatctgggcatgtacatctaagcgagacgaaggactgacgacggatgagcggtatccaggtggaagtgtaagcacaggacgaaggattgaacgggaagagatgcgacaacaggatgcggaatcttttgttcacaaatgttgtcctcgagattgttacgaatgcgatatatttatttaccttgattattattattactattgcgtatgtcataagggaggaagttcaaaacagaatctgaatcagctgtcagtggacattcgctttttctgccatcctccaaacgacaaaactttgagtagcagcccctctagagggaggggggggtggcgtgtccagcgggggttgccgctgtgttatgtgtttgcctttgagtcggcaaaaaaaaaatggaatcggaaaacaaaacaaactaaatgggaaaatccggacgcaagtttgccgtggaacaacaccgttggccctgcgtacgaggaaaatgggaaatcggaagtgcgggaagcggaagtctacaacgcggatatacgcatatatgctttattatttatgaattccgatgatttgtggcactatgaacacgccggaaatcgataccgccaggcactaaaccaattaaatatgagtaaacatatcaagcggtctttgactggccacgatcgaaatgttagattacaatataatacagccaaaccggcaattaagcactcgctgcgcccaagatcgaatctaatgttgtgtctgccacaacagcaactgccaacttatcgccagctgcagcttttggccatttccgccgcccaattttgggggtggggccatcgtagtgccgacagcgatggattgcaaaatcagtcaaaataa

SEQ ID NO: 7614 - protein, 543 aa, DROSOPHILA
MASHGEKGNQRLRRITSVQPGALSYEELVKEGTFGRIYAGKLGESCEALVKTVIDGASLTQVACLLQDASLLIGVSHQHILAPLLANTELPGPPEIAYPHPSKGNLKMYLQKSRESSTALSTRQLVEFGLHITKGLAYLHSLGIVHKDIATRNCYLDEESYVKICDSALSRDLFPDDYDCLGDNENRPLKWLSLESLQKRVYATQGDVWALGVTYWELVTLAQMPHEEVDIFELTNYLAAGFRLEQPVNCPDELTSMRIWACTSKRDEGLTTDERYPGGSVSTGRRIEREEMRQQDAESFVHKCCPRDCYECDIFIYLDYYYYYCVCHKGGSSKQNLNQLSVDIRFFCHPPNDKTLSSSPSRGRGGWRVQRGLPLCYVFAFESAKKKWNRKTKQTKWENPDASLPWNNTVGPAYEENGKSEVREAEVYNADIRIYALLFMNSDDLWHYEHAGNRYRQALNQLNMSKHIKRSLTGHDRNVRLQYNTAKPAIKHSLRPRSNLMLCLPQQQLPTYRQLQLLAISAAQFWGWGHRSADSDGLQNQSK

SEQ ID NO: 7615 - DNA, 15762 bp, DROSOPHILA
agaaatgtataattgtaattttgattttatgctgctactacgatatataatccttctaagtggtatatatggtacttttttcaatggatccatccctccacttttcgcctacccctcgcctaatctatgtacgtatttagattcctctgaccatctcttctcaattactgcaactcgattgcgatagattactattacgcataggaactttgatagttaatcactagagatatatgtatgttataggttgcggtatgttatggtttatgctttgtcatgcgtctatcaaaatatatgctatatatatttatcatattttgatgattagcacagtgctgccagctgaaacggacttgttcttctttgttatataggctgtagatttgatcagtgccatgttggacatggtcaacttttgggctcgatttcgggcttagatattgatcgattgttgtgttatggattttgtatatttaagattaataatgagctcaactaatatgcgcactcagtcttttgtagttccactattttgtcttgttcaagttcctaacttcgtttgcttaactatttagtggggagatttgggagtccctgggatcggaacactcaaggatttcctgtattcttcaaaatgtttaaagtattatgcatacctacgagttaaagacagaaattgattcgaaagaagaaaagttttctctagagtatcccaatcccgtgactttgtggggcttctttggtttctatggcttgaacttacgctggcaacactatacctgttgcatgtggcacctttaggccggtgtgagccggaagctgagcgtggccgactccgaggcccggactcggacgggcaggtaaaccagggcaggtgcgaactgcatctcggagtcctggtcggcaggctgcaggtggaaggcctgcatctgatatgcttcctctgccccatccggttgggcatagctggccggcttgccaatgccgttggccaattccccgcagccctcgaagggcgaggtggccgcggatcggtggccaccagttgcactgcccaatccatttggcgtcgttgggggctttgaggtggatcgacggcgttgaatcttgggtgaagttgagctggttgctttgggggaggaggcgggaggagatccggccccagttgagggggaacgagatgccaccttgggcgctgaggtgctgagattggtgggctccagtggaggctctgtttcttcggatttagcaggaggaggtgccaccatcgatttgctggacttgctgcgtgatttacccgaacttctggagggttgtggtggcggcgtctccatgggcaactctaggccctcgcctccgttgttgagcagagcatgcgatcgctcatggatgaacaagaaggcgtagtagggcgtgctgaagggacacagtgagcactggtactccttgaaccgggccgactgctcgccaaacattccaggcaatggaagtggtggcatcttaggaatctgctgctgttgcatttggccaaagatatgctgggcattaaggttttgcagggcctgggcgagattgggagcggtatttccggctccggcacccgctgctcctgggttactgccacttccgttgggaatcttgagcgtgggactgttcggcttgctgcgcgtcgaggattgggtggtgtccatttcccggaggcgttctactccggcggttccgtgttcgttcatcagatgggatcgcagccacttaaagctgcggaattggcgagagcagagtgggcacacctcatgggccgagttggatgaactgccgccactcccctccactgtgggtggtgagacattgaggtcctgatcctgctgcgcttgcgatggctgtgatgctgctacggcggcggctgcatccgctttgactccattctgacctcgcggctgtggcagtggagatccctcctcgataatgccatgggtgttgtgtttgtgcacccgcaagaagtacttgctgcatagctccttgttgcatatgttgcacacaacgccaccgatctgggcgccattctcgatctcgatgccgtgcatccgctgcatgtgcgtcttcatgaagtacttgttgcatagctccttgttgcaaatctcacagtagctgctcgtgggtgttagggtataaggtgggcgatttgcagcaggagcgactggggttccgggtccgcccgctgacggcgccactgggcgttcgggtgtgaagaaaccctcgcgcaggggacttccgctcagtcctccgtttctgcccaagtgcacctcggcgatatgttgcttgaattcctggggtgtggcgaaatcacgatcgcactgctggcagcgcagatcacaacctggcggggatctggctcctggcgccggcggagtttgcggatttccctggccatggtacaaactggccatgggatgcggggcctgctggtcgggcagtggaatcggtatgggcatgggcatttgcatctgaccagcatgttcggtcatcaaatgagccctcaaagtatactgattctcctgctcctggccacaaagatgacagggtagcgggcgcttgccattgatgtcgttcagttgctgcaacatggactgcaacttctgaagattctgcaagcccaccaccgaaccattcagcttatcctcgtcgtatccctccggcggtgtctgtccctgttccaacttgatcctcttactgggctgctctgaatccgtttccacctccggttcgcgctcctgctcctgctgatccatggtggctgctgctgccttggccagcatcagattgagtggcatgaagggccaagcactggccatctgggcttcatccttgctgcctggctgtggtgccacgtcttcgggtggcacaaacagaccgtggcgcttccacttgtgagtgcgtaggaagtatcgattggcatactcccggcagcacagctcgcagaagaagtcgggaaactggacgcccaggcgacgtagcttatcgggattgaagttggagtctttcgcctgttgctgcagatgggagggtaacttccggggcggtggcacaaagctcagctcctcctgctccagggtgaagtcctcgcggaaaccctcgggcaactgatagggcttgatctccgcatcttgtgacatttcctgctttatagttggctgcgatggctcgttgggacttccccgatgcgattgcgattgcatgggtgtctgggagttgggtgaaacttgggcagctgcttgtgcctcgtgctgcttggcccgatggcgacgcatggcgaatatgttggtgaagcgcttggaacagatgtcgcagtgcaccgaggccacgggattcgatgctccgccagctggtgtgggatcctgtttcgccacctgagcatctcgctgcagctggaacatttgactcatggaactcatactgggattggggtgaccactggtattgttgttactactggtgatgttattgttgttattattgtggtgactggaggtgttgctggagctcgattcgccaacgggatcaaagatgccatgcttgttggccttgtgcgtcttgaggaagtacttgttgcagaactccttgttgcacagctcacagtaggcctcgggattgaagatccgcaatggagggcggttgagaccatccactcctggaaacccggacatgccgagcagtggcaggtagccagctggtcccaaggctgcctccggtggaaagggaaaagcaggtggcatttgtggaccatgtggatgatgctgcgcctgcatggcctggaaccagtgctcctgctcccgttccaagtccttgccatgaccattggtaaggtcgtgctgcatattttgctcctgttgcggactgggaatgtcggcacgctccagcttcaccttgatggaggccagaaagtctgagggatcctgatcaccggacctttcctcgccgtgatcctgcaacatgtggaggctcaacttgaactcggtctcgaaactctcgccgcactgcttgcagtaagtgtggtatggattctcgcgctgcttgctggattctgatatgtctgccatggcttccgtttccgcttccatttcctctcccgcttccggcggctcctcctcttgcttcctctgctgcagcatctcgaaggtctcctttagctgctcaatcgacttgggaaggaacatcttcgacaacttgtcctcgtagtccacggtggaggagtctgctttcttttgacccacttcaccagtgggttccccacttaaattgagcgcctctaagcggctgggattgtgctgcttgcgtcgcttcttggccgcatcacttagggcctccagtatctgcagctgcatggctgccgccatggtggccatgttggcatcgcccacctcctcctctgcatccacatctttgcgtccatcttctgcctcctccaattggtccgcctcattcgctccgcttcccgctggcttcgggtccagttccagctccattgccggcaccaaatggtcggcgggtgaagtgctttccactcctcctgctcctgttgctcctctggttgtggctgacgtggctgtgggtgttgctcctgcggcttcatgtggattgttgctgttgctgccgctggtgtggttgttcctgttcgtgttgagtgtcgatgagttggagacgtcggagagagcagtgtcctcgctgctcagatctggcggtggggtggcatatatggatgcagccattttggatgatattactgcggggcgggggaagaaagacggaaagggagaaacattgtagtggagaactttttaattgaagtcgaagccatgctagcgggcggtcttttcgataaggaatgggataagggttattcatgtgcatgtatgtatatgtagtcatatagttaccatatgcgatagattaagataaacttcaataacgcaaaaaaacacattttaaagaaattaaacaattaaagtcttaagtcttaagcccactcacactgttttctgaatggtaaggaacgtgatttatttttcataggcaataaatattaatagttagaccaaatgtaataatctttttaacaatagggaatagtatggttatggtaatccacttattcacaagtctttttcctcttttccagtgtacacaacgaatagactgaggcttagatcgcattatttttgcaaagggaaaaacgtaaaaggaacgcagaatatttggccaaggattccattcaattttagtttggcttcaactgaatgccactcaaatatttctcctgcacacacacacacacacattcgcataagcccgcacacacacacacgcagaatatttgtgtctcatttccgtatgcgcttaatttcatttttctgcttctgtccgccttctgctgcctctgctccataatcattattcccacccatcgtgccctaccgcccacctcatcccaacacactattttgctgtggctacactttttcatttttgtgcaaattctatgaaaaatttttccattatatatatatacatatgtatgtatagcatacacatagggggaaggaaactttttcctttttgtttgtttactatgagccccagctgccacccactaacacacatacacacaaccccattgtggcgcacacgaaaatttatacaaagtcatccgatttaaggaatacaaattttgcttattttcttgtgtgcgagtgggtgtgcttgtgtgccgcacacagaaaacacagacacacacacacacacagcgatttgccacccacttttcgccccccggccaacaccatcacttgagtcaagcataaaacttataaaaattttcttcaacatgacttggtaaaataaatttgattctcaagaaaagcaaaaaggaaaataggaaggaagagatggaaaagtgaggaggaaagggggggaatgcctggcaacagggaggcaaaaataggcggagatacacagggagaaaagtttatgggaggccaaatgaaataatcattaacatttgttctaatggattattgtgcattttccaatacaaaacataaatatgcataaaattaaaagaaaggataacatgttatataagccaaataagccttctataaataaattattgaatagcataataataatattgtttcaattgtataattgtataagtacatattgaattggcctgaatttctttccgtgcagggaaaaaaatttcgaaataaaccgaaaattctttttcctatttgagctgaggcagaaaggagaaaccccaaggaggcgcagtcaaagggtagggggaaataagtttgatgggctggtgggggtggcgggcagagagcaggaaaaagaaagaaaaatattctcaactatgctgcagacataaattaagtttccatggttggaaattggttctccagctacatgttgtcgttgtagttgtagttgttgttgactttgcttttatacaatttcttcaggccgaaaccaccgaccccataccccgatcccttttaaccccccatgaccccggaccagccactttgaggagttaagcaaaaatgcctgccaggatgtgcgcatttctcttcagtatctttgtgggcttgtgtgtgtgcgcgtgtgtgggtgtgcgagtgctgcttgtgtttcgactgggatttttataaagcctaaggtagtttgatgttattttatttgattttttccgcctgccttaccgccttatatccatctcatcgtgccaggaggaggatgcccgagaaaaatgttcgaaatgaaaatgccaacagagtgtaaacaaaaccatatactcctcgactaggtatttatatatatatatatgttgagaatgggtgtgtgtgcactgtatgttttgagacttcgcaagagatgcggctaatttagcaaaccaacatatcaacctagttttggatgcggggctggaggactcggaacacaatcttgacactggccaagggaaacccaataactttggattggttttggtcctggcaaggatatttgatggaatttcagaagtaattctaggtagagacggcactttgaaagcctaaaggacacagcaaaatctttgaacttttaaaaaaaaattttcaaaataattgatttgaataactaaaaattttcaaataaattttctgattttccaagtcagtttccaataagattttgaacacagccaattaataatataattactttctattaaaaaacaattccctcataaacagatttacacttatgggatcacttaacactatcttttcaataacacatcacaatattatattatatatccacctactcattaagtgcgttttttttaagtgtcgcgatccgaaggactgaatcgttggactttcttattgtctctgtgatgaaagttcaacgaacattttcaaaaactattttctcgatcggtgatctctagatgctctcgttatattcgcgcggcgcaagtcggtgttgcgcatgcgcactttttatttttatttttttatttaaatctttggcgtgtgtcgggatcgtgtcctgccaagtggcttgctcgttgtcaactgccgcatgacgcagcggaataacaaaaatatcggctatcaattgccagttgccggttgaaaatcaaaacagcaaatagcaatgatactaaaatcccggcgacacacacaagcctaaccctccatatcgcttaataccgcgagcacacacacacacacacacacacacacatatgcacattgtgggcccctacccatatcacggaaaaaacctcaataaaacaccccaaaatatcaaaaatcatagaatttcccttaaaaaaatccatagagcgacaactgagcagcgctgcccggaaaaccattattgctccgccccttttcgttttctttttccctcctctcttttttttttttaaattttcagtaaccaccacaactacaactacaactacgactacaatagaaagggacggcgacacacgaatgagcaacaaccgcgcaacttggaaggttttccctcgatattattgttgtcgtgccaatttatcattgttcgataggattttcaatttgtttttcctactgcagaagttcgtgtgccaccatcgttgttattggtgttccggcagttatatttttgttattttaatttatgcgctcccaatgaaaagagtcgcattttcttttggtttctttcaagttcctgtcacaaaggctgaaacttcttgacttgagtagtcaggaatcgaataaatattttccgaaagggttttgggggttgctcaatgtcctctaatgctgaaattggctaattgaagggcttctgcggactaaaaagggatcagaatccacacccaggtaaccagtttcatgttaaatgccttttagggataactgtcaaaggacctttgtaattgtcttttaataacatgattacctaaatgtattgtagggaactctttggaaaggcactttatttgaagaataagattctgacaatcctatgacaaaagatatttttggatctaaaccaaaaaggaatatgaaacaatttttttcgaaaagaaaaccaaggaaattaaagttggttaaggggtgatttacatgtattgtcatttttattttacaagatatgggtattgaagtcaaacgacgtttaattgatttcgatttatatgttttaattcatgattaatttaaattgagttgaaaaaaaaatcacctccatttgaactatttataattatgatattatcactattgaaaatacaacctttgttgtgatttttttttagtggttggtaattaattaagcattttgaataatttataacaagcctcgtaaatacataagtgcatatacataaaagtagtatttctgtatcaagaataaaacagaaacatacaaataaataaattgatgatcacgtcagagctgaaccgaatctctaaagggaataacatttgtatcagtgaaaatctgagtcacactctatccccagagatacggcgagtgattgtttgcgttgcccaattgacggattgacttacagatacttgtgtttcgaaggacatgcctgctgcaagtgcatgtgtgtgcgtgtgggcccaaccttggccaccccttttttcattttcccccgttcttttggcactcggcattcaacacacatcagaggccgaaaaagtgaaagtaacttgccccgatgccccaaacgtcctgcggcgttcttcgggatctgcgcctgcgcgatgaaggtgactctctttttttttggagcagccggccatatgtgtacgagtgtggatggaaaatcgccggttgaacgaaccaggctcgcaaaatggtcgagcagcaacagtcggtacggagcagtgggcaactcattggtcggcagctgaatcgaatcggatcggatcggacccccgaatgacccacccggccacccactcggtctggtctgcattgacctgctcgacgccgtggtcgtggtcaaggtttttccaccgactttcactctcacacatgtccactgtgacgttgtcggtgccggcactttcactttcgccgtcactcggctgaaatcactcgcacgcacgtaccgcccgaaaagaggggcttcctctttttcgtaggcgcatgtccttgcagtgggcggaatgtaaacaaaccacaaatgttgcggtcaagtcgttataaaccgaaatgcaattgcctttgcattattaagccaagcaatgcaagttgtttaactacctcttatggaagcctattaaactaattatgcccctaatgaggatagtctggtaatattcttgaaatgtcatttcaactattgtttagttaataaggtgggtacatgggtttgggttcaattaattgtgagcttatgtaaccataaggtttatgtgaagttttggaatgggaacctcaacctcatcaccatttttcttttatatgcactcaataactttggttgtagaccacttaacgtcttacatgtatgctcttaagtactttaacaataggaactatacatatatatatagatatatatatatacatgtatatatagatatgtatatattttttaatatatctgctgttctttaagccaagaaatgggctagctacccacccaggtcgttagacaccataatggtaattattaaatttaaattcaaactggacccaacccacttcgcaccctttgcatagcgtgtcctgacgaaatgtcgcttatgattgatacgccctttgtgcccatatgccacactaacgccttcaaaagcagatcctgacaggacacccccacccaattgcggtgtgtggactgcaattaatatttctgatgaaaatcaaattgaaattatgcgtggactctaaaatgtaaatggaaatgggaattataacgagtcgcgggactgggaaatcaaccctctgcacgagggtaatgatctttgttagttgttctgctagtgcgggggaggaatatttcggaggggacgggttttggtgtcgcctttccgcgggaaatgtgtgcgacaaattagtttgcttcaaaggcaccatgtacgtgaaattttgctcgagtattttatgtggttagactggcattacttttatgtccctttaattacaactcattggttccaattagtttttgaaaattcaaattttcatggaaagaatcaaaggatgtgttaaagaccccctaaattttatatccatttcaagtaacaatcgattaatcatgattgcacaagaacgttgatgtaattagaattaaatactggagtaatctaagtaaggtaatgaccataactaagagaagtagaaacgaaaacctcctcaattcttccgaattcgtaatcacatgaaatgttcgaagtgagaagtgtgtcgaaacaatttcccagaattcctacttctttgacgtatcaacagaaatcttgtgcacaaagccctaagctaaacgacaggaaaaaaaaacggaaaaacattggcagtttctaggtgctcagctcattagtaagaaatctcattagaaaccaatgaacgcgaaggaaaagcaaacaaacatgaatttatggggtgcgaggtggaaaaccgtgtaatgagaggcttcgaaggcctcaaaatcgttcaccgtttgatatttttccatcaatttcactttcacatctccatggcgcatgggccaccaagtgaaaaattaatttcccccaaccattttcatttcctacacacacatacacacgctcatacaacctattttccgaccaaccgaaaagcgaaaagccaacaaaaactatttccatctctgtccgacactgaaacttttttctatcaaatattactttgtacaataaactaaatgcgtgtgtgtgtgtgtgcgttccacccccttgctcatgtgtgcgtttgtgtgtgataaaataaaaatacgaaaaatatgaaaaaacgaggaaaattaataatgaaactcaaacacagagacaaggacaaatgctgtgcacacaaaccagtccaagtgcgtatgtgtgggtggaatatggggaaagaggagagaggagaggggataggggttataatagtcatgtttataataaggcaagtgttttccttggctctaatgagactgatactgtattccttatcatctgccctatcggcatgatgatgaacattttgcaaaagccacccccataagtatgctgcaaaatattttgtaagaaaaatctatcgtccgagaacttttcaccaaaaaaaaaaagaagaatacaaaagcagaaaaattccataaattctagcttctgtctcaaacacactcgcacacacacacacatagttcgtgggggatggggagaagtttgcaattttatcagaaatacacacacccacacaggcaggggaaaaccgaaccaccccgccgcctcctttttggcccacgaagcgagtttatgaaaccatcaaattattttcttttccatttctgacactcaaaagaaacggcaaatatacagagggagggatgaatgtggggtggggtggagtgggtggattgggtggattgggtggtgtggtgtgggtgctcttcggagaaagcgagaaatgaaggaaaaaagggagaaaaaattattattttccagttacagtcggcttggtctccatggtggccctggcacatcctttacattattttcctgctgctgctcaaagtttttgccatgtggccccacccgctctccgccgcccttaacccataatgcctgcgggttacatttcgcccactctgtgtgtgtgtgtgggtggcttgttgggtgtgtgtgtgtgtgtgcagctacttcgtcttattcgagtacgaaatttttatgagaaaatgcctggttgtgagtgtgctcgtgtgtgtgtgtgagttactgggctgtatatcaaaatatttaaaagcaaatataatattggggaggtggattgccctaagtctgtgtgtgtgtgtgtgtcggtttgttcgccaagctggaattcgggcaaaaggcgtaatagaaaaacacttaagccaacccccatccttcgagccctgcgaaataacaaaatgtaaaaaaatcatttatacaatacatacagatgtatacaagtatatacttatattaataatgagccgcagcgccagcgcaaagagaaaatgagaaaaaaaagaaatatattcgctttgcgagtgtgtgtctgtgtggaatttattgattttcagcgaataaatattgctggaggagcacatggcaagtgacttaatatcagtcggctggatatttacaacagacacatgcaaaacacaaaacatatatcaatagatatatcttcgtattgatttggtctgctgacgtcgctgtttgctatcgttgaaatttttatatttttattgtcagtcgcattaaaaatacttaatctccgacggcccagttattgccgctgccatgtcataaaaagtgggtggtaaccgggtgggcattttaatcatgtccatatcgaaaattttactttatcgcagaccagagccgggggcatattattattattctcgtctctgcttttacgttattagcacccgtaaggggacctcgtggcgtatgctcgatgtgcgataaaaccgtgagctaatgagactttttaataaattgtcccattccggctggcctcgtttttagtacaattttcattattaataaaactttatgacacctatatcaggcatcgtgcacttttgtttcataaaaagagagagaccagcgaacaccacacgcacacacacgcacacacaagtacgccatttattattccaattaaatttaccaacttcgttggacattgtctctgtgtgtgtgagttcgtaattgtatccatcaaaaaatcgcatttatcatttgtgttctagctttttgaacacaaagtagtacatattggtgcatataaggaaaaccttaacgcacattctcattaaaaactggtttgtcaatatagcatacttattggaaactgtgtacagtaaatcaacgcccgtggcctatgaaaatttaaaaataataaacataaatttaaagtaagccctgattttgaaaacctttagttatattattgaatcgttgggataagcaattactttaagagtaaataatatccgaccataagcctataatcttaataaatatgaaattcaatatatgttaaatgtaaaaaagcaaatatctgagaagtatttcacttatattactatactatttataaatgaaatccgaatgaaataattcgtatgaagtcattatatgtgttctatacatacatgcatatgaagaggtatagttaaggggaaaatgataaaaatgcagtcttttagtttccatatatctttgtaatgaaatgtttttagatttattatcatttatgtggtaatttggaactggaaattaacgttgactgcacacatggtatgtagggggggattttaagcgttcggaagcattaagcaaacacatttttaatttgccaattcgaaataattttgatttgtatttcttttaagccaattgtaattttttaaatttttaggtgaccaatgcaagcgggcatagttcaataatcttatatccggtacatggattatgttgggttacagttttcgtagctcggactcacaatgtctccggccagagagagcatctttaatcctaagtgtaacgttttgcgataatatgcgcgcatcgaaagaaaactccttgaataaggcatgtttgggctagtatcaaaattttaaattatttaatacttaattagtttgttagagcttaaagcacttatcgggtttttttagcacagcgtttatggttataaaaatacaaaataagcttggttatccttgatttaatatgtttgtgttgccaccactttttgattgttattggcttacaaatcctcgggttttgtcacttatttcaaacactttggacacagtaaatcggcagattgctattttcatttgtttggctttcatttgcttctcatggatttggtttgattttgttgcagctggaaacttacagaacttgtacggggcgttacacttattttatcatgccgacaagtccaaaacgacgctgtggtagccacccgcggctacttctgcaccacgtacgcgttttctgtagactgattcggcttttcggttttcccaattgccagcctgccgccaaaggatgcagtcacccacacccgcgcactcgaaagagagcgagagcccgcgagagaaaccacccccagagccaaccccaacctccagcgggcaacgctctgttgctattttgtttacttctcgccgcgggggcgttctacggactaaaaggagagacacccaaacggtctagtaggggagagggtggtagagcttggcaaaacatgtgctagtcttatccactaactacgtacattatttggcgcccaacgtggggcatttcaatcgaaaattcatttttgtttccgcttgtttggtctaagcatctaaatttggcttgtaacctctacaatctaaaaaattaaatatgcatttattttaagttttaatacaacaattttcaaacatttggtctatacccatgtcatatttatttatatgtatgtatactgcgcgcccacttgatggattcgcagtaaaagcacacatccatataagtaaacgaatcctaccctctgctcacaggacatgcgtattagataagccaaatataaaaatgacactcagagaacaactctccggaccattttttgttgttgttgctaaaacagtttatcaacacgcccgagtctctgataaaacaatcatcgtttatggtgcaacacgcttcaaccgccgccccccagcagcataattgagatatagtccagtgaccagaccagtaacaccgaactggggtggctaacaaatcgagtcgagtggaatagcaaggagaacagtgaaaagtggtgggagtagactcaagtgtagagtggtgtggacatgttctgcaaccgcatgattagaaattgagcaaagtcgatgataaagcggcgggtggagctgaatcccttacatgtatagaaaaacgggtgggaagccgaaactgggttaaaccaaaacccttccatttaaatgcgtacccaatgatt

SEQ ID NO: 7616 - DNA, 4472 bp, DROSOPHILA
aaaacgcgtacgtggtgcagaagtagccgcgggtggctaccacagcgtcgttttggacttgtcggcatgataaaataagtgtaacgccccgtacaagttctgtaagtttccagctgcaacaaaatcaaaccaaatccatgagaagcaaatgaaagccaaacaaatgaaaatagcaatctgccgatttactgtgtccaaagtgtttgaaataagtgacaaaacccgaggatttgtaagccaataacaatcaaaaagtggtggcaacacaaacatattaaatcaaggataaccaagcttattttgtatttttataaccataaacgctgtgctaaaaaaacccgataagtgctttaagctctaacaaactaattaagtattaaataatttaaaattttgatactagcccaaacatgccttattcaaggagttttctttcgatgcgcgcatattatcgcaaaacgttacacttaggattaaagatgctctctctggccggagacattatggctgcatccatatatgccaccccaccgccagatctgagcagcgaggacactgctctctccgacgtctccaactcatcgacactcaacacgaacaggaacaaccacaccagcggcagcaacagcaacaatccacatgaagccgcaggagcaacacccacagccacgtcagccacaaccagaggagcaacaggagcaggaggagtggaaagcacttcacccgccgaccatttggtgccggcaatggagctggaactggacccgaagccagcgggaagcggagcgaatgaggcggaccaattggaggaggcagaagatggacgcaaagatgtggatgcagaggaggaggtgggcgatgccaacatggccaccatggcggcagccatgcagctgcagatactggaggccctaagtgatgcggccaagaagcgacgcaagcagcacaatcccagccgcttagaggcgctcaatttaagtggggaacccactggtgaagtgggtcaaaagaaagcagactcctccaccgtggactacgaggacaagttgtcgaagatgttccttcccaagtcgattgagcagctaaaggagaccttcgagatgctgcagcagaggaagcaagaggaggagccgccggaagcgggagaggaaatggaagcggaaacggaagccatggcagacatatcagaatccagcaagcagcgcgagaatccataccacacttactgcaagcagtgcggcgagagtttcgagaccgagttcaagttgagcctccacatgttgcaggatcacggcgaggaaaggtccggtgatcaggatccctcagactttctggcctccatcaaggtgaagctggagcgtgccgacattcccagtccgcaacaggagcaaaatatgcagcacgaccttaccaatggtcatggcaaggacttggaacgggagcaggagcactggttccaggccatgcaggcgcagcatcatccacatggtccacaaatgccacctgcttttccctttccaccggaggcagccttgggaccagctggctacctgccactgctcggcatgtccgggtttccaggagtggatggtctcaaccgccctccattgcggatcttcaatcccgaggcctactgtgagctgtgcaacaaggagttctgcaacaagtacttcctcaagacgcacaaggccaacaagcatggcatctttgatcccgttggcgaatcgagctccagcaacacctccagtcaccacaataataacaacaataacatcaccagtagtaacaacaataccagtggtcaccccaatcccagtatgagttccatgagtcaaatgttccagctgcagcgagatgctcaggtggcgaaacaggatcccacaccagctggcggagcatcgaatcccgtggcctcggtgcactgcgacatctgttccaagcgcttcaccaacatattcgccatgcgtcgccatcgggccaagcagcacgaggcacaagcagctgcccaagtttcacccaactcccagacacccatgcaatcgcaatcgcatcggggaagtcccaacgagccatcgcagccaactataaagcaggaaatgtcacaagatgcggagatcaagccctatcagttgcccgagggtttccgcgaggacttcaccctggagcaggaggagctgagctttgtgccaccgccccggaagttaccctcccatctgcagcaacaggcgaaagactccaacttcaatcccgataagctacgtcgcctgggcgtccagtttcccgacttcttctgcgagctgtgctgccgggagtatgccaatcgatacttcctacgcactcacaagtggaagcgccacggtctgtttgtgccacccgaagacgtggcaccacagccaggcagcaaggatgaagcccagatggccagtgcttggcccttcatgccactcaatctgatgctggccaaggcagcagcagccaccatggatcagcaggagcaggagcgcgaaccggaggtggaaacggattcagagcagcccagtaagaggatcaagttggaacagggacagacaccgccggagggatacgacgaggataagctgaatggttcggtggtgggcttgcagaatcttcagaagttgcagtccatgttgcagcaactgaacgacatcaatggcaagcgcccgctaccctgtcatctttgtggccaggagcaggagaatcagtatactttgagggctcatttgatgaccgaacatgctggtcagatgcaaatgcccatgcccataccgattccactgcccgaccagcaggccccgcatcccatggccagtttgtaccatggccagggaaatccgcaaactccgccggcgccaggagccagatccccgccaggttgtgatctgcgctgccagcagtgcgatcgtgatttcgccacaccccaggaattcaagcaacatatcgccgaggtgcacttgggcagaaacggaggactgagcggaagtcccctgcgcgagggtttcttcacacccgaacgcccagtggcgccgtcagcgggcggacccggaaccccagtcgctcctgctgcaaatcgcccaccttataccctaacacccacgagcagctactgtgagatttgcaacaaggagctatgcaacaagtacttcatgaagacgcacatgcagcggatgcacggcatcgagatcgagaatggcgcccagatcggtggcgttgtgtgcaacatatgcaacaaggagctatgcagcaagtacttcttgcgggtgcacaaacacaacacccatggcattatcgaggagggatctccactgccacagccgcgaggtcagaatggagtcaaagcggatgcagccgccgccgtagcagcatcacagccatcgcaagcgcagcaggatcaggacctcaatgtctcaccacccacagtggaggggagtggcggcagttcatccaactcggcccatgaggtgtgcccactctgctctcgccaattccgcagctttaagtggctgcgatcccatctgatgaacgaacacggaaccgccggagtagaacgcctccgggaaatggacaccacccaatcctcgacgcgcagcaagccgaacagtcccacgctcaagattcccaacggaagtggcagtaacccaggagcagcgggtgccggagccggaaataccgctcccaatctcgcccaggccctgcaaaaccttaatgcccagcatatctttggccaaatgcaacagcagcagattcctaagatgccaccacttccattgcctggaatgtttggcgagcagtcggcccggttcaaggagtaccagtgctcactgtgtcccttcagcacgccctactacgccttcttgttcatccatgagcgatcgcatgctctgctcaacaacggaggcgagggcctagagttgcccatggagacgccgccaccacaaccctccagaagttcgggtaaatcacgcagcaagtccagcaaatcgatggtggcacctcctcctgctaaatccgaagaaacagagcctccactggagcccaccaatctcagcacctcagcgcccaaggtggcatctcgttccccctcaactggggccggatctcctcccgcctcctcccccaaagcaaccagctcaacttcacccaagattcaacgccgtcgatccacctcaaagcccccaacgacgccaaatggattgggcagtgcaactggtggccaccgatccgcggccacctcgcccttcgagggctgcggggaattggccaacggcattggcaagccggccagctatgcccaaccggatggggcagaggaagcatatcagatgcaggccttccacctgcagcctgccgaccaggactccgagatgcagttcgcacctgccctggtttacctgcccgtccgagtccgggcctcggagtcggccacgctcagcttccggctcacaccggcctaa

SEQ ID NO: 7617 - protein, 1322 aa, DROSOPHILA
MAASIYATPPPDLSSEDTALSDVSNSSTLNTNRNNHTSGSNSNNPHEAAGATPTATSATTRGATGAGGVESTSPADHLVPAMELELDPKPAGSGANEADQLEEAEDGRKDVDAEEEVGDANMATMAAAMQLQILEALSDAAKKRRKQHNPSRLEALNLSGEPTGEVGQKKADSSTVDYEDKLSKMFLPKSIEQLKETFEMLQQRKQEEEPPEAGEEMEAETEAMADISESSKQRENPYHTYCKQCGESFETEFKLSLHMLQDHGEERSGDQDPSDFLASIKVKLERADIPSPQQEQNMQHDLTNGHGKDLEREQEHWFQAMQAQHHPHGPQMPPAFPFPPEAALGPAGYLPLLGMSGFPGVDGLNRPPLRIFNPEAYCELCNKEFCNKYFLKTHKANKHGIFDPVGESSSSNTSSHHNNNNNNITSSNNNTSGHPNPSMSSMSQMFQLQRDAQVAKQDPTPAGGASNPVASVHCDICSKRFTNIFAMRRHRAKQHEAQAAAQVSPNSQTPMQSQSHRGSPNEPSQPTIKQEMSQDAEIKPYQLPEGFREDFTLEQEELSFVPPPRKLPSHLQQQAKDSNFNPDKLRRLGVQFPDFFCELCCREYANRYFLRTHKWKRHGLFVPPEDVAPQPGSKDEAQMASAWPFMPLNLMLAKAAAATMDQQEQEREPEVETDSEQPSKRIKLEQGQTPPEGYDEDKLNGSVVGLQNLQKLQSMLQQLNDINGKRPLPCHLCGQEQENQYTLRAHLMTEHAGQMQMPMPIPIPLPDQQAPHPMASLYHGQGNPQTPPAPGARSPPGCDLRCQQCDRDFATPQEFKQHIAEVHLGRNGGLSGSPLREGFFTPERPVAPSAGGPGTPVAPAANRPPYTLTPTSSYCEICNKELCNKYFMKTHMQRMHGIEIENGAQIGGVVCNICNKELCSKYFLRVHKHNTHGIIEEGSPLPQPRGQNGVKADAAAAVAASQPSQAQQDQDLNVSPPTVEGSGGSSSNSAHEVCPLCSRQFRSFKWLRSHLMNEHGTAGVERLREMDTTQSSTRSKPNSPTLKIPNGSGSNPGAAGAGAGNTAPNLAQALQNLNAQHIFGQMQQQQIPKMPPLPLPGMFGEQSARFKEYQCSLCPFSTPYYAFLFIHERSHALLNNGGEGLELPMETPPPQPSRSSGKSRSKSSKSMVAPPPAKSEETEPPLEPTNLSTSAPKVASRSPSTGAGSPPASSPKATSSTSPKIQRRRSTSKPPTTPNGLGSATGGHRSAATSPFEGCGELANGIGKPASYAQPDGAEEAYQMQAFHLQPADQDSEMQFAPALVYLPVRVRASESATLSFRLTPA

SEQ ID NO: 7618 - DNA, 4478 bp, DROSOPHILA
gagccactgctcctcagttcctcggccaactggaagtgggtctggatccggggcgtcaagctatgcatggataccaccagcctaagcaggggcaattggggagaactcacatggctcttgaccagctccaaggcggcattgtactgttgcgactcggtatctgaaaagcgaaaacgtaatcagaaaaataaattaccctttgggaaaagatcacattatagggctttgggaataggtgattttatattccgaaccattacttgattttatatggattcgattcacattgaggagaatataaaagctctttaatgcgggttctccatgacttataaacacaaaccatattcgttgagaaccgtgtccaacttggtcacccccgaaacgtaatcccagaagaggcccgcctgctcatcggccagatactcggcgatttccagatataggggcgtctgcgtccatttcgcgttgattagcgtggtgatgggatagctctgactggattccccagaagttggcgtatatagtgctatgagcaccacagacacacacaaagccacggcacgtaacatggtttccacttgttttaacgtagattaaaccacgcacattacgtatactaagcgtagagaggaacttaaggctttccttctccaaatattttacttttcaccagttttcggctggttttagcccagtttttcttaatttgatttagaactgatgtggcgttcgttgatgaaccggcatgccgcagtgtgaccagactacattggaactacatcgggttgaagaacttatttaaatttatttattttacggacaattgtcaatatggaaatattttgctttaaattataaaagaaattattgaaatataaaaatagtacatacttacttcaaaatgcataaatgggtaactaaattcctttgttggtatttttcatacctgttgtgcgactactatcactctaatttgtttgtttacaaatttcagcgcgaatttcgcgaccaaaaacatagtgcaaatattgccaatgaaatacactttagagggcagcaatgcaagaggtaccacataataaacagcaaaatatattgataactaaaagaattcattttttaagtcatcgccaaagccgtacaatcgctgtccaaggtgggcaaggagatgttcatcgagatcgaccagcaatccttgcagatgcgggccataaatgccacccaatccgcagtgggcagcatatcgttcaaaagatccatgttcgaagtgtatgacatgccgccgcactcagatttctactgcaagatctccatgaagggatgtttggccgtgttccgcaacatgaatgaggtaagttcgaaagtctgctcactgggattagttgttaagaatattatgttccaggtggagtactgtgaactcaacttgctggacaaccagaccaacctgcaggtgaatctccgctgtaagctggagaccacaaaggaggccaccatttccatcatagacgaccaaaacattaacacaaacattaacaccgatcagatgccgaatatgtgagttttggtttgtgttaaggataactattaagtttatctccttaccttatttctcttaaaacaactatgcccatataaatccgaatttactactcaacatttcagaatccgtggcgatcacaagctgttgacggatatatccaataactttaactcctcagaggaggaacttactttggaggcaaactcgggcagtgtggtggccaaaaactacatagaaggagcccgagttaatgataagttcatgcgcacgcagctgaaacttaagcccagtgaatttgagcagtaccaggtaacgaaggagacggtcattacattctgcattaaggaattccgagcatttctcctcttcgccgagtgcttaaatgcttcgctgaccctggagttcgacgaagcgggcatgcctttcctgctcaaaattaagaagcatggcgagattgaatgcttgctgatcatgtccacgctatcccccgatgatataagcttctcggaagattattgtcaaaaggatctgacagtgcaggatgaggatgtacgagcggcggccgcaaagcgaaagagcagcgtttcgaagccgaatgtgaccaacaaacgcaaaggcagctcttcggaaccggctgcagtgcagccaaaacggcgagttgaggagacccaattagaatcgagcctagataatccactgtttcagttccgggactcggaggcgccatctgttcagcaccctcgcatcctagccgaggtggacactgtggttctgattgaagatgaggcggaacaagaggctctcatgctggcagccgcggatgccgctttggaggccagcatggcacctgctccagagccgccgaacagcacggaggtttgctttatcaacacagacgactctcaacaacctaaacctgcgaaaagctcctccgacgaggacgaaactataccccagtcacctgagcgccctaacaaggtgcgaaccatcttctcacgttgctttcagaggacctacgtgccgcgggagccctcacccaacactcaggtctatgcgcccaattccgatacagaggattagcctagatttgatcgtttatcagcaaatacactatacgtctaagtcaggttgccttctggatgcttatgtgcgggaggaagttgctggtaataacatcagccaccctgttttgcaggtcctgggcgttcttctgggcctgctgcagggatgtgtgagccgactgaagactatgttgcgacttgatgagcatttgatcagtggttacgagctgctttgatgcactcaacacaaagctgcgagtgaaagcggtaagggatctccaaatggcaatgttgttttcgactggaaaagggcattaagttgaaatgtttgaaggcacagaattggtgacatacttagtttccgctgaagcagattattccggtaaatggaagccgtgctgttgacctggttgctgcttcggccttgctcgtaaatgtcttcatcatcctcttcggaggcttcgcccgaaatttcagcagcaaaaatctgtcacaaaatggttttattattggactgttatttataaatgatatcctcaacaaccttattcttctcctgcagctcctcgtcggattcagaagcttcaccgctcaccaaatcagccatcattcagtttattaaatactattgtaaacaattttttatttactgcagttacggcgctgccagatcagttaaaactgcaaactgttgctcacatgggcgcagttgaaggggatattcttatgtttgtgatatctatgctaacagatccgtagaactacaatcataaaaattattaacggataatgaatggtattagtaacactttgcccattactcagaagacgatgtaatctcaataagcgcaaaacataaattttaaaagcatttattaaggactttgaagattaacaaactttttacataaaacggagttctgaacagagtaagaacactatttattggaaatatttttgcagagctcctgtctcgaacattcgtttgatgtcagtgccaccgccaatgaatttgccatcgataaagacgcggggaacctacacagtacacaggttacaaatgataattaatctttataatgtaaaatatttagtgcacccaccgttctggcaccggtaatctcgcccagaactgcctgaatttcgttgccatcgggatttccatcgagttctattatggtggcgtccacattgagctttttgaagggctggaacgcaaagatgtttatcactgtttgggacttttcaaggtctcgcaactttctcacctctttggccatcgtgcagtagggacagtaggtcttgctgaatatcaccactttgttgctggcaatggtgttttcaacgaatttcgcctgcttggtggacatgtcgactattggggatctcaaagcggatccaactgcacccataagctcgaaatccaggagggggtacggaaacttggggggcaatgcggggagcaatgaaagctgcgacaagtgtaagctgcggagaattatctctaatttaatcagttttttaatcattgattagcaatcagctgttgttgctctcgccagagctgccacgttgtgaaattaccatctcgtaatcataaacatgtttaatatttaatttaatttccatataatcatgctaagtttaaggaatctattattgtgtgtctattaagaaaagagaaaatcgactgttataaaaacaatgtttattcagcgctgtcaaaacatgcagtgacggtgccacatcaacaaatttcatatacactagggggattcctgaaaattcacttttactttgacttcattatttgaaacttatattaaatttgcctatattttgtccgagatagtaaagcaattttgaaatta

SEQ ID NO: 7619 - DNA, 1748 bp, DROSOPHILA
gaatttcgcgaccaaaaacatagtgcaaatattgccaatgaaatacactttagagggcagcaatgcaagagtcatcgccaaagccgtacaatcgctgtccaaggtgggcaaggagatgttcatcgagatcgaccagcaatccttgcagatgcgggccataaatgccacccaatccgcagtgggcagcatatcgttcaaaagatccatgttcgaagtgtatgacatgccgccgcactcagatttctactgcaagatctccatgaagggatgtttggccgtgttccgcaacatgaatgaggtggagtactgtgaactcaacttgctggacaaccagaccaacctgcaggtgaatctccgctgtaagctggagaccacaaaggaggccaccatttccatcatagacgaccaaaacattaacacaaacattaacaccgatcagatgccgaatataatccgtggcgatcacaagctgttgacggatatatccaataactttaactcctcagaggaggaacttactttggaggcaaactcgggcagtgtggtggccaaaaactacatagaaggagcccgagttaatgataagttcatgcgcacgcagctgaaacttaagcccagtgaatttgagcagtaccaggtaacgaaggagacggtcattacattctgcattaaggaattccgagcatttctcctcttcgccgagtgcttaaatgcttcgctgaccctggagttcgacgaagcgggcatgcctttcctgctcaaaattaagaagcatggcgagattgaatgcttgctgatcatgtccacgctatcccccgatgatataagcttctcggaagattattgtcaaaaggatctgacagtgcaggatgaggatgtacgagcggcggccgcaaagcgaaagagcagcgtttcgaagccgaatgtgaccaacaaacgcaaaggcagctcttcggaaccggctgcagtgcagccaaaacggcgagttgaggagacccaattagaatcgagcctagataatccactgtttcagttccgggactcggaggcgccatctgttcagcaccctcgcatcctagccgaggtggacactgtggttctgattgaagatgaggcggaacaagaggctctcatgctggcagccgcggatgccgctttggaggccagcatggcacctgctccagagccgccgaacagcacggaggtttgctttatcaacacagacgactctcaacaacctaaacctgcgaaaagctcctccgacgaggacgaaactataccccagtcacctgagcgccctaacaaggtcctgggcgttcttctgggcctgctgcagggatgtgtgagccgactgaagactatgttgcgacttgatgagcatttgatcagtggttacgagctgctttgatgcactcaacacaaagctgcgagtgaaagcgctcctcgtcggattcagaagcttcaccgctcaccaaatcagccatcattcagtttattaaatactattgtaaacaattttttatttactgcagttacggcgctgccagatcagttaaaactgcaaactgttgctcacatgggcgcagttgaaggggatattcttatgtttgtgatatctatgctaacagatccgtagaactacaatcataaaaattattaacggataatgaatggtattagtaacactttgcccattactcagaagacgatgtaatctcaataagcgcaaaacataaattttaaaagca

SEQ ID NO: 7620 - protein, 456 aa, DROSOPHILA
MKYTLEGSNARVIAKAVQSLSKVGKEMFIEIDQQSLQMRAINATQSAVGSISFKRSMFEVYDMPPHSDFYCKISMKGCLAVFRNMNEVEYCELNLLDNQTNLQVNLRCKLETTKEATISIIDDQNINTNINTDQMPNIIRGDHKLLTDISNNFNSSEEELTLEANSGSVVAKNYIEGARVNDKFMRTQLKLKPSEFEQYQVTKETVITFCIKEFRAFLLFAECLNASLTLEFDEAGMPFLLKIKKHGEIECLLIMSTLSPDDISFSEDYCQKDLTVQDEDVRAAAAKRKSSVSKPNVTNKRKGSSSEPAAVQPKRRVEETQLESSLDNPLFQFRDSEAPSVQHPRILAEVDTVVLIEDEAEQEALMLAAADAALEASMAPAPEPPNSTEVCFINTDDSQQPKPAKSSSDEDETIPQSPERPNKVLGVLLGLLQGCVSRLKTMLRLDEHLISGYELL

SEQ ID NO: 7621 - DNA, 4151 bp, DROSOPHILA
catacaattaaaagtctgttattataattatttaactagaaccttaagctagttttaaaatcaaagcaatcatgaaatgtttttgaacattggtcactacacaaaattcctaattggactccaacgactttcacttctgattgggaagggtattcggcgaaagatgttgcccagttccggctgggttttctcttccattttggcgtttcttatcacaaatgtggattgtgtctggctgcagcttaccgcaaggttggccttcttcttatcaatgtcttgatcctcaacaaaggcgatttgagcgtgtgccactttcccaataaacgcaataagcgcggcgatcagcaaaagttggggattgatcattgtccgtataatcacttgttcatgtgatactcacggcaattcaaacaagtatgaggctggccaatcttgacttaatcttaatcaatgggaaacgaagatcttcgataacgataacgatcttagttgggtccagttatgttattgttttacgttttctcggaaatattccaatattccaattggaagtttagtgcgaataaccagaaaagcagaacaaagtgaaattaaaacatagtccaataagggccagttccaattgatattgctctcccgattacatccgctcttgctagtgatgctcaatactcaatcaatgctcagctgtttctatcgatgagttgaaaaaaataactttctgatcatataaatttaagccaagagaaaagggaaaaacttaaaaaaaatatctgcacacttacgtttgcttttgaaatattggattaagaactccttgttaagtaatgcttagttatattgtcttcctatgagttgtggactaccaaattactaagtgtatcagaaattaaaattgaaaatcgaataatttgttatatagaacgataagcattacgagtctattttggcgcccaactaccgaacattttcaaaatgttgccattattggttagcactggttagccaatcgctaactatcgaaaagctcccatctcttattttcctttgtcaaaataaaaaccaaataaatatatataaaattcacctgcaaaacgaagcaacaaaagacactgtacggctcaaatggacgaagaggagaactcaggtgggtgtggcagcatcatagcactcgccaaatgttcccaataacatatgttcatcatatgaaactgcgcagaaatcaattctgtgcaagcacgggatgaagatgtgcaattggaggaccaacagtcacaggggctccaggatcggcaggtagacgtgatagaacaggcttggaacaatgcaatgccagacgagccgtcaccgccggcagaagatgccttccaagatccactggccaccgatggtgagggaggggatgcacttgaggccatggtagagaacgttttgcaggacgacacagcaagcgagggcagtcatcccagcagtgacatgtctctggaaagtccaggaagtgaaggttagttggcttacaatcgttgtgctgcacattcctacttaacccgcgttttccatcctttccagatgattccgatctggagagcctgccccattggatgattccgcagaaccgactgcgctccgccgtagacatgatggtctcgcaagcccgcaatcgggatggtggaatcgctgcactgctcagtggggacaacttcctacagcgagtgcgtagcatggtctttagccaggagcgacggcgcagtcgcacaagcgaggaaacgagccaggaggctgccgagcagcccgttgatccaccgccacagcagccacctcgaccaccaatcgacattggctttgacaccaatctgccagcggagcattcatacttcggtaatcatttgagtcgcgtgcccggagtggactacttggaggtgggcagcgtccatcacatgctcatcttcttgcaccagcacatcctctttcccggcgaggtgcttcccttcatgatcgacggccgaatgtttgacgaggatatgcccggtctggacggtctgatcttcggtgtaagcttcccgcgtttgcagccgccggaggacaacccacacaagttgtatggggtcacgtgtcagatctacgaaaggggcgaaagcggccgaggattggtgttctacaaatcacgagcactgcagcgcattgtcatcaactgcgatgatataaaagggtgagtcttgactatacggatcaccttaaattctccatgattaatcccatatcttttcaggtcaccgcagtacattgctcgcaatccaactagcaaatgcttcagcaaagtcaaaatattgcccgagtatttcctgcccgaaccgctccaaactgttgacatgggctcgatggccagatttcgggatataccctcgatgcgcgacaagtatcgcaggttccagctaagcactaccacctggccatctgatgcctgccaagagtattcgttttcttcaattgtggagcgagcacgccagaggctggagtcccaaaagatagacacaatgccaaaatgccccattcagttgtccttctggttggtgcgtaaccttcacctgaccgagaagatgatgcggcttaccttcctcaccgactcggttaacactcgcctccaattgatcaaaagcacgttcaaggacgagacactcttcttttgccgatattgcaatagcagcttggccctctgctcggatctctttgccatgtccaaacacggtgtgcagacacagtattgcaatccaggtaagcataaggagaagtccaatgtccgtcttctataagcaatgaattcactgaaactaactactttacagagggctacatccacgagacaaacaccgtgtaccgggtgatatcccatgccatcggctacagcggcgagccgtccacaaagtttagctggttccccggctatcagtggcacattattctgtgcaagttctgcgcccagcacgtcgggtgggagttcaaggccgtgcatcccaacctaacacccaaggtgtttttcggtttggccggctccagcgtgcggattggaaaagccagcgagtactcgcccttcaatggaaccacctatgtggtgcggaatatgatgcggatgatctcaagcgatatggaatgaggctggcgcgttgtgaagcgatttttcagatgtcaactctgctgctggcgtcgtcaggagaatgatgcggtccatcaggtgggacctgtttaattcgtttcacaactacttttagcaaaaacacacggcgtttgatggcgtggatgtaaacctaattgatatttacgattatttgaataataagttactcttaaatatttgcttttaatattatggttacaaatttcaatcatttaaaagtgccgcaaatgaggtggacagcttctgaaaaagataaagcagttgtacattggcaatagatgaaatgataggcaatattaccgccttgcagaagggacactggccgaaggagacctccagaaaggtcttgccatccatcagagtcttaaaccactcctccaaacagacggcatggcactttagcacacatttggcattgtcgcaggagacgaggggcacctcgccaccatccaggcgataggcaaagcaaatgttacagcgcagctcttcgttgtcctcttcatccagcttgggtccatccgaccagtctggcatgggaaagtagcacaagtcgaacattcggagtaggttcttgtgaatgttcatttcggagtcccagttacttagaccatcgctgagaacgtggcgcaggcgggccacctcttccgtgggcccaatgatctttagcgacatggatgcaatgcaggcaaagggatccgcgatggtcagcttcaagtagacgcgatccttgagagggaacagtcgtgttttgtgtttgctgctgatgggcgatggttgcagcacatgacaaagctcgtcgatatccatgaagttgtcgtagaagggacgcagatcctcgagaagcttgcgaaagaggtttagggcctcctctaggtttccagcactcttggtcagcatttcacccagcgatacgcagtcgggcaaactgtgatcaagcaagagaagagacgggatcttaagctccagataatgctgctcg

SEQ ID NO: 7622 - DNA, 1883 bp, DROSOPHILA
gttagccaatcgctaactatcgaaaagctcccatctcttattttcctttgtcaaaataaaaaccaaataaatatatataaaattcacctgcaaaacgaagcaacaaaagacactgtacggctcaaatggacgaagaggagaactcagaaatcaattctgtgcaagcacgggatgaagatgtgcaattggaggaccaacagtcacaggggctccaggatcggcaggtagacgtgatagaacaggcttggaacaatgcaatgccagacgagccgtcaccgccggcagaagatgccttccaagatccactggccaccgatggtgagggaggggatgcacttgaggccatggtagagaacgttttgcaggacgacacagcaagcgagggcagtcatcccagcagtgacatgtctctggaaagtccaggaagtgaagatgattccgatctggagagcctgccccattggatgattccgcagaaccgactgcgctccgccgtagacatgatggtctcgcaagcccgcaatcgggatggtggaatcgctgcactgctcagtggggacaacttcctacagcgagtgcgtagcatggtctttagccaggagcgacggcgcagtcgcacaagcgaggaaacgagccaggaggctgccgagcagcccgttgatccaccgccacagcagccacctcgaccaccaatcgacattggctttgacaccaatctgccagcggagcattcatacttcggtaatcatttgagtcgcgtgcccggagtggactacttggaggtgggcagcgtccatcacatgctcatcttcttgcaccagcacatcctctttcccggcgaggtgcttcccttcatgatcgacggccgaatgtttgacgaggatatgcccggtctggacggtctgatcttcggtgtaagcttcccgcgtttgcagccgccggaggacaacccacacaagttgtatggggtcacgtgtcagatctacgaaaggggcgaaagcggccgaggattggtgttctacaaatcacgagcactgcagcgcattgtcatcaactgcgatgatataaaagggtcaccgcagtacattgctcgcaatccaactagcaaatgcttcagcaaagtcaaaatattgcccgagtatttcctgcccgaaccgctccaaactgttgacatgggctcgatggccagatttcgggatataccctcgatgcgcgacaagtatcgcaggttccagctaagcactaccacctggccatctgatgcctgccaagagtattcgttttcttcaattgtggagcgagcacgccagaggctggagtcccaaaagatagacacaatgccaaaatgccccattcagttgtccttctggttggtgcgtaaccttcacctgaccgagaagatgatgcggcttaccttcctcaccgactcggttaacactcgcctccaattgatcaaaagcacgttcaaggacgagacactcttcttttgccgatattgcaatagcagcttggccctctgctcggatctctttgccatgtccaaacacggtgtgcagacacagtattgcaatccagagggctacatccacgagacaaacaccgtgtaccgggtgatatcccatgccatcggctacagcggcgagccgtccacaaagtttagctggttccccggctatcagtggcacattattctgtgcaagttctgcgcccagcacgtcgggtgggagttcaaggccgtgcatcccaacctaacacccaaggtgtttttcggtttggccggctccagcgtgcggattggaaaagccagcgagtactcgcccttcaatggaaccacctatgtggtgcggaatatgatgcggatgatctcaagcgatatggaatga

SEQ ID NO: 7623 - protein, 585 aa, DROSOPHILA
MDEEENSEINSVQARDEDVQLEDQQSQGLQDRQVDVIEQAWNNAMPDEPSPPAEDAFQDPLATDGEGGDALEAMVENVLQDDTASEGSHPSSDMSLESPGSEDDSDLESLPHWMIPQNRLRSAVDMMVSQARNRDGGIAALLSGDNFLQRVRSMVFSQERRRSRTSEETSQEAAEQPVDPPPQQPPRPPIDIGFDTNLPAEHSYFGNHLSRVPGVDYLEVGSVHHMLIFLHQHILFPGEVLPFMIDGRMFDEDMPGLDGLIFGVSFPRLQPPEDNPHKLYGVTCQIYERGESGRGLVFYKSRALQRIVINCDDIKGSPQYIARNPTSKCFSKVKILPEYFLPEPLQTVDMGSMARFRDIPSMRDKYRRFQLSTTTWPSDACQEYSFSSIVERARQRLESQKIDTMPKCPIQLSFWLVRNLHLTEKMMRLTFLTDSVNTRLQLIKSTFKDETLFFCRYCNSSLALCSDLFAMSKHGVQTQYCNPEGYIHETNTVYRVISHAIGYSGEPSTKFSWFPGYQWHIILCKFCAQHVGWEFKAVHPNLTPKVFFGLAGSSVRIGKASEYSPFNGTTYVVRNMMRMISSDME

SEQ ID NO: 7624 - DNA, 3037 bp, DROSOPHILA
tagtggcctgtcgaagtccagggaaccagaggaggagcaattggatgtgacgggcggggagccggaaagcgaattgcgcgacgagttggtatcataatcccggctgtctgataacgaatttccatgactattagcggtagtcttccactcgctgtggaagtagtgttgttgttgttgctggtgttgtttctcttggtcgttcatgtcgtattatttgttatttgcacacccacgcacactaagacaaacgcttgctatatcgcatatgatatgcagttgttattctctttctctgctgccaccgtgcaatatgtacatatatatagattgctaaagaaattagagatcgcgagatcgaaaagcacacatccgcgatcgaaaagcacaagcaacaacgataagaaccagtgtgaccatgggcggaacgacaaaatataacgcggttctggctgaaatataccataaactgggatataccgaaaatagtggaacgcaaaaggggacaccgcttagtggggactcaaaccgcgtgtagagttttaggcggagtctccaagcgtggtgtgaaattgaaactaaggtgttctaatttaaagaatgaataaatttgcgaaaccaatatactgccgaatagacttatttttaaagattttatatattttcttataaaaaagagtttgtttcataacaagtattctagcccatatttaggtaccattgcactgtacaatagtctcatttaaaatgtttagtacaataatgcggtttttgttaaataatgtgttctaaggttcaagtcctctcttatttctatttaattcatctaccttcgagatttgcataattatggtatatttgcggtatattttagtatgtttttcacacaaccaccctggtcacacggcatccttctttttctttcgtttccggcgaggtatgtgcacaaattttgtttctccacgtttttcttaaaaataattgcttatttctcattttagcggtgattaaaatatccatcgagcaacataatggtacgtaccaacgaaaaactggctgaactcgaatcaaaaagcggtcaaacaagcataaaacggcaacgacagccgcttatcccacgtgcatagtgccaattttgttaccccaaaagcaattatttgtatccggcgtcttgaaaccgtccttaatatcaataccaaatagcaattcaaacggaaactttaaaagaaacctaaactaaaaccgagtgaaggcctcttacattaaaagtccccgaaaaatgccgcaactatctcagaaaatcagctgcaaataactatttagttgtgacagaaaactatcgcaaagatacaacaaaatggattgaactatcgtgatactaaacattttatcaactaccacagggtcgcgtacgaaccaagacggtgaagaaggccgctaaggtcatcatcgagaagtactacactcgcctgacgttggacttccacaccaacaagcgcatctgcgaggaggtggccatcattcccaccaagcccctgcgcaacaagattgccgggtaagtgccgctcaaatctcgttagtgagtggatctataatccccaaattcctttccagctatgtcacccatttgatgggccgcctgcgtcactcccaggtgcgtggtatctccatcaagttgcaggaggaggagcgtgagcgtcgtgacaactacgtcccggccgtctccgctctggagcaggacatcatcgaggtcgacgccgacaccaaggagatgttgaagcttctggacttccacaacatccgtggcctgcagctcacccagcccaacaccaacaactttggtcgtcgcaactaagatttgtatagcgcgtagatgatgatgttctgatttgcatgggatcacaataaatttgtgtgaagtgcatttaaagtgtatgtttttgtgtttcaattaattatgcgtattcgattgaaaaatatccaaagtgaacatcgtttccaaagtggctcaccaggcaggaaactcgatctaaattcaagaaccccaagtctgtgttccgtttatcatctttattcgcattcgaatggaaaatactgtagacatgcacatatttgtaaatatgtttatattcaatccataaatatatgggttcgtttttacacagacgatatataaaagatattctacgagtgcacaatatttaaatctaatcgtgtacgctgatgccagtatatataattatttgttatgtatatgatgggtggtagctatacgtatgattgttccctccggttcaggaagatgctgatgtaatgggcgacgcagcctgatcctgctggggtcttcgcaccggattacgcaagaccagctcggaatcctccgaaatgatgggcagcgcgtgtgcccagtggtagttgatcagatggctaatgctgtcgaagatgcgatctttggttcggaccacgccctcgggatcgatgagaagcagatgcttgggcgtcttgccctctaatccggttagtacgtactggccccgctttccctgtgactcgcgcaccagaaagtcgccgtcctgctgcagcaaacgctccgatattggtctggatatgcccgcatggaaccacacctccgctgtgagcgggcattgcggtccgtcgaacacatcgcgaacagagggcaaaacagaattggcagctgtggtcgcttggaggggatcaaagtggcctaacttattggtcgtctgatcgggaggcggggagttgaggtcgatgaggttgctgctcaggcgatcgcgaggcttcttcagattcagttgtgccacacgaggcgcatgcggatggagaggttgctgcacctgctgttgttgtggttccggcacttctggtggcagcttgtttggcaaatcgttgtagtactccttcacattctccttgcagctttgattgatgttacaatccgccgagggatcattgagcctactgagagcgttgaagcgcaaggcaaacgccttgccaatggtcactattagatcctcgcttt

SEQ ID NO: 7625 - DNA, 609 bp, DROSOPHILA
gtgattaaaatatccatcgagcaacataatgggtcgcgtacgaaccaagacggtgaagaaggccgctaaggtcatcatcgagaagtactacactcgcctgacgttggacttccacaccaacaagcgcatctgcgaggaggtggccatcattcccaccaagcccctgcgcaacaagattgccggctatgtcacccatttgatgggccgcctgcgtcactcccaggtgcgtggtatctccatcaagttgcaggaggaggagcgtgagcgtcgtgacaactacgtcccggccgtctccgctctggagcaggacatcatcgaggtcgacgccgacaccaaggagatgttgaagcttctggacttccacaacatccgtggcctgcagctcacccagcccaacaccaacaactttggtcgtcgcaactaagatttgtatagcgcgtagatgatgatgttctgatttgcatgggatcacaataaatttgtgtgaagtgcatttaaagtgtatgtttttgtgtttcaattaattatgcgtattcgattgaaaaatatccaaagtgaacatcgtttccaaagtggctcaccaggcaggaaactcgatctaaattcaag

SEQ ID NO: 7626 - protein, 131 aa, DROSOPHILA
MGRVRTKTVKKAAKVIIEKYYTRLTLDFHTNKRICEEVAIIPTKPLRNKIAGYVTHLMGRLRHSQVRGISIKLQEEERERRDNYVPAVSALEQDIIEVDADTKEMLKLLDFHNIRGLQLTQPNTNNFGRRN

SEQ ID NO: 7627 - DNA, 6714 bp, DROSOPHILA
ggaacaaaagagagatgaaagataactgtttcataattcgatctcttttatatacatacatgtctacctatgtatgcatagtatgaaaagagagcaaaatttgcatttgctcctataaagccacgtgccacccatcgttttataactgattatactaactagactttaataaatgtcatgctaatcaaatacatatctaattgcgaacaactggcgaataaaatggtaaaaatagttttattggacttttgattgcaggacttaagcaattatacatacatacatacattcatacatagttcaaatcattacaacggactttaaacgccttgaatttacttttggttggtggtggtgttaggttttcccgaaataaattacatacataatttcgtacctgggtttttcggcccttccagctattttcttacttgatactttatacttgcttacaacgtaactgatttacatgttgagatatgctaattaatttatggatataaatgtatatgctactaagatatatgtaggtatgtatatgtagtatgacttttatcgagttgcggtgacagcacagaaagcagagtaatcgtatattcgttacgtggtagacataaaactaaagataataatgcacttaaatctatgtacgaagcttgttttaagttaacatttaatgtctttttcaatcgggacgaatgctgagctttctaaacagaaatacaacatcgcacaaggaagaaccaaacgcaatctggtgggatggtgttagaacatagggctttggggacacggcccacaagacaaaggacctgaagtagatgacagacagtatcgggaaatatggcatgcaaaatgcgacagcatattacatttaaaagttacaaaaataaaacaatatagtactttatatacatgcaagaacctaatcgtatgcggccgtggtttacggaacaaggatggggagctgttaaagtcccgcgcttgagggaaggaaggcctacgccgtctcattgaggtgcacgcagtgggcgtcctgcatgagctgcgtgagtttctgcgtaaacgttggaatgtcctgaacaataaaaggtagtacctattaaacgcaaagtcagtcatggaagagtcaccaccacttgcaattttgtgtttatattgattgaaacaattgaaacaagtcgacatggacagtaagattgtaacagaatgcttaaatcataaatggaagacagtttctttttttgccttgcaagtggtgtcgatccctttatattcagtatttgactcacatttgtctggcagatctcctccagcgacgtctgagccactggcaaagaggcgtgaacgaagctctcgagcaactggcgtcggtccacctggcccatagcatacaacgcctgggcaatcatgtcgaagtggagggagccctctccactcaacagcagattgagcaaggcccgctgaaatgaagccagcagttgctccttgaacaaggcgcgttggtacaaccgactcctctcattcacattttgcattgagaagagaacgctgcgcacattgctcggatcagtcccactgaccagcatctggccatacgcattcaggatggccatgaagtgtgctggatgcaggttgtcgctgcagttgaagttgccggagccaccaccgctgtgaccattggagagctgatttttgtagaagaactgccacttgcaggtgaggacactaaaatggagaaagggcgttaattcatgacgacacaagacacaagtacaatttattttaatttatgcagcatcacgcacctatcaaacaaagcgtacaacaggctagtgatctcgctgttatcggttgccgcattttgctgctgcaacaagggcagaatctgctgagtgctaaaatctaaaatggagggaagcagccccaaggaggcgctccctggctgctccacgatcaacttgaacatctgcagtattttttccatcacagccagtcggctcagagtcagttgctccctggagacagaaagagatggcatcattagtaagcactcacactgtaaagaaagagatgggagacccacctactgctgacacttatgaacaaggtgatcatttccttaatgaactgggcccccaaatgggtgggcaatgttcggagcatgctcaggctaaactcggccaccgtgatggccatggcgatgctgctttgcccaaagttgttaaaaatcattagggcctttgttaaaataggctggaaaacaaaaaacgttaatagattaggataggatgtttaaatttacttaaaaaaataaggcaccttgaaagtgcttgccagcatatccttggcattgcctccagtagctttaaaatactcaatgagagcagtgaaagtacccagcaaactgagcgtggtggccgccaccttgctctcgttggcctggcctaagtccagatccagaaagttctgtgccagcccctggacatattcacgcagcatccagagacgcctcggatactcctgctgctgctccggaacgcttttccacggcagcaccatgtagctgaccagactgatgtgtacattgatgcacacctgacgcggcaattgggcgcccaagcgagagcctgcctgcagcaggctttggatttgtggtatatccagcaggcacttgggccgtatcacagtcgatatgaaaagcagcagctcgcttgccgcctgctgcacaatgggggaggcagccgttaaggatccattgcatgcgaaaatgctgcccaggatagcaaacaggcggtgcagcagttcctcgccgctcatggctttcgttagcggaaagatgctcctcatggccagtagaacttgagcgtatctgaaggatcaagaaagcatagtatcacatacatcatgcaaagggatgccccacttacaggttgtccaaatcagtctggaaagtagctttgtccatttcgctgccgccgctatacaaacgattgcttgcgaggagctgtagagtctgcagcaaactgtcggacagcatctgcagctggcactccatctcatcagcaaccccgggtgctgctgttgatgagtccatcaatggggccaaacgcacgaccgcctggcagacggtggcaaagtcgcgcaaaatctcgcccacattggcgcccttcagtttacgtgccgcttcgtagcttcgagcgcttccgtggtccaatgcgtgctccaaggacagtaaatacatctgtggccgtgaccagtggttatagacctgtgcgaaaacgatgtgtgcacctctggtgttggccagtagggccagggactcgaagcattggtctagaaactgctgccactcagtggcggaggtctgaaattggatgaatgtctagataaaatgaagatcgttctaatgcaaggtctatttcttggtttttgaaatttgtcacctaaaaacactttaaatcagagctacttacatcgtcctccatgagctcgttgtccagcacttctagctcgggtttgttggcctcaaactgagtgcgcctcataatctcatctactagctgggtaagcacattgttataacgcgtgattttggcggggtgctgggcaatgcctttgatgatgggtgtccagatctcaagcttttcggtgaagtccaaggcgccgtgtactgtttggggaatacaaaattaataacttttgttatatatctttgtcaacgacatttcgaaatctcgatcacgagatgcacataacccatttaatattgcgagtgttttatgactacacagcaaaaagatcatctcaaaataaaaaataagttagcatctcaaaaggcaatatttttatcacgcgactcacattcagtggtgcagctgtatagcagattgagaaaggtctccagcaggtctggctcctgcatcagcttggcggcatacttggtggtgtagaggcgcagcagctcccgaaacttgtcgctgtacatctcgctctgccgccgattgttattgtgctgctccaggaggctggtaacgccgcccatcaagggtcctgggaagggcagtggcttctggaggtagaggagctcattcaacacagagagagccgccaaggagatgggctcatgggctggtcgccactgggaaaggtcaagtatgctcataaggaagtactccgagatcagttcagtgcgtatccaggagaccaagtgctgcacacatcctagcaggtccaaaattgaggaactgcggagtatatagagagatgttataacaaaatgttgtaatgaacatatgctcttttgaatgttatgatgacccaccttaattgattgtcatttggcagcgctgaggttagactaaagtccatgagggtgtttggtatggttgtttggatgtctttgccattgatgtggcatacagcgattagcagatacttggttaccaggtccagaacatcgggtacacacatggagatgctacagaaacacacggcaaaagggagcacaaaatgggttaggaacagtgctgtggcaactgaccagtaattatagtgctttctctcaacaaagcaatataatatgataactgggttaacggttcaattagttgagttttaagaggtcagctgactttagttgttatgccatatacatactcaatctcaatataacacttattaataaaccaaaaacaagaacggactgacaaggtctgggattgtgttattctatgttgtgcgacgcaatcgtgtatttaaacaaataacaccaaagttaataataaaaatacgctatgctcgaaaacatcgaccatctgatacgccgtactcagttaaaaatccaagtagtcttaaacagacattaaaagtatgggactacaaaaccttttttaaaaaacatacgattttagcctcttcgctctatttacccaccaggagtagaagtactgcttccattcggtggtcaggtcgcccctgttgcttaccacctcctcggaggtgatcttaagcaggttgatgccaagttgaaaccgtgtttttgtcagttccatgcagtgttgcatgtaattggggtcctgttcagggaactccctctttccgagtagggctatcaactgggccagtgtgtccctgtgccgtttggccacatttggagtggctaccagttgggcatacgagttccaaagggtctcccgcagcaaagtcttgtccgtggacgtcaactgtgtccatctccgcgtgattgtgtgctccaaggttgaggtgctgaagaaccagaggaactgattctccgtggtgtcggaagaggtggccacacggaggcaaagttgccacgcctctggctgggacttgaaggccaagaggtttgtctcgatctctcgtttccgggcattggaggtgctgggctgataaaactcctgcagcagtccctccaccgtcgtcaaagatgcggcgtgctgcacagacagtgggtgggtggaaaccaattcccggttaggtggaatcactctgaatcactggcaaaatagtgcgtttggcccggagccccccgcctcaccattttccgtgtcctttacgatccttccgagtatctgtgatctggatgttacggtcactgtgagctccgcttgctcgcggttctaattccgatcgcatcagcagtcggcgtccattaattgcatggttttctttgtgtctttacacaaaaggtggccaaaatctactccgggaaagtgaacaaattccgcacggctggcaaccctggccgatagtcaataaatatcgatagttgttggttatgggtattttgaaataaaaaaattctacctttcttattttaattacctaaaacaaaattttttttaaataaaattggctatataaatgtttcagctaaaactacgagcgagcagacaagcatccaattcaaatccatagttatacaaatatatatatatatatatatatatatatattatacaaatgtaataaattttatattttcagtcattttaatctgataaattaaaaatgctggactattccaaacagctcataaccagaaacattttgaattttccgcctaaccgcaaattcgatcgatagacgataaaaaaattgatcgcagtcggcgcttttgtatgtattttttaatatggtagcactattctaataaggcaatattgttagcaaaacgggacactgattaactgttagcctgcaagttaggaaacctgaaagtaaaggattttcaattgatatttcaagacgttcctatccgatctgcccaacaatctgccagtatctcatcatggaaaaccaggtccgtaaaaaggcggcaaaacgatcgcgatcagcggatggcgacgccaacaacaatctcacgcagcggaaggtatttgtgaaccagaaaatgtgcgactcccgtgatcctcggaagatgaaggaggtccatggtatgtaaattgccttattcgcaccaacttatcttgtttcgatcctgtaatggaggggtgggagattggagagatagcgccgctcagagcgcagttatcccggacttgttgctcacttcagtttgaacagttagacgcgagaacaaaaaattgagcaaagcagcgacctctaatttacgatgaatttacgcataaatttttttttttaatttttttcttgctgttcttttgcacgtcccatcgaagctgagtgtct

SEQ ID NO: 7628 - DNA, 2756 bp, DROSOPHILA
caccttttgtgtaaagacacaaagaaaaccatgcaattaatggacgccgactgctgatgcgatcggaattagaaccgcgagcaagcggagctcacagtgaccgtaacatccagatcacagatactcggaaggatcgtaaaggacacggaaaatgcacgccgcatctttgacgacggtggagggactgctgcaggagttttatcagcccagcacctccaatgcccggaaacgagagatcgagacaaacctcttggccttcaagtcccagccagaggcgtggcaactttgcctccgtgtggccacctcttccgacaccacggagaatcagttcctctggttcttcagcacctcaaccttggagcacacaatcacgcggagatggacacagttgacgtccacggacaagactttgctgcgggagaccctttggaactcgtatgcccaactggtagccactccaaatgtggccaaacggcacagggacacactggcccagttgatagccctactcggaaagagggagttccctgaacaggaccccaattacatgcaacactgcatggaactgacaaaaacacggtttcaacttggcatcaacctgcttaagatcacctccgaggaggtggtaagcaacaggggcgacctgaccaccgaatggaagcagtacttctactcctgtacacggcgccttggacttcaccgaaaagcttgagatctggacacccatcatcaaaggcattgcccagcaccccgccaaaatcacgcgttataacaatgtgcttacccagctagtagatgagattatgaggcgcactcagtttgaggccaacaaacccgagctagaagtgctggacaacgagctcatggaggacgatacctccgccactgagtggcagcagtttctagaccaatgcttcgagtccctggccctactggccaacaccagaggtgcacacatcgttttcgcacaggtctataaccactggtcacggccacagatgtatttactgtccttggagcacgcattggaccacggaagcgctcgaagctacgaagcggcacgtaaactgaagggcgccaatgtgggcgagattttgcgcgactttgccaccgtctgccaggcggtcgtgcgtttggccccattgatggactcatcaacagcagcacccggggttgctgatgagatggagtgccagctgcagatgctgtccgacagtttgctgcagactctacagctcctcgcaagcaatcgtttgtatagcggcggcagcgaaatggacaaagctactttccagactgatttggacaacctatacgctcaagttctactggccatgaggagcatctttccgctaacgaaagccatgagcggcgaggaactgctgcaccgcctgtttgctatcctgggcagcattttcgcatgcaatggatccttaacggctgcctcccccattgtgcagcaggcggcaagcgagctgctgcttttcatatcgactgtgatacggcccaagtgcctgctggatataccacaaatccaaagcctgctgcaggcaggctctcgcttgggcgcccaattgccgcgtcaggtgtgcatcaatgtacacatcagtctggtcagctacatggtgctgccgtggaaaagcgttccggagcagcagcaggagtatccgaggcgtctctggatgctgcgtgaatatgtccaggggctggcacagaactttctggatctggacttaggccaggccaacgagagcaaggtggcggccaccacgctcagtttgctgggtactttcactgctctcattgagtattttaaagctactggaggcaatgccaaggatatgctggcaagcactttcaagcctattttaacaaaggccctaatgatttttaacaactttgggcaaagcagcatcgccatggccatcacggtggccgagtttagcctgagcatgctccgaacattgcccacccatttgggggcccagttcattaaggaaatgatcaccttgttcataagtgtcagcagtagggagcaactgactctgagccgactggctgtgatggaaaaaatactgcagatgttcaagttgatcgtggagcagccagggagcgcctccttggggctgcttccctccattttagattttagcactcagcagattctgcccttgttgcagcagcaaaatgcggcaaccgataacagcgagatcactagcctgttgtacgctttgtttgatagtgtcctcacctgcaagtggcagttcttctacaaaaatcagctctccaatggtcacagcggtggtggctccggcaacttcaactgcagcgacaacctgcatccagcacacttcatggccatcctgaatgcgtatggccagatgctggtcagtgggactgatccgagcaatgtgcgcagcgttctcttctcaatgcaaaatgtgaatgagaggagtcggttgtaccaacgcgccttgttcaaggagcaactgctggcttcatttcagcgggccttgctcaatctgctgttgagtggagagggctccctccacttcgacatgattgcccaggcgttgtatgctatgggccaggtggaccgacgccagttgctcgagagcttcgttcacgcctctttgccagtggctcagacgtcgctggaggagatctgccagacaaatgacattccaacgtttacgcagaaactcacgcagctcatgcaggacgcccactgcgtgcacctcaatgagacggcgtag

SEQ ID NO: 7629 - protein, 186 aa, DROSOPHILA
MHAASLTTVEGLLQEFYQPSTSNARKREIETNLLAFKSQPEAWQLCLRVATSSDTTENQFLWFFSTSTLEHTITRRWTQLTSTDKTLLRETLWNSYAQLVATPNVAKRHRDTLAQLIALLGKREFPEQDPNYMQHCMELTKTRFQLGINLLKITSEEVVSNRGDLTTEWKQYFYSCTRRLGLHRKA

SEQ ID NO: 7630 - DNA, 19468 bp, DROSOPHILA
cgagtggggggaagtacacgtataagatacacacataaagttgcatcaagtccaaatgaaccacattatatcatgtctcacatctcacacgacaaaactagacggggaagaacaaggattccagcccatttgatcatcgttaatggatcgttcagatagagtagtatcctctatctatctatgaatcacatctaatgcaaatcttaggtacctttgttattaaacgatatgcaagatatacctaaaatcgagaacctataaaaaaagacaaaatacacactcaagcgaaaccgcataaatgtttacgacttcatatacaacaaatataaatgtatatcaaatatggtcgcgctttataaaccaaacgtatttaaaatgtattactaaatcgcaaatctttcaatggaatgtgacttttttgggtctctgccgagtaaaacaaatattaaaaaccaagcgaaggctatataaatcatataatatgatacaaaattaagaagggatccccttcccccaattgtacgcgtatttgtaaattatttgaaatgcaaaataaatgacagcctaggatggaaattatatttatttgataaattagtaaaaggagaacacaaaaaacatagttctatgtacaatggacaaaccgaaaacttttaaattgcttgaataaaaagaagaaaactatttgctgacactttgcacttggattggaattgattaacgaggtgattttcccatcattttccatcattctgagcattctgtgctgcgaaaaatgatagtgaactactaactttgccccgacgaatcgaattttaacggaattctggacagtgtggcacaacgtttcgaaaatagcgggcaaagtgaaaaatcaatcttccattggccgcatgtccgtggtggaagtccgtgctgagtgctcgcccaagatctgcacccatttcgtctggcactttgtagtttttttcttaaatcgactggccacaccgcacagcccagtaaaaaaatagttttttttttgtatccaaccaaccaactgtaaaaataagtttaaacaaagcatctactcataagtttcatttttttccgttaagtgtcaacattatttattttttaagtgtgcattcaataagaaaatgtcatcgcgaaggtaaatccaataagaaatacgacaatgttccgcacacacacgcacgcagtctcgcacacactcacacacacacacggacacacactcgcaatcacacacgcacgcacgctccgctcccaactgggctatttacatatgtataagtagatacaaaagcaaggcagagcgaaaaagaaacagaaacaaaaaacaaaactgctgagataaaaagtgcaccaaagtgttggtcgcgggggggcgccagggtggatgcagcggatccgttgcctctgcactgcttcatcctcagcctcagcctgttgcccaccgcggaagcagtgcggtaaccagtgacaattgaccgaaaacgatgcacacaccccactgtgccccactgttcgccactgtgctccactgtgcgccactgcacctgccactgatgaccacttggtatgcagggcaggaggcaccggaggctgaccacaaacgacattcgcacaatggccagtggcagctgacaacacccatatgtttgcccaccgggtaaccagctcggcgagcagcgacagtggtataaactctgacataaaccgtattccgtccactccgcagatggttccacccaacgatatctggcatcgaagctgagaaactgctgcaggagcagggattcgacggctccttcctcgcccgcctctcctcctcgaatccgggcgccttcacgctctccgtgcgccgcggcaacgaggtgacccacatcaaaatccaaaacaatggcgacttctttgatctctacggtggtaagtggctgccgttccctgccccccactcggtcacccaattcaccacagtgaatcgtcctccctttgcaggtgaaaagttcgccacactgccggaactggtacaatactacatggagaatggcgagctaaaggagaagaacggccaggccatcgaactcaagcagccgctgatctgcgccgagcccaccacggaaaggtgagtcccgatcctggtggccagtcggaatatgggatatgggaactggccttcttgagcgcttgatagatgttgtggttcttatgtaccttgatgtgtcgcgggattcggtcttatatccaagtcgattataacagaaggagaagatcctctagtcttacggctggttgcaaccttctcaggccatacaattggaatgccctccaaatgggcggactatttttttttttcacacattccaaaatggactgacgtcaacggatgcaagagattcacctaaaattgggtcaccagccaaacggccaacctgttctcatcgaattcaatgacctacattagctccattccgcattgcccaaggacgaatcgtatttgtttgctttcgggtcggattattattcatgcaccatgtttacaaacgatgttgtttgagcactcaagagtccaaacatcagtttcgagcactttgcttatcaggctttctcaaacgctatcgggtactgggtccggtactgaaactgggaactgaaatcgaaagtggtccagggccatactccgcatcccttactctccatttgcgctgctatcccaagacttttgttgctatttctacggccaacagctgtttagctgtttattaatttttgtgctaaaagtgcagttctttaacccaaaaatttatcatatgcatatatcacattggtgagatatcaattacgatctagctcagctatctcttctcgaacaactaaagtcttacttccaaactagtactccgaactaaatatgatcggtaataaatgattatttaaggaagagaataaacgtaagattgatataattagaattgtactgagaatgaaccatgtactaaatgagaatcaagcacctagctcaaccgtccagtaataaacatgatgttgttaataaccagtcgaaactgcgttagatcgatgtgtcgctgataatctggcggcggttcttgaagctttgctcttcgcagctggtctttcttcttggatacgcaactcggtttcgagcagagatgagatttgtgggtgaataatttctaattccacttaaatcgggcacccacacacacctgttgctcacgcagcacccacacgcacatccacaggcgcaggcacacgcacacgcacacgcaagcagtgaccaccatacaagcagtgcattgtctttgtcgccgttgttttactggcgttcgttttcaacccacacgcgcgaaatactgtcgatatttattgtatttcttgcttattaatatttttaagcccgaccgtctacccaagccgtcaaatattttacggctccctttttctttcttacattctttcttgtttgtcgccttgtctcctttctcaatgccgagcttgcttctgctttttgtttcgttgttttgcctcgtgcgctgcattttccgcatcccaacaggtcagtcaccttgactggccacgccccctctaaaatttgaaggcgccacgggagagcaatagaacccatcttgaatcgaaacagtagaagttcgcaattgtatctcaggaaattcgagcaatcaaatttgtttttaaaactatatgtataaaaagcaaggaagaacctaaaattatgctacgcattgaactttaaagatttcaagatcgcctttgttcgtcagatacgtttgccctaagccttctttgcccccagacctggtttcccagcccctccaccactccatacactccatccactcactcatccttggctggagctcgtgacgattttaatttgtgtattttcgattgtggtttatttttaaagcccctcgatccgagcggtggttatttttaccctaagaaggtgttgtatggcttataatcgatttgcgattcgcaaagcacaaatcgtttgattggcgatgacgtcaaacgagggatgcgatcgaaggcaatcataattacatatatgtatatttaggggttgatcatgaggatatttacatacattaagctcgagaacgtcaatcgtccaaaaagtgggtttattatggggtgtggaaagttacgcggtcagctttttataaatcaattcgtctgccttctgttgcgagcccaataagccaagctaatatgcatagaatggggaatattagttccatctatgcttggctactttacaaaatcgggaatttctattgagctggcgatgtgcgccacatgaagaaagaccctggcgaagggagagatgtgaaagatgccattggaaatgcatttgccttctgaatggcccagacattctccaacatttaccaaccaattcgaccgcttccagcaatattcccgcgacatttcaccatccgattgcatttccatttccattcccatttccaatcccaattacatttctcgacgttgatcttgacctttgatcgagtcagaactgcgattggagtgcaaccgaattgcaaatcactcgatgttatgcggttaggttgtttttgtacactgtttgtctacctgcccacttaatcgttgcaattaattgcaagataattgtaaattgctttagtttcgcgcactttcttccatacctcagtcgatctgtcaaggagtaaaacaaatctgacaatcgtcaattaagccatcgaattgtttgtgctgggcaatacttaatggatactgggtactagtgggtaatggcgtcccacctaccccacctatcccactacccagatcccacttgagccccagatccaaccccttcgggttcgcccttgcccatccgttgctctcgagtgcctcaaatgctaaatgctttcaattttcgccattaagacaagcctacaaatggtttataaattatgccgtgcacgtagctgtagctgtagctgtatctgtatgtgtatctctaccctcaacctccaatgtatccggatctgtcgctgtatctgtatctgtatctaaggcatcagcaataacaccagcggcaataaatgtctataaagagtacacttaaagaaaagtaccgtaacataaactgtttcatttgctctaagttatataggagaaaaccctatgaagtttttactcaaacgttagaaaatcagagattagaactaggcgattgaagagcctttaaaatggaagagtggctattaacggtgtactctccatctctctctctctgtgtgcacatatgtacgctttaaattggattgtgcaaaacacgcacatgtactcatccatatgcacgtatttggctgcaggtacttggccgcctgttcgcccccacttgccgccactctaacaccaatgctcggtgccctcgatcgtgccatccgtcacatactccacaagctgtagatgcgtcgaccgcgtggaattgcacccactgcatcgccatggcctgcatgtggaacggatagtccatagtccccggtcacgcagcatcatcgctagatactctgatcatgattaggtaaattaatggatctagcgcacaactgtaccacatcagaagttccaagtcaactagacctagacctagcttgtataatatctgtctaattctcgttgctgattgtactctaattgtcgacatcaaaatcaaatattaatcgatcaactgcatcgaaacagacggctgaactgtgcttccgattcgatgatcactattatcaatcaaacactgcagtcagtgcaatgcaatttatgggtaaacttcattatcgattttggaaaataaatcgaaatagattgcatagactggattgtgagcactggtcatttgcatggccagcgcatcacacctgacccaatgatgttatgcaaatcgcaactacattttatcattatcactagcaacggctagtttttgatgtgctttccctttgtaaatcccacgaagtgaattaaatttaaaacgcacgtatgtatggtatgtatgtatatgtacgccaatcgagatgatcgctcattatatttggtatcctaaactgcccagcacacgacaatttaaagctaccggcacgaaccgcaaatgcgtccgtctcgcaattaaatattcaggtaaatccctcgccaaaacatcgccaaaacaatgagccacaaagaaaacgaggaaagattcgagtcaataaatggggatgagggattgattcgacggaccgaaaatcaaagttgtggggggccaggccaacgaaccaacgaaatattccaacccaatccaaaaggaatacttttacgccgccactaagcagccgtgagtcccctgctatttgcggagctggaggtttgatttgcttacaaaaaagtgttacatggaagcactcacgtagcattccatctaatagtatgaattacgacactgatcgtaaatctcggtatatatttttggctggtggagcatggcaaaaatcgagcagtatcataaatctcggccgctatggggaagcccacctggctacaactaaaactgggctcgtctctctaggcttggagattgggaaacgcaacatgtttgtgcaggatgcaataatcctataaaactttttacacattatttcggtgcttgagttggtgccacgaatcctgcattgtcagcaaacagtatgatttcttgttaacaagctgagttttagctaaaaaaaaaaaaaaaaaaatgcagcccacgcccaccggcggtgaatttatgatttgtaaattatttacaaataatataagtagttctcctaattgcctcttcccgtctatttttgatttacccctttctgggtggggtcgcaaagtactcattttaaaatttaccatataaccaagctcacaaatgcccggtataatggcccataaactatactctctggcatttgccgcaaaacagttctgttggtttttggctgatttagtgcgaacacgtctgtacagtggtccccgcagcgacccacaatcgatttgcgattgccaattggctattggctatcggctattggcttttggcgactgaataacccatttcgaggagctgtcgccgcgcattcggtccggcacgcttcacttacggattgggctttggcttcggctccgctggctgccatccctgggtcccgagaccaaatctcaatctcaatcccaattcggagtggcgaacaatcagtggtcggcacatatgtagctgtgtgcctagcatactaaccatcccccgcctccgactgaacaataaattatgtttatttctggcccactccccatcgcacctacgaatggttttggctgtgcccaaatgcggtctgggtctccagcaacgaaatcgggatagccaaggtcgcggagctcaggaatggagcactggggatactgggactgggctgtcgctctggcaactggtaccgatcaagtttatttctgggtagggcggcactcacggcactcactacttcgccggaacttttagtaattccatacgtaatgtaaacacgttgggtaggctattggtcaatgccacttctaaattgcgttacccgatcatttctaagaacttaaacttgcgaatggccaatgttggcctcgctcttaattctgtatcgatagcaatcaggtagctcaaatcatctctactcacttttaatgcacttctcgtcttgcatttgccattgcaatgactaatattcttaaccgacacctaactgcgcccagaagccccatgtggtttccacggatctggtccacctggcctggaacatcctgtttgcattgatgcatgcatgcatagctacatggggtttccccgactggtttgagctgagcattttcaattttgatcgaacacttcggagacaatttccattgagtggattttgaatgtggtttgggtaacaagttctagttggtttccagcgaaaaaacaatgacgaaatgttggaaaaaaaaaaaatagttcgtcatcgttgggaggcatgaatacgaggctggaagtaaagtgttgctagatcgcagttcgcaggctgtcgcacgtcgaacgattttgttttgctggccaaaaaaaaaaaaaagatattctgcgcacgttcgcacctctgacgtctgcgcctgcgctgtaagagagctttggcactgctcgcttctagctcccacttacccaactaccaacctgcccacctgcccaccaacccacctgccccccagcaaacccagttccttgcctagatggccgccacagtagttgctgtgcggcttcagtttcatttccggtggcaggcaacggacggcgctaaaagcgctttttgtatttgctttcttacaagccaacaacacactcatatcacgaaatgaccattttcggattggaattaatcttatgtgcctgcttttcgaaatgtgtatgattcggattctgattgcgatgaactccatgactcatccaggagtacagtcattacgaaataaacatagagtggagcccgctatacatatttataggtattagcctggctctagcacttaattgaaagtaaatgaaaagtaaaagtgtaattttttacaatgttgattgcaattcaaagtgctttcgctttctgaataaaccgtaagtggcgtccacaggatggctacaattaagtggcgcccgctgaggggcccaagcagtttgatgatactgaaacaggagcccaggggaaagctgtgcacacacccactgccaatcaatttcaaagttacgtctttcgctccgttttatttactgtgtttttttttgtatttgtttgtgacttctggctcgctgacagtaaataaagcccataaataaaaacacccacccacgagatcgacaggaagggctaaccagagcgccggctggatttaaaaacaaaaagcgccgtccgcagccagtcaagattcagattcattcataccccagcgcttagaacaccaccaggccacagctcccgtccgagagatatagccactaagagagagcggaagaatcgaatcgcaaagagaggagccgcgctgagacaacgtcaagaatccgatttcgattccgattgcgatttcgaatccgaggcaaaaagcttcagactcggcagcaggcgcttcattctcgagttgtgatccaacgggttagcagctcagctcgcaagcagtcgccgttcgtcgtcgagcggcaagcagttcgtttcatttctactgggcgccagtacaagttccatcgagtgtttttgttattcgaaggcaaagcgcgaaaattatgccttcagccacatttgtcctggagcatttgatggcggcacaatcgcgactcgacgagcaggccgcatccccagcagaggtcaaacccaccagcaccatcaacagcagcagcaccaccgtggccaaggccatcaatgtcaagtcgtacgaaaagaagctgttgctggctctcaagaagattgtgcaataataaacgaatgcggggtaaacagcactctatttgacaaactgtagacatttcccctaatcgagctgactaagatcaataaaaagcaaacagagaagcacaacaaacagcggcaaaaaacaaaaaccaagaattctagtttttgtgctttcagtgtgtgttcgtgtgtgtgggcaagttgttacataaaacaaaaacaataacaaaataaaaaaaaaataataaaaaaacaccccagccgagacgcatttttccgcagtggaatactactatctaagcttctttttgttttggtgtgtgcgagaaaacgagtgtgaagaaaatgctgttcaacaaatgtctggaaaagttgtccagctcgctgggcaatgtggtcaatcacaagctgcaagagaaacaagtctacaacaacaacaatatcaacaataacaataacaatacgctaaacaacaacaatgcctacaacaatcagcgaaactttgagtacgaaagagccatacaggcgcactacggaagcaagggaagacgctcggaggagcgcgaaaggagcggcaagttcaaggccagcaagggtcggaaagcaaaggtcaccccaccaacggagacacccgaggcccaggagccggcctgcaagaactgtatgacccacgacgagctggcccagatcataaagggcgtggccaagggcgctgacgcgcaacgtaatcgagacaaccgactgcagcgcagacgtcgtcctctctccgcccaaccctccgccgctgcctccgcctccacatcgacggaatctctgcaccgtcttacacccagcccgcaggcttcctacccggccacgcccacctcctggacagccacaccgccccagttcccagccgccttcggcggcgccagctgctccaacagcacactgtccctcttggccaccatgcgcgtccagctccatggttacacgtaagttcaggtcgcccaaaaaaaacgacagcagtccagtccagagtgttagaaaaagagcagcgttctgctaatttggggcgcgtgcgaaattaggcactaattgttattggagtgcgagtaatgaagttgtcaggctgccaactaaacgataccccgtagcaggtgaaatggtattttgagctaccatcgcatcgtagtatgtcgccccgcctgtcagtcacatgtcgcggagtagcagatgattcgcgggaaatctggagacaatctgctgcccatcaacattaaccctaataaggcaggcaatcacaggcagttgacgccgcaacaaagcaaaaaaaaaaaaaaatcagcgcagcacatactgtcatgtgttcagaattgccacgcaaaatgagtaaatatttacgcaaagcattcgactcgaaaacaagcaatcgtaaattgacgttctaatatgaatgaatttccgactgtcaaatgccgaagtgaagtgaagggagtggaatggcaaatggcagggggcccagctcagatcgccactcaaatatggtcacatatcaacatatcaaccccccccacacaattggcccgttgtcaagttgtgtttcgatattggttctttcatttagagctgaagattgagttattggttaggcactggctaaattacgcacttgtagaaccgggagagttcggcgaattgcccactgcagacatcgtatcttggcccactgccagatcggaattatctcttcactcgcgcccggaatgtttacccatgtcccgctgttgcgctgtccgtcgtccacattccccaaagattccatcccactccgtgtctgatcttggtgtttatctgcccggctgtgccatgtgccgtccgattgtttgtgtgggctggccccatcttggcgatctcgattcgcacagtacacccagaaaacaatcgcatatgtatctgctggactattattatgtcccataaattatctttgacttttagttgagctcggattggtagtgcagtcggtttcggttgttgcttatttatttattttgatttttatcgcaacggattcataatcgctgaacgtgttgattggctcgttaacttgatctttgtttttctaatttatgctcagcttttataggtatcctgctttagggcgatcttttcgtcgttatcctaaaacgcacatcatgccaaatgatctgaagatgatgtgccaatagctttgacagcttaagctgcgtgatttccggatttcacttgtcacactcactaggtcaacaatggggcaccgccgtcctctgccctccgccttgtagaactattaaccttccgatggtttttcttctcgccataaggctgattaacgatttatgaaattacatttcccgtaatggatttcgagcgctgccttctgttttgcatatttccgtttatttgtccgttgcacaaccgtgagctgtggctactgatcaaataaaagcgtttaatttgtgcaaattcataacgtcggccgactacaagatgctctcagtggaaaggcccaattatgggggggagggctttgttctggggttgtaactccatggaaattttacaattctatcccagactctccccaactagtacttttccccgtccagttctccaacttgacatatcgtttatatgcttattttaacagtttgaactgttcaaaaaatattatgttttgaatagactgtactactacttcacacactgcttgcgagtgggcggttagggtaggggcaagcagctcattcgataattcaataagtatcttgccgacttttgagttaattaattgaaggcctcgttcccctgcttccgcgctccacctcgtaaccccaataccagtcgtttcgctgccgcctttccaggtgcgttgccacacgaaaagcaaaataaacctgtgacaaacgaaacgactaaaacactgagggggggatttgtatatgtattcggatattgtgtacgaatacgctgcacatattcgtgtgtgcatgtaaatctgtttgttgaccttagcggcgctttcatgaatggcgcgcagcttcctccgtatggtaaatacaaatacgccacattcgcattcgctgctgtaagtgtaactgtaaatgatgcaaaaaggtgcaaaattttcactgacgtactcgggtgatggtaattccatctgcttgtatttttaacccccagtctgcccgatttaaatcgctgagtgagagcgcaacagaagtaatttgtgttgctttgtattatcgtcacagtgctaaatttaaagataaacaccgaaatatgggtggagacggagacacagtttggcagcaccgcagttcggcagaatgacacaaaggatatcagcgatatgatcgatgtgggctgcgataattgctaagttcaactcgattgcacggggtcagacggcagagggcgatgcgtccacgaatccgaatcattttaactacggcgatcgcaaacaagcgatcggccaacaatacgcaaatgtgctaatagatgtggtccgaaaactgtgaattgtcttatgcaaataactcgggaacctttccatacgcaaatcgtgtgtgtgtgtgtgtgttgaatcatccgaaagaatgcgcagttcgtatttacgaatatcggaaatcggaatcatttttccagaaattctaacttttgcctaaatgaagatagagtaaaaactgaggttgggatgctatcgatttggtgcaagcagtgcacagtttccgtctacgtgaaagcaagcagtgcatatagacctgcttgtaatagatttataacttccgttttgctaaaaataaacccatcaaactcattcttatcactcgcaaccgatcggcttcgcatttggccaccttgaatctgtaacaagctagcaaagcagagcgaacgagcgagtgagcgagagggccaatgtggagagtgagagatggtgagcgagacgggcgggacagcatgaaatgcccgacagtttgtggctctaatgtaatgttaattgtttccacatggacttctattaatagccaggccagcacacggaagatgaattgatttggctgactaaaaagcaaatcaatatgcacagaaagcatttttattcaatatcgccggtacgaaaactctacgatatgtgccgtcaacatggctaaatagtgtttacttcgcttcgtcgaactaaaagacgtgatttcttccagcggagaatttaccaattatcatttgaaaattacatatgcattgttttctgtgtagcggctcctagcacttgccgcatacattatacatgagttttgagtattagttttagttcccacaccccgatacaccgaaaatccccccaaaattctcgccacatcgatgacatattttatgatatctatgaccccaggcactaaattgaaaccggcttaaggacaactcaatgttgtcaattgtttctagatttttgctcgaattccgtatttttgcgtttggttcgctcaatggcgacgaactcgaaagcgggctaagagatggacagcacaacagcagcacgcggtctataatgacattcagagcaagttgttttgggctagtgttatttatgcaaatcagtaggagggaggcaaagcagatccaatgaacccattgtgtgtaggccaacggcggacatcggtgtggacatcgaagtgatagaaagagatgatttagtttcgttcgacagaaacagaaacagaaacagaaacaccaaactcaactagtgctccgcttagtcgagctctatttgagtctaagccgactttagccgcctttttctgtgtcacatgggcaaaaatgcgcttccaactgcaattgccatggcgatgacaatctcaagtctgtcaagccaactaagctgagcaggccagacgggtagacttataagtcccggcccccagtagctggcttcgactcaacttgcgcttttccacacggcgtatgcgtgttttcgccactattgccgttgttattgcatttgtcgccttgcatttgactgttttcttcgaacttttgctggtgtgtgctttagcacatattgtacatatacgtacagtaaaccctcctcgcagtgggccctaaaaagctctaagctatgtttacacgtttagttctagtcgtcaagacctgggaatgattgcctttggtttttgccagatgttgggtttacttactaatcctattcaaatgaaaagactgcggccgttcatagagttccacccactgagtaaagaccgtacccatattcgattcgtattgcgctgtttgttgctgcttttgctgttggtattgcggttgctgctgttgttgctggctctagtattttgcgcttttgtgcgcttctcgtatagtttgtaattgcattttgagcgctcacgtagtcgccagtcgagcactcagtcagtcagtcagtcaatcgctcagttcgttcagtggatgcgccatcgatcggtacatatgaatacatatctacgaataacagtcgaactaatttagtcatatatcctaataaccatccacctctttctctccgcagatggtttcatggcaatctttccggaaaggaagcggaaaaattgatcctggagcggggcaagaatggttcgtttctcgtccgtgaatctcagagcaagcctggcgacttcgtcctttccgtgcgcacggacgacaaagtaacgcatgtcatgattcgatggcaggtatgttgaatacgtaaccccaactaaccagattttgtagccgccccttgccccgcgcccctcgcagggtgcaaaatgcaaatgcaaatcgatggcagtgcagcaacaaagtcgcactggccataaagttcctcatagcgcgaccttggctctacagtcgagtcgtatgtacatatgtatgtgcacataaactctacagttgagcctaactaacaacgatgcttgctcgagcggagtggcaagaatattataaaatcaattgacaataatatatttaaactctttcatcttgaacgcatttggctatccgtaattatccgttaacattatcgaaggcctactgtataaactccgaaacatgcctgctttgccttggcgcgggcaaactgcttgcgccaggagcttcaaccaggtcaagcagtgcagcagttccagtttcagcgtaattcccctaaaacaatttttccactattactataactttagccgtgagcgcggtttctgcggtttgcggctgcaattatgccatttacatgtctagctggcctttttcccatttgacattgaagtcacgttttcgattttattagctaatctctcgacgctccatcgaactcggagatagagactctccaccacgtgtccccccattagaatgccacgataacaatagagtgatttcctgattgcaggacaagaagtacgacgtcggcggcggggaatcctttggcaccttgtcggaactgatcgatcactacaagcgtaatcccatggtggagacgtgcggaaccgtggtgcatctgcgacagccattcaacgccacacgaatcacggcggccggcatcaatgcccgggtggaacagctggtcaaggtgagttccctctctctgatagcagtgattctggagcgcactaatcccgaggtggctttcgattccagggaggtttctgggaggaattcgaatcgctgcaacaggacagtcgggacacattctcgcgcaacgagggctacaaacaggagaaccgcctcaagaatcgctaccgcaacatattgccatgtgagtatagaaatccactaagatccgttaggactcccaaaatcctgacggtttaaaacagttatttctaactaactaactaacattaactaacaaatttctaacctatttccctgtccgctttccagacgaccacacgcgcgtcaagctgctggacgtggagcatagcgtggccggagccgagtacatcaatgccaactacatacggctgcccaccgacggcgacctgtacaacatgagcagctcgtcggagagcctgaacagctcggtgccctcgtgccccgcctgcacggctgcccagacacagcggaactgctccaactgccagctgcaaaacaagacgtgcgtgcagtgcgccgtgaagagcgccattctgccgtatagcaactgtgccacctgcagccgcaagtcagactccctgagcaagcacaagcggagcgaatcctcggcctcttcatcgccctcctccggctctgggtccggaccaggatcgtcgggcaccagcggagtgagcagcgtcaatggacccggcacacccaccaatctcacgagcggcacagccggatgtctggtcggcctgctgaagagacactcgaacgactcgtccggagctgtttctatatcgatggccgaacgggaacgcgagagggagcgcgagatgtttaagacctacatcgccacccagggctgtctgctcacccagcaagtgaacacggtgacggacttctggaacatggtctggcaggagaacacgcgggtgatcgtcatgaccaccaaggagtacgagcgcggcaaagaaaagtgcgcccgctactggccggacgagggtagatcggagcagttcggccacgcgcggatacagtgcgtctcggagaactcgaccagtgactatacgctgcgcgagttcctcgtctcgtggcgggatcagccggcgcgccggatctttcactaccatttccaggtgtggccggatcacggagtgcccgccgatccgggctgtgtgctcaacttcctgcaagatgtcaacacgcgtcagagtcacctggctcaagcgggcgagaagccggtaagtttgacttcgatcatatttgggacatcattggctctaaccaaatacttctatatatttattgattgttcgcagggtccgatctgcgtgcactgctctgcgggcatcggtcgcactggcacctttattgtgatcgatatgattctcgatcagattgtgcgcaatggtaagtttgaacggttaaatgtggtcaagaattgataactgagaaagaagacaattcaagccacatagatcttgaaccttattaaagctcttttccctatgtgtttcctcacaggattggatactgaaatcgacatccagcgcaccattcagatggtccgatcgcagcgttccggtcttgtgcaaaccgaggcgcaatacaagttcgtctactatgcggtgcagcactatatacagaccctgatcgcccggaaacgagctgaggagcagagcctgcaggttggccgcgagtacaccaatataaagtgagtggattacgagagactccgtaagagtgtccgtctaatggcaaccttatcccaccatccaggtacacgggcgaaattggaaacgattcacaaagatctccattaccaccagcaatttctagcataagtttagttccgagtaagacgccactgacgccgacatcggcggatttgggcactgggatgggcctaagcatgggcgtgggcatgggcgtcggcaacaagcacgcatcgaagcagcagccgccgttgccggtggtcaactgcaacaataataacaacggcattggcaatagcggctgcagcaacggcggcgggagcagcaccaccagcagcagcaacggcagcagcaacggtaacatcaacgccctactgggcggcatcggcttggggctgggcggcaatatgcgcaagtcgaacttttacagcgactcgctgaagcagcaacagcagcgcgaggagcaggctccggcgggagcaggtaagatgcagcagccggcgccgccgctgcgaccgcgtcctggaatactcaagttgctcaccagtcccgtcatctttcagcaaaattcaaaaacattcccaaagacatgatcggcttgcgaccgccaagccatgcgcctgcgttgccgccgccaccgacaccgccgcgcaaaacatgacaaatgaatttctaagtcgcgacgcccccttgacacgcccccttgacacgcccccctgacacccacctccctccacacgcacacagaccacatatggttttcattttaaatgtcacccagccgccgccccaaacccaaaacccaatccctcgactatgttttactgttgtaccacgttctacgttttttttttttttttataattgtaatctatatacttttttgtaattgtgtgtaatgtaatgtttagttttatgttattgtctcgctttatgttgtaagtgttccctgcacacgaaaagcagtaaccccaccaccaccccaaaacccaaaacccagcatatttatgtagtagtattgtaagaatccccgaaccggtagttgaggatacaatctgggcggaactgcagcagatccgccaaaaaacaaaaacacatttttaagcagaatcgcagcaacaaaatataacacccgttccctgttccaaaccgcttgaatttggtggaatcggccttgatagtatttcactttcttgaaaatattcgctttagataagaaaattgacttgtgacaaatatttacatgtattgcgctggttacaaaccacaaaagttgcttaactttaaattttacgaatcgacatttatgatatttcgcatgcttgaaaatagttgtagtttcctatttgggaatcattgaaaaatccatttataaagcgaaatccagttctggcacgttcaatttgaatcggttaatttctaatctagttggcgaaaaagtgaagaaaagtgaagtccacctcctccaaattcaacttgaaacggaaacgggttaccggttggagtgcaaataaagtttttagtgtagtaagtgttgacaaaatcgatagagaagaaattagaggagtaactgaggcagtaagcacgtaacga

SEQ ID NO: 7631 - DNA, 2677 bp, DROSOPHILA
agtaaaaaaatagttttttttttgtatccaaccaaccaactgtaaaaataagtttaaacaaagcatctactcataagtttcatttttttccgttaagtgtcaacattatttattttttaagtgtgcattcaataagaaaatgtcatcgcgaagatggttccacccaacgatatctggcatcgaagctgagaaactgctgcaggagcagggattcgacggctccttcctcgcccgcctctcctcctcgaatccgggcgccttcacgctctccgtgcgccgcggcaacgaggtgacccacatcaaaatccaaaacaatggcgacttctttgatctctacggtggtgaaaagttcgccacactgccggaactggtacaatactacatggagaatggcgagctaaaggagaagaacggccaggccatcgaactcaagcagccgctgatctgcgccgagcccaccacggaaagatggtttcatggcaatctttccggaaaggaagcggaaaaattgatcctggagcggggcaagaatggttcgtttctcgtccgtgaatctcagagcaagcctggcgacttcgtcctttccgtgcgcacggacgacaaagtaacgcatgtcatgattcgatggcaggacaagaagtacgacgtcggcggcggggaatcctttggcaccttgtcggaactgatcgatcactacaagcgtaatcccatggtggagacgtgcggaaccgtggtgcatctgcgacagccattcaacgccacacgaatcacggcggccggcatcaatgcccgggtggaacagctggtcaagggaggtttctgggaggaattcgaatcgctgcaacaggacagtcgggacacattctcgcgcaacgagggctacaaacaggagaaccgcctcaagaatcgctaccgcaacatattgccatacgaccacacgcgcgtcaagctgctggacgtggagcatagcgtggccggagccgagtacatcaatgccaactacatacggctgcccaccgacggcgacctgtacaacatgagcagctcgtcggagagcctgaacagctcggtgccctcgtgccccgcctgcacggctgcccagacacagcggaactgctccaactgccagctgcaaaacaagacgtgcgtgcagtgcgccgtgaagagcgccattctgccgtatagcaactgtgccacctgcagccgcaagtcagactccctgagcaagcacaagcggagcgaatcctcggcctcttcatcgccctcctccggctctgggtccggaccaggatcgtcgggcaccagcggagtgagcagcgtcaatggacccggcacacccaccaatctcacgagcggcacagccggatgtctggtcggcctgctgaagagacactcgaacgactcgtccggagctgtttctatatcgatggccgaacgggaacgcgagagggagcgcgagatgtttaagacctacatcgccacccagggctgtctgctcacccagcaagtgaacacggtgacggacttctggaacatggtctggcaggagaacacgcgggtgatcgtcatgaccaccaaggagtacgagcgcggcaaagaaaagtgcgcccgctactggccggacgagggtagatcggagcagttcggccacgcgcggatacagtgcgtctcggagaactcgaccagtgactatacgctgcgcgagttcctcgtctcgtggcgggatcagccggcgcgccggatctttcactaccatttccaggtgtggccggatcacggagtgcccgccgatccgggctgtgtgctcaacttcctgcaagatgtcaacacgcgtcagagtcacctggctcaagcgggcgagaagccgggtccgatctgcgtgcactgctctgcgggcatcggtcgcactggcacctttattgtgatcgatatgattctcgatcagattgtgcgcaatggattggatactgaaatcgacatccagcgcaccattcagatggtccgatcgcagcgttccggtcttgtgcaaaccgaggcgcaatacaagttcgtctactatgcggtgcagcactatatacagaccctgatcgcccggaaacgagctgaggagcagagcctgcaggttggccgcgagtacaccaatataaagtacacgggcgaaattggaaacgattcacaaagatctccattaccaccagcaatttctagcataagtttagttccgagtaagacgccactgacgccgacatcggcggatttgggcactgggatgggcctaagcatgggcgtgggcatgggcgtcggcaacaagcacgcatcgaagcagcagccgccgttgccggtggtcaactgcaacaataataacaacggcattggcaatagcggctgcagcaacggcggcgggagcagcaccaccagcagcagcaacggcagcagcaacggtaacatcaacgccctactgggcggcatcggcttggggctgggcggcaatatgcgcaagtcgaacttttacagcgactcgctgaagcagcaacagcagcgcgaggagcaggctccggcgggagcaggtaagatgcagcagccggcgccgccgctgcgaccgcgtcctggaatactcaagttgctcaccagtcccgtcatctttcagcaaaattcaaaaacattcccaaagacatga

SEQ ID NO: 7632 - protein, 845 aa, DROSOPHILA
MSSRRWFHPTISGIEAEKLLQEQGFDGSFLARLSSSNPGAFTLSVRRGNEVTHIKIQNNGDFFDLYGGEKFATLPELVQYYMENGELKEKNGQAIELKQPLICAEPTTERWFHGNLSGKEAEKLILERGKNGSFLVRESQSKPGDFVLSVRTDDKVTHVMIRWQDKKYDVGGGESFGTLSELIDHYKRNPMVETCGTVVHLRQPFNATRITAAGINARVEQLVKGGFWEEFESLQQDSRDTFSRNEGYKQENRLKNRYRNILPYDHTRVKLLDVEHSVAGAEYINANYIRLPTDGDLYNMSSSSESLNSSVPSCPACTAAQTQRNCSNCQLQNKTCVQCAVKSAILPYSNCATCSRKSDSLSKHKRSESSASSSPSSGSGSGPGSSGTSGVSSVNGPGTPTNLTSGTAGCLVGLLKRHSNDSSGAVSISMAEREREREREMFKTYIATQGCLLTQQVNTVTDFWNMVWQENTRVIVMTTKEYERGKEKCARYWPDEGRSEQFGHARIQCVSENSTSDYTLREFLVSWRDQPARRIFHYHFQVWPDHGVPADPGCVLNFLQDVNTRQSHLAQAGEKPGPICVHCSAGIGRTGTFIVIDMILDQIVRNGLDTEIDIQRTIQMVRSQRSGLVQTEAQYKFVYYAVQHYIQTLIARKRAEEQSLQVGREYTNIKYTGEIGNDSQRSPLPPAISSISLVPSKTPLTPTSADLGTGMGLSMGVGMGVGNKHASKQQPPLPVVNCNNNNNGIGNSGCSNGGGSSTTSSSNGSSNGNINALLGGIGLGLGGNMRKSNFYSDSLKQQQQREEQAPAGAGKMQQPAPPLRPRPGILKLLTSPVIFQQNSKTFPKT

SEQ ID NO: 7633 - DNA, 3719 bp, DROSOPHILA
ctgctccggcggagtgggttgctgccatgtagaaatttgactcctgacgccttaattctttgttaaggattgctaaatccttggtttatctttgaattagttgaagagctaacaactagatctaataactaagccaaagataaagttaacatttgaagaattgagggcaacttgattgcatacaatgcgcaagcccacgaaccacgtggttttccaagacgacaattgattaacgcgttaatttccattccagctggtgctcttcctgcccgccctgtgccgcaagatgggcgtgccctactgcattgtgaagggtaaggctcgtctgggtcgcctggtgcgtcgcaagacctgcaccaccctcgccctgaccaccgtcgataacaacgacaaggccaacttcggcaaggtcctggaggctgtgaagaccaacttcaacgagcgccacgaggagatccgtcgccactggggcggtggtatccttggctccaagagtctggcccgcatctctaagctggagcgcgccaaggcacgcgagcttgcccagaagcagggttgattcaatctgaagccggtccggtccgatggtggagacttttaagtacacatggatgaaattagttgggccatgctcactgaatttgataactaataaacttttaagtgtacaattttttttgttttttttttttttaatctaagtgcctgtgagagtgcttttggatgagtcgatgatttggcgtcggcttggattcaataaatctaagatgtatccatgcccatcactcactttgttttccgccaatcgggaagttgtgcctgtgagaaagagaagtcttcttgaattgaatttggccaacttccgcttctttgtaccatttctctctagatgacaacaaatttcacatgccatatgtttcaaacatttagcgaacaaaagacaaaaggaagtacatttagttttccatatttgtttttattttataactagtgataggagcagggcaacgatttgttagattttcgatagatccgtcttgatccccagcttgctgctctgaatggcctcgttcaggatgctgagcaccatgtccacgcgctccacggtagcgttttcgcccattaaaccgatacggaagacgtgctccaccgtgggacccagaccaccgctaatctcaacgctgtacctggaaaaaaagaaaggattcaatacggatctctatcgaggattcgcgtccagttgtacaatactcacttgcgcatggcgtactcggccacctttttccagtcgacgccgaagggcaccttaatcgtgttcaccgtgggcaaacgctcctcctcgcgcgacacaaacatctcaagacccagctcctcgatgcccaactgcagtcgcttggagcactcctgatggcgacgcaccaccgccttgaggccgacggcacaaaagtgggccagtgcctcacgcaatccgtagagcagggtggaggatatggtgtggtggtagatgcggggtgtgccatagcaaccccagtactgaccaatcagcaggatatcgaagtagtaaaccttcggcttggtctttcgctttcggatgcgggtcaaagcacgcttgctgaacgaaatgggcgttagaccggcgggaccaccgagcgatttctgcgaacccgtgtacgccacatccaccttccactcgtccatgaggaattcggtgccgccgagcgaagccaccgtatcgacgatgaggaagcaatcgtacttgcggcacagttcgcccagctcacggatattctgctggataatgccagtcgaggagtcaccctgggcaatgaagaagaccttgggtcgatgcgcctcgaaggcgaatgtgatctcttcgtgcgacagtgcccggccgaaactcgcctccacgtagtgaacttcggcaccatagcgacgggccatatccccggcccgatgaccccagacgcccgtgatgcccatgagcaccacatcgccatcctcgatcagattgcacagagcggcctccatgcccgagtggccggcgccgctgatgcacatggtggcatcgttgagtgtctgaaagatgtacttaatgccctccttcacctcgtccatgatctgcagatatacagagattaatatacaaacacctggccatgctcagtgggaatagctcaattcatggggggatcactaatattagattgctataaagtataagagatgtgctggtttcactcgactggctagcccacagatctctgacccagctcagcaaatgtatctcaatgtttcacttcgttcagataaggtacagtgcggcccatgagtatatggacttgggcttaacttttcgatataattcgagtattaagctcaatcttgctagcacttttgtggttttaagaagatattgtacctgcaggcattcgggatgcatgtgacccaacaccggattgctcatggcctccaggacgcgatgggaacagttggagggtccgggccccatcaacgtcttgctgggcacatagagcggtcgcttgagtacaagtggcggtggtacctccatggtctttgttccctatttacgtaatcagatctctgtgtttacgactgccttatcgccttctgctctctaatccgctgtgccaggtagaatgggtgttactactgtttggtgatgggagttggtttttatgggctgtctctctcggtggctggccaagatcggactgaaacgcttgccgggctgctggccactttatagcgcaccggatcgcagcttatcgccgcaattttcgccgatgaacgcacttgaacaagtggtaaatgatgcgctctcccgcttatcaaggcatcaagatcgagagcaactgcgtcgttggcggcacagaacgaaatttggaataagaataataagttaagactgccatttgatgggtcaaaaaatcatacacagttttaagacaagatctttacgaaataatatgacttactactcaattaatttcattgttaatctgaaagaagtaccattttttgtttgcagtgtgctgctgctgattctttgaatggccttgggaaggttggcggaccaatgtctattgtgaaataagaaatccagcgaattcagcaagacgaaccttgactgtgggtacgtatacgtaatgtagcaacttctttttcgaagctggaagcatctgcagagtgcagagatcaagatctagcatctagatcttaattctctcgaaatctcagcccactgacaactaacatttgggttgatagcagtgcccgtatcgtcagtttttccattagcgatttggagtggaaaacacatcgtgaccaggaggtcaaccgccaataatacaaatgtcgtattgagtggccgaaaatatttattaccatttcgctggtggtgaaattagaatcaaaataaaaacaaaaacatagatttaggaaagtgataagcagtcaaattagcaggtcgtgactataaaatttaaatgttcgtttaaatattgattgatttttccatatttaaggcacaagcatctttttaaaaacattgtttcgaatgtagaagtaagttcagtttggttttaatatattgaattaattatattgaaacgaattgaatatagaatatatattctattacagttgactatattaaacatatatatgtataaatatgtttattttatggcctttttgct

SEQ ID NO: 7634 - DNA, 1350 bp, DROSOPHILA
agccaccgagagagacagcccataaaaaccaactcccatcaccaaacagtagtaacacccattctacctggcacagcggattagagagcagaaggcgataaggcagtcgtaaacacagagatctgattacgtaaatagggaacaaagaccatggaggtaccaccgccacttgtactcaagcgaccgctctatgtgcccagcaagacgttgatggggcccggaccctccaactgttcccatcgcgtcctggaggccatgagcaatccggtgttgggtcacatgcatcccgaatgcctgcagatcatggacgaggtgaaggagggcattaagtacatctttcagacactcaacgatgccaccatgtgcatcagcggcgccggccactcgggcatggaggccgctctgtgcaatctgatcgaggatggcgatgtggtgctcatgggcatcacgggcgtctggggtcatcgggccggggatatggcccgtcgctatggtgccgaagttcactacgtggaggcgagtttcggccgggcactgtcgcacgaagagatcacattcgccttcgaggcgcatcgacccaaggtcttcttcattgcccagggtgactcctcgactggcattatccagcagaatatccgtgagctgggcgaactgtgccgcaagtacgattgcttcctcatcgtcgatacggtggcttcgctcggcggcaccgaattcctcatggacgagtggaaggtggatgtggcgtacacgggttcgcagaaatcgctcggtggtcccgccggtctaacgcccatttcgttcagcaagcgtgctttgacccgcatccgaaagcgaaagaccaagccgaaggtttactacttcgatatcctgctgattggtcagtactggggttgctatggcacaccccgcatctaccaccacaccatatcctccaccctgctctacggattgcgtgaggcactggcccacttttgtgccgtcggcctcaaggcggtggtgcgtcgccatcaggagtgctccaagcgactgcagttgggcatcgaggagctgggtcttgagatgtttgtgtcgcgcgaggaggagcgtttgcccacggtgaacacgattaaggtgcccttcggcgtcgactggaaaaaggtggccgagtacgccatgcgcaagtacagcgttgagattagcggtggtctgggtcccacggtggagcacgtcttccgtatcggtttaatgggcgaaaacgctaccgtggagcgcgtggacatggtgctcagcatcctgaacgaggccattcagagcagcaagctggggatcaagacggatctatcgaaaatctaacaaatcgttgccctg

SEQ ID NO: 7635 - protein, 394 aa, DROSOPHILA
MEVPPPLVLKRPLYVPSKTLMGPGPSNCSHRVLEAMSNPVLGHMHPECLQIMDEVKEGIKYIFQTLNDATMCISGAGHSGMEAALCNLIEDGDVVLMGITGVWGHRAGDMARRYGAEVHYVEASFGRALSHEEITFAFEAHRPKVFFIAQGDSSTGIIQQNIRELGELCRKYDCFLIVDTVASLGGTEFLMDEWKVDVAYTGSQKSLGGPAGLTPISFSKRALTRIRKRKTKPKVYYFDILLIGQYWGCYGTPRIYHHTISSTLLYGLREALAHFCAVGLKAVVRRHQECSKRLQLGIEELGLEMFVSREEERLPTVNTIKVPFGVDWKKVAEYAMRKYSVEISGGLGPTVEHVFRIGLMGENATVERVDMVLSILNEAIQSSKLGIKTDLSKI

SEQ ID NO: 7636 - DNA, 2685 bp, DROSOPHILA
cataagctctgcaactcacgtacgtaatctttgaatccgtcgtagcacgaagaaggagctccgccgagctccgctgagcaccgctgatttaggaacgatgtatctttcacaacaatgtataggtcagagatattttaaatgggtttgacgggtagatactgtcctacggcggatcggtgccacgtagaccacacaaaactatggattagtgcgccccaaaagggaagaagtcgtcgaaattagcgcagtttatgtatgtaaaactatgataaatgagaagaggagttgtacgcgtgtaaattaataaccaaactcatcatttttttttttttttcgtgacattacctagcatataacaagtaagtggggtagccctgctgccaacgcagctaccccagctaatacaatctggaatatcacccatccggcctcaccacttcggcacttcggcagggagtttctgttaggccagcagcatggcatggttatggtgtagccaacacctggccaccattgtaaacatacaagcaagctagcaagcggtatccacattggaaaacagtctataatgtaataggaggatgcatgttgtggcagacgaaactcaatctatactaaaaccgaaaccgaaaccgaaaacggaaacctaaaccgaaaacggaaacctaaacctaaaacctagtatcctaagtatatacactggcctatgaaactcgatttctctgttcttagtaaaagaggtctaaataagaagtttgtacatctcggattcggattcgacttgaatgagtcgctgtccaacgagttgttaacaataaatatacgataaatataattaacattactgatgttttctattttttttttggttgggtggtttcattgaggccaccgcatgatgggctaaaagagaacctcttgtcattttcctttcccaagctgtcgttaattaaaaatgtagtataattcaagcgatatctatatatatatatatatgtgtataagattagagctgaaattgacggaagtgagggtaatgtgatggactggagaccacaaagcgttcgaggaatgggacacacgttatgaggtaggccaggcggttgacccaacgcggaattttacggccacagacgagatgcgccaggcagttggagaagtggttgcaattcttgctggtcaagtggtagctggtcccgcggaactcgaagcccagcaggttgataacgcgcttcacttcagcgcaggtaaagtcggtgtagccgagcagaatgctcttccggaaacggaagtgttcgcccaactcctcctgcccattgcagggatgaatctcaaagatgccggaaatggagagattgagcgccaaaaatgcgtactctcgcccgtacaactggacgccggaatggaagacacccaagcccagcggaaaagtgtagttgttgctggtggacaggtcgtagatgttcagcattaccggctccctctgttcaatgtcttcggtactgatctccctgtcgccgcacaggcagcgcatccttcgcagggcattcaggaacattttacggtagaagaagaataataaaatcggataacgcaaacgctgactggactccacgaacgtcaggagttgggaaggacactttgaatttaaatacgtggagttgagttgatttggttggttagtgttattattgagatatgattgatcgcctcctgggccacctgaaatccacacgtccatttcaatgggttaatgttaatgttaatggcagtgtttttttttttttaatatttttattatttccattcttgctgtgtctggcataatttgttaaacatgcgtcttgtagttttcgtttggctgtttttctttcgtatttaaatatatataggtgatgtattttattggtttccatgtgtgtgtgtgtgtgttttttttttgttttctcgcttttggtttgatttctaattatttttaaatataactcgttaatgcattgcttagctaaaaaaaatcatcttataattagtttgacacaccttgaattagttagaaagtttgtagtttaattcgtttgggttcggcttgcggatttgcctgctttggatttctgtgcatttcgggtctatggtggtcggttggcggtggtagtggtgggtccgggatgcagtgggtcagtagggagtgggtcagtggggagtgggagcaggagttgctatatgtacgtcgtatgttgagtaagctatattagtgagtagtgagcaggcaatgaaaagtcggtagaagcaaccaaagagttgccgcatggagcccggagctaggagctagaagctaggagtagatccaaccagaccggatcggatcagatcagatcagactgggctccactttccacgattttcacgttttccacatcttccacgtctgccattgggaaggggccaagcaacctgacttatgctatcgctagtacatattttagtatatttatttaaatttatatatgcgcctgatgcgcgcgtttacttttactttttataatgccacgataaaatctcaatacacaatttgcttagttactatgactagttgcctattacataatccacttccattcgcatttgtttagctccgactctggctctatgtaccatcccatatctctacctttacgaattaccttt

SEQ ID NO: 7637 - DNA, 685 bp, DROSOPHILA
cactaaccaaccaaatcaactcaactccacgtatttaaattcaaagtgtccttcccaactcctgacgttcgtggagtccagtcagcgtttgcgttatccgattttattattcttcttctaccgtaaaatgttcctgaatgccctgcgaaggatgcgctgcctgtgcggcgacagggagatcagtaccgaagacattgaacagagggagccggtaatgctgaacatctacgacctgtccaccagcaacaactacacttttccgctgggcttgggtgtcttccattccggcgtccagttgtacgggcgagagtacgcatttttggcgctcaatctctccatttccggcatctttgagattcatccctgcaatgggcaggaggagttgggcgaacacttccgtttccggaagagcattctgctcggctacaccgactttacctgcgctgaagtgaagcgcgttatcaacctgctgggcttcgagttccgcgggaccagctaccacttgaccagcaagaattgcaaccacttctccaactgcctggcgcatctcgtctgtggccgtaaaattccgcgttgggtcaaccgcctggcctacctcataacgtgtgtcccattcctcgaacgctttgtggtctccagtccatcacattaccctcacttccgtcaatttcagctctaatcttat

SEQ ID NO: 7638 - protein, 183 aa, DROSOPHILA
MFLNALRRMRCLCGDREISTEDIEQREPVMLNIYDLSTSNNYTFPLGLGVFHSGVQLYGREYAFLALNLSISGIFEIHPCNGQEELGEHFRFRKSILLGYTDFTCAEVKRVINLLGFEFRGTSYHLTSKNCNHFSNCLAHLVCGRKIPRWVNRLAYLITCVPFLERFVVSSPSHYPHFRQFQL

SEQ ID NO: 7639 - DNA, 3184 bp, DROSOPHILA
ttttctttgcacaagaggaaaaagggaaagcccaatgattagccaactaattgggctgtaacctggtcgcacttttcaaggacattcggctgggaaagggaagcggggcagtttggagcggggaaacttagccaagacgcctcgcagtcgatgcggaaacccgcgatgcggcttcttagccaagttatgcgtggcgctggttagtgcaagccagaacccatggatggagccgcttacctcgatcgccgtgatggccataatctgcagcggcagattggcggttgttttcacccgcggattctcctcgaaaatcgaggccagcttctgctcggtcagacagaagcggcagaccctcttctcggtcagcatggcctcgcgcacctccagtttcgcggccatcggcaattggcggtaattcgttccgggcggcggtagaaacgcggaatttcacttgcaaagtgcgtacagattacaaatgagaggaaaacaatcgcttggcgtcgcttagagatgtgcactatgcagatatcgatgtttctgtgtgaattttgctagcgaaactttttgtttttattttacacaatcaagtatttgtcacaaatacaacgtcacactaatatgggatgacataaaaataaaaaatttatgccgagtccctttatcatccaggcagaatcacttttcatttgcacaaaccgccagggcgttgccggatcgctaatgtgtgctgccactcggtgcgcgtcctggtaaaatatcgatattttagctgctttttaactaaaagtaattttaagtcgaaacttttaactaaaactaaagtgctatgaaaatgtatgtattttttaaacgccaataaaacctaacttatatgcaataaatgttttcttttttaaagagtttgtgtattttagaaaacctgactttttattaggaaaccaacatttatcatacaaattcaggaaatatcaaatgaacatttttattaaacagaaagcttgcgatagttttcagtgtatttaagattttagcccactgatgcaattttgaaatccaccaatttcgaacccattgaaatgttaatttttcatttgacggtagaaaatacattaacctctatttaagctacttgtgtataaaatatatgtatatgcatatatactactcgtccgcgtccctcagacgagcctgcgtctgctggccgatgtcgtagatggcgttctgctggagcagctcgtgggcctcgtagcgcagggactcctcgtaggcgtactggatgctggtgtcgtaaatcatcagcttgcacttggccagcgcgaggatggagttcctcagccgggcgatcacctcccgatccgcgcgcggcacatgctcgttcaggttctgagcgaatcctccctcgccgccttcctcctcctggcccttggtcggcgatatccagatgtagccattgttgcccaggatcacggaggcgccgcagggcaggttgtggaagtgcatcttgcggcgcttgacgagagcggggaacaccttgaccaggatgccctgcgatagttttccatacttcaaactgcgcgtgtacagcgaaagggagccctcctcaaagatgttctggtggccagagaagaaagattatatagttactccagtaccagcaagttaggaagtacccacctggacctcggcagagatgagatcgccctcgtccaagtatcgtcgcatcatctgctcgtcctccgccgatctccgtcgtagttctccgcctggcagattcaccgaggagagcagtaggatggagtcgagccgggaattggtgtccactcgccagcgcttctgttgcacctcgctgacgcgggccaccaccacgtccccgatctcgcccacatagcgactcttaagcgggcgcaccgagatcagcttgttgaccttctggatcaccccggccaccgaggacttgatgttctcgtcctcgacgaaggttccgtggccgcgcatgaatcccgcctccggcatcagcacttcccccggcgtatacaccctcggctgttcctccgtctgcgcggccaggtcgcgccagtccacccggtccagggccagatctatcgccgcgttggtggacatctcagtttggccaaagcgaggtaaacaaaaatttaattttgagcgaggcaaaaagagcaacagctggcaaaacacgcgccacgcggaaccggttcgggttcggggttcgttgctggttccggttcaagttccatttcttcgccgcaactacagtgcctatcggttgcggcgaattgcaattttaaaaaccaattttgttgaaattcgaaagtaaatgtaacgaagacttgcaaattctattgcctaacaaaaaatacatacaatcgaaataaaataaaagtaaaggggattaaaaaaaactgttaaaatcacgtttttagtttccttagttttatgaaataacatttattgttaatgtgtataatatatatgtcgaaagcatttttgagtttgtccttagataagcagcatacaaattataattttaaagaacagctttgaaataattgctctggcatttcaatgataagttatctgtcttctttaagttagctaagctccattagacttctgaaacattcatcatcttgtttcagttggattgcctcagagctcgcaggcacattcccatccggaataatattttctagaataagactaaaaacttgaagtagaaaatgcatcggcttctgttcctaatttttttggctctcaaataccagagcaatgcaatgaacttttcgccattgccgaatcgagtgatagatgctccaaagcacctaaaaacccgaatgatccaagtgcgaagctcctactttggatactcgctcgtcatccgtccaaccaggtgagatcttatcctagggaagctatcgatcccagactgtgattgcacttgaaattccatgaagttccttctaacaaaaaacttcgtgatcaatgcagcatcttcgtgggagctccgcgtgctcagtccaccttggaatcgcaaggcagcattaatgagactggagctgtctacagatgccccctggccagtggatcctgctcgcattacgtcctaaacgacaagctaaataagcaattccagtggctgggcggctctatggatggcggcaccaag

SEQ ID NO: 7640 - DNA, 1121 bp, DROSOPHILA
ctgttgctctttttgcctcgctcaaaattaaatttttgtttacctcgctttggccaaactgagatgtccaccaacgcggcgatagatctggccctggaccgggtggactggcgcgacctggccgcgcagacggaggaacagccgagggtgtatacgccgggggaagtgctgatgccggaggcgggattcatgcgcggccacggaaccttcgtcgaggacgagaacatcaagtcctcggtggccggggtgatccagaaggtcaacaagctgatctcggtgcgcccgcttaagagtcgctatgtgggcgagatcggggacgtggtggtggcccgcgtcagcgaggtgcaacagaagcgctggcgagtggacaccaattcccggctcgactccatcctactgctctcctcggtgaatctgccaggcggagaactacgacggagatcggcggaggacgagcagatgatgcgacgatacttggacgagggcgatctcatctctgccgaggtccagaacatctttgaggagggctccctttcgctgtacacgcgcagtttgaagtatggaaaactatcgcagggcatcctggtcaaggtgttccccgctctcgtcaagcgccgcaagatgcacttccacaacctgccctgcggcgcctccgtgatcctgggcaacaatggctacatctggatatcgccgaccaagggccaggaggaggaaggcggcgagggaggattcgctcagaacctgaacgagcatgtgccgcgcgcggatcgggaggtgatcgcccggctgaggaactccatcctcgcgctggccaagtgcaagctgatgatttacgacaccagcatccagtacgcctacgaggagtccctgcgctacgaggcccacgagctgctccagcagaacgccatctacgacatcggccagcagacgcaggctcgtctgagggacgcggacgagtagtatatatgcatatacatatattttatacacaagtagcttaaatagaggttaatgtattttctaccgtcaaatgaaaaattaacatttcaatgggttcgaaattggtggatttcaaaattgcatcagtgggctaaaatcttaaatacactgaaaactatcgc

SEQ ID NO: 7641 - protein, 298 aa, DROSOPHILA
MSTNAAIDLALDRVDWRDLAAQTEEQPRVYTPGEVLMPEAGFMRGHGTFVEDENIKSSVAGVIQKVNKLISVRPLKSRYVGEIGDVVVARVSEVQQKRWRVDTNSRLDSILLLSSVNLPGGELRRRSAEDEQMMRRYLDEGDLISAEVQNIFEEGSLSLYTRSLKYGKLSQGILVKVFPALVKRRKMHFHNLPCGASVILGNNGYIWISPTKGQEEEGGEGGFAQNLNEHVPRADREVIARLRNSILALAKCKLMIYDTSIQYAYEESLRYEAHELLQQNAIYDIGQQTQARLRDADE

SEQ ID NO: 7642 - DNA, 3180 bp, DROSOPHILA
ttggcagcgccttgccacgcacacaacaatgacgccattttgattttcacaatttttcacaaaggcgtaattaaatccgcagccaagggaaatgctagaaaattgtcttttaatagcaacttcaacaatatcggccactttatattgatttttctttgtttaatcctaattatcggctttcgttcacgtccacgccccaaaattggacatgcggttaggtccgcacacttaggtcgagcaaatcggtaataagccttccagaaaatatatattaaatgtacaattgtttatcggccttacaatttgttaaatatttaattggcgacgatttttctatctctccgaaaactcctgcgtgcgctttgcttaggctcacaaaatcgtgtgacctttccttgcttgaaaataaaagtttgtttagaaaataccaaaacgcatagtcggaatatggtaatctaattaatacccctattttgaaagtacaaacaataattatttacttaaaaacacttttaatataaatggatttagtttcccgttaacagtttcaaaaactatccacggtggataatagcgaatgctataaaaagaaatttattgaattaagattttaattcatcttaattattctaacacatataatggcataagttatagataccctgagctctttttcaattaaataaaatttgtgaaggtgtcagggctaaatcatgtattgtttgacttatttcttatattttagatattcagaattgcatattttattagtattgatgtacccaatatccttaatatttgagttacattggaatcgcaattttgttaaggcatttatctggcacacgatcaaatataattgtatttgaatatatattttaaaacattctcaatcgaaaaatttattttataatcaagataaaaataaacctttaaataggtaatctatcaataatattaaccaaccagttttccctgatatggtcacacgcatttaccgctgatctggcagcctggccaaaacaagcgtgcaagaatcttacctgtagaattagcttctgaaaactcgagtaacgatgagcgaaagtgaagcggaggagaccaaaatcagcaccgagccggtggacaatgcgtggtccatgaagatccctgccttcaggcaggaggacaacccgcatgggatggtggaggagagctccttcgccacgctgtttcccaaatatcgggagcgctatcttaaggaggtttggcctctggtggagcagtgcttggcggagcaccacctgaaggcggagctagatttgatggaggggagcatggtggtgaagaccagtcgcaagacctgggatccctacatcatcatcaaggcgcgggatatgatcaagctgatggccagaagtgttcccttcgagcaggccaagcgggtcctgcaggacgacattgggtgtgacatcatcaaaatcggaaaccttgtgcacaagaaggagaagttcgtgaagcggcgacagcgtttgatcggacctaacggcgccacccttaagtccattgaactgctcaccgattgctacgttttggttcaaggaaacacagtctccgccttgggtccttacaagggccttcagcaggtgcgggatatagtcctggagaccatgaacaatgtgcaccccatatacaacattaaggctctgatgatcaagcgggagctgatgaaggatccgcgtctggccaacgaggactggtcccgattcctgcccaagttcaagaacaaaaacattagcaaacgcaagcagccgaaggtcaagaagcaaaagaaggagtacaccccattcccgcccagccagccggagagcaaggtggacaagcagctggccagcggagagtacttcctcaaccaggagcagaagcaagcgaagcgcaaccaggagcgcaccgaaaagcagaaggaggcggccaagcgccaggacgaacgccgaaacaaggactttgtcccgcccacggaggagtcagctgcttcaagtcggaagaaggaggatggctcctcctccagcaaggtggacgtgaaggccctgaaggccaagctgatcaaggccaacaagaaggcgaggagcagctgatagttttcctagttttaattagtagtaggacctattcaataaaaattgattttctgagcaacgtgtaaatagaaatcttaaggtttactaatgggatgaaaagtttgtggggacgaactcgtattaattctagttgtttttaaaagccaatctccaaaaatgcaatggatacataatgctaattcagcatataacatgctgaataccttatacttgtaataaaattaaattaaatacttatacaataattttgattctattgcggtgcccgctagtgtagagagagatctctttctctccctctctctctctgtcgcactctctcaacaagtggcttaatacaaatatatacaaacaactcaaaaggccagcgaatgagccaagttagtacgatttctggtaccggactgacatgtactaaccgcgcttaaacagcggatgacgctcgcgtgcgttccacaataacaacaaaaacagtatctgaaaagccacggcaacaacaacattggcgtcgcggggctattgttattcgtacgtttattttccgcaagcgacagaaaaatagaaaatagaaaaacggtctgtgagaatcaaaaagaacggagcgaaagaaagccgtcttaaaaataaaaatcaaagaggagcgagaaagcactagaccaaaggcggcggctgccagaaaaggacggagagaacggcgaagacaggtaataaggaggtggaagaagaagagaggattaagtgctggactacagttacttttaatgtttgaattaaaattgaaacaatgctcgagtgatcgcagttgtaacgcctaaaaccgaagctaaacccgaaaataagcccgaaagccagttgaaatgccaagcaaacgtgacagagacttggattattcgtgctaattagaaaaagaatgtgctgctaggtgagaggatgatatcgaaatgctaacgtgatatcgatacctgtgtgttgtgcgtgtgtgtgcgaagggagtgtatacacatacatatgaatatcacacatttcaccggaaaatgcggtcaattagaataatacatacagc

SEQ ID NO: 7643 - DNA, 1180 bp, DROSOPHILA
ctgatctggcagcctggccaaaacaagcgtgcaagaatcttacctgtagaattagcttctgaaaactcgagtaacgatgagcgaaagtgaagcggaggagaccaaaatcagcaccgagccggtggacaatgcgtggtccatgaagatccctgccttcaggcaggaggacaacccgcatgggatggtggaggagagctccttcgccacgctgtttcccaaatatcgggagcgctatcttaaggaggtttggcctctggtggagcagtgcttggcggagcaccacctgaaggcggagctagatttgatggaggggagcatggtggtgaagaccagtcgcaagacctgggatccctacatcatcatcaaggcgcgggatatgatcaagctgatggccagaagtgttcccttcgagcaggccaagcgggtcctgcaggacgacattgggtgtgacatcatcaaaatcggaaaccttgtgcacaagaaggagaagttcgtgaagcggcgacagcgtttgatcggacctaacggcgccacccttaagtccattgaactgctcaccgattgctacgttttggttcaaggaaacacagtctccgccttgggtccttacaagggccttcagcaggtgcgggatatagtcctggagaccatgaacaatgtgcaccccatatacaacattaaggctctgatgatcaagcgggagctgatgaaggatccgcgtctggccaacgaggactggtcccgattcctgcccaagttcaagaacaaaaacattagcaaacgcaagcagccgaaggtcaagaagcaaaagaaggagtacaccccattcccgcccagccagccggagagcaaggtggacaagcagctggccagcggagagtacttcctcaaccaggagcagaagcaagcgaagcgcaaccaggagcgcaccgaaaagcagaaggaggcggccaagcgccaggacgaacgccgaaacaaggactttgtcccgcccacggaggagtcagctgcttcaagtcggaagaaggaggatggctcctcctccagcaaggtggacgtgaaggccctgaaggccaagctgatcaaggccaacaagaaggcgaggagcagctgatagttttcctagttttaattagtagtaggacctattcaataaaaattgattttctgagcaacgtgt

SEQ ID NO: 7644 - protein, 345 aa, DROSOPHILA
MSESEAEETKISTEPVDNAWSMKIPAFRQEDNPHGMVEESSFATLFPKYRERYLKEVWPLVEQCLAEHHLKAELDLMEGSMVVKTSRKTWDPYIIIKARDMIKLMARSVPFEQAKRVLQDDIGCDIIKIGNLVHKKEKFVKRRQRLIGPNGATLKSIELLTDCYVLVQGNTVSALGPYKGLQQVRDIVLETMNNVHPIYNIKALMIKRELMKDPRLANEDWSRFLPKFKNKNISKRKQPKVKKQKKEYTPFPPSQPESKVDKQLASGEYFLNQEQKQAKRNQERTEKQKEAAKRQDERRNKDFVPPTEESAASSRKKEDGSSSSKVDVKALKAKLIKANKKARSS

SEQ ID NO: 7645 - DNA, 6548 bp, DROSOPHILA
agcgatcattgtcagtcgcataaaatcgcataaagattgcatgaaatgctgtaaattctaggaaaacatttgcttatgcaactggcacaaggaaaacagccgcatcagcaggagaggcatctatttttaggatacctgaccagagtgctcaagctgaaaagagttgtatctatatcccaatatctaatgatcacttgatgatccatagatatgaagcaggcccaaagccagagaaatctacaactttcagttgctcctcgatcctttcacatcgtagacttggccaagtgctgctaatgccaaactaacgacttgcaacaagaacagctgcggccgaatgattggccgcccttggaggaggagcagtgaaagccgctctgggccacgctatatatatattgtccacttttggacactgtccttgcgcctgcctgacgtcagcacgtaggcagttgaagaggcgacatggcgacaacgacaacacgtcttcaacttgttgccgctgcgccttaaatggcccggagcaacttcaccagagcatcgccaacatcaccagcatatccaacatcaccaacacatcacgcactcgctgcactgcacaatgacaaaaaaaaaaaaatgcatcggattttttgtcttttattaatttattttaagtgattcacggcggcgtagactgaaaacgaaaaccgaaaactgaaaacagctaaaccttggaagttccaaaaatgtcaactgattgatttgaattgcaccgcattggtaagaaactggcaacaatgcaacaatgccatagagccacctaattggaatttaagcttgtgctggtaattagtttacaagcagcatggcacaattgagtgaataatataacataagaggcataaagaaaaaagtcccaaaagaaagaactcattcgaacatacatacataagtgaaaaagtccaaaaagaaagatttccttttagacatgagtgaataaatatcccaaaagaaagacttaatttgaacatgaatgaaagttactttatttgaactatatataaatgtactgtattatatatgcgtaatatgcatacataaatggtgtggaatttgttgtggaatattcgcaatgaactttaataactaatcagtgctaaatacaacttagtaaaatcatatcatatcatatatcaaatatggtggcgcggtcagtagccgctagctgtccgtacgatctctacatactatatgctatatatgctatatattggcgatgtatacgatagttcgttcgatgctcgatgatatcaatatgaaagcaacaattcatcaaatgtatgcaagggattcgataaaaaaaattattgttatgtcgtatggctatggggctatgttaaaatatgtttatgtatgtatgtatatgtatatgtatatgtatatgcgtaatggaatatctggctgcgttacaactatgcttcctaaatgctccgtttaataatgaataattcaaattaaaatcacatcaaattcgctgaatgaaagagattaaatggccaagacaagtgagacaagtctatcgaatttacccatctccatttcctctctcaaaatactattttaatcctatataaatccgatataaagaaaattcacatggatctgatgaaagagacaaattcgaaaccgagagagatggagagatgggcaatggttatagctagctatatcaacaatatacatatcctataaacgggagcgctacgattttggcacagcttgcactcgaatggcgtggcttggcttggcttgaatcgaatcaggaatcaagaatcaggataatgcctaatactagtaggtgtcttgggtcaagattctcttgggaactacagctacaactaactaactaactaactagctaatacatatgatgtacgccaacttattgcgtatgtgcgtacaaatacgaattggaagagcggaaaggaagctacaattgcaattgtggtttgctgttgttttagggttcgagcagctcgaacgctattacaatatatctataaaaaaaatatatcatagtaaacgaggattgcacacacactgagattatgtagaaagtaacttaacgacgaatggaagagaatgatcgaggggacttcggtgggtgggtggttggttgattggttggttggtagttctactcggggacagggaactaatccttaatccgtcacgcccaggtgcaccagctgttgcatggttcgttgcaaataggtgggatccggaaacatattgaactgcgtcttgtgatccacactgttccagatcaccacatcctcgcgtccggtggtcaccgatcgtccgatcgagaaaagcagccgacgatcgaatgcaatcttgaggaagcgcagcacttttcgccccagcgggcagtccggcaagtagcagatccgcggaaatcccacggcgaagaaggcacgacccggatgcggatgctcctccgtctgcagtcccgatgcaatgctgccatgcaaatgaaaaagagtgattatagttgattgctcagtggccacaggcacattcacacttactcgtaaacaatctgtatggtgttctgaccctcgtgtcctggcagattcttgctgattatgctccacgacatgctgccaatgggctgattgccaaccttctcgccgtaaacgatgccgcatacagggcactcgatgaaaaggttctaggggaatgaaatttaaataaactttctctttctaattggcatcgctttcgcgtgctcaccttgttcatttcgttttgctgggcaattatcatcccattgaggcactgcaaatgcatgagatgctggcagcgactcagcgaaatggccggattctgggcggagtgcaccagctcctccatgcacatgggacagggctgggcattgggccacagcggtggctccaccaccttgacaaaacgcgatatcatatcgctggccgggtccacgcccacaatcgaaccggcgattgattgctgctgctgctgctgcgcctgttgctgctgttgcatctgcagctgctgttgctgttgttgctgctgctgttgctgtcgcggatgcagtggtaatggcggcggcaccggcgccctttcgcccagcgacgatggcggcagcgagggcacaaaaacttcatcgctgccaagcgagcagtccagcagatcattgaccgaaatggcaaagttcctgctgcgcaggctctccttgctctcgtggctgaggtaagtggacacagtgtccacactgggtctccgccgatgcgatttcacactgttcgtgtccgtgtccgaggtccgcgtacgcgatctcgagcgatgcgagcccatccggctgctcctttgcgactgcagcgatccctccgagcagcgactatgatgactgttcatcgaggcagtcagcatgttcttggcgtgcgaaaagtgcgcatgcgacagatggttggcatggtgcagcgaggccgatgaggaggatgaactggcactggccgccgtcgacatgttcgattggtgcttagtgctgctgctgaagatgtttaggttgttgagtatctggcgtagattggtggtggagatctcgctgtgcttcttgggcggcttcctgggcgccgtctgatgatggatttgatggtgctgcatctgatgttgctgctgttgctgatgctgttgttgctgatgctggtgatgatgttgctgctgctgctgctgttgatgctggtgctgatgctgctgctgctgcacttgatggctggtgggcaatgggtgctgttgcctggtcatgggcactctgtgcaggctcttggtgtctcccagtttgggtagagtgttgtactggctgctcacgctggcggaattcgacttgagttggttggcctgttgtggcgttagtttcaccaagggatacggcgcctgttgggtacgccgaatgctgcgcatgggtccgctgggttggcgcagctgggtgagattgcaaaagttaatggtgtacggcaggccgatgtgggtgttgcacaggtccaaggtttgttcgccctgcaagggagtaggaataagttatgttacaatctataattgatgatattgattgattgatatgcggttgcagttggactttgtgcaagaagaagaataaatttatatagcccctaaaatttgatcataataccataactcagccaaaactccagcgatttaagtgcgaatgattttaatagtcattatttttaaagcagaaagtttctgtattcaaacttttacaaaagtgaaaattaaattttttttcaatttttttgtcccattttgaggttgcaaaaatggaaatttttgaaaaaaaaattaatttgattttagctaaaaaatttaaatgcagatttatttgtctaagcatcagaaattcaaaaaggtacacttcttcgatctactacgttttttggctgagatgtgaactgtggaatttggcttatatgtactatttaaacacctatggacacatcacagactggtgcatccttagccaattcttcaggatcagtggtaaacccacactcttttaagattccccatatattctcccgataaaaaaattcctgagcaactcaaaattccaactagactgccaatgggaaaacattcgattctgcacggcactcaccctcgcccaggcgtcctcgatgatgcactggacgtgcatgttgtagggccgccagtcgttgttgctatcggcactgccgcccgaccactcccacttggtgcccttgcccgccggcgagctgggtgcgtagaacatgcgccgaacaccgatggtcagcaggccggagccggccgtttccgcctccgattcctgggtcattgtgcgcacgttgacgtagtactgctccaggctgggatccgcatcgctcagcatgacgcgcgtcagtttcttggcgtgggcgcgttccaagtgctgcgacaccgccggcgaatagggcagccacttgccgcgcgactcgaactcccacacgcagacggcgtgggcgtggttcacgggcggcccaccggatccggcggtggacagggccatggtggcacaactggaggcggcgctacctccgccaccgggaacaacggatccggatgccgcacttccggcgctgctggccattgcttgcagttgatccgttatccgtggagtgagcccattgccatatccatgcccatttccatatccaactcctcctgcgctctcttcactagctctcactcactcactctctctctctcgctctctcttgctgttgctgtcgcgctatctcgctcgctcgcgaagatgggcacaaaataaacaaagaaattaaaaatggtggacccgctgccagcgttagttatccctgattttccctggcttccattttcccgaagttttcgttctggttctttagtcactcggtttcgtttaggcgcagcttaagaattcacgtttgatggtaaaaacagtttttctagcatttagcgcaagcgcaggcgagaaatttttattgttggacagcgatttaatgagagacaacagcggaaaatggctaaataaggccggatgaaaataccgcactgcatctgcagccaccagttggattcggtagtttcagggttggcataactggttgctagctagatctagctaaatgtttaatattttttattttcttttcttgcacttgaatataaacagatactatttttagcttgttaattaatcaattaatatatgtgtaattgaattctatattgaaatgaaaaaaataagaacttgcaatgattttacttgatattaatttcaatattttttatttactttggcaagtttaagctacttttcttaagcaacgcgacctccaacactggctgcttccaaagtttctttctatttagtatttcttttcaagattttcggtaatacaaatcggtcacttttaagaaattcataatttgagcatgtctttgctgtaacgatcacatttgtggtgtatgtcctagataggatggaatgttagatatattatttttatttaaacgaaaggtattctgaccacgatttgattcgttttcaagcgctggcctattaaaaaagaagttacgcttaaataacattgttttttaacttatctgatgtaccttaaaatttttaaaacataaatggagcgagtctctgctaagaataagcatagcctctcacctcggtatatcgcttcttttggcgtttcggtgcaaatgtggcacggtcagatcgaatctactcgatttccaacattggaactgccacttcctttctttttcgttccacgtttccggtgagtgcatgtgcctagcgagcagtcctgaattttgtgctaaaaaccaatattttatttactttcagcgagtatttcgatacgttcgtggtcgtgcttatcacaggtaaagctcacaattccagaaattcacccaaaaactacgcggccggcgaaaatgtgtgcaaaaccaaattttttgtataattttttttc

SEQ ID NO: 7646 - DNA, 3799 bp, DROSOPHILA
aacaataaaaatttctcgcctgcgcttgcgctaaatgctagaaaaactgtttttaccatcaaacgtgaattcttaagctgcgcctaaacgaaaccgagtgactaaagaaccagaacgaaaacttcgggaaaatggaagccagggaaaatcagggataactaacgctggcagcgggtccaccatttttaatttctttgtttattttgtgcccatcttcgcgagcgagcgagatagcgcgacagcaacagcaagagagagcgagagagagagagtgagtgagtgagagctagtgaagagagcgcaggaggagttggatatggaaatgggcatggatatggcaatgggctcactccacggataacggatcaactgcaagcaatggccagcagcgccggaagtgcggcatccggatccgttgttcccggtggcggaggtagcgccgcctccagttgtgccaccatggccctgtccaccgccggatccggtgggccgcccgtgaaccacgcccacgccgtctgcgtgtgggagttcgagtcgcgcggcaagtggctgccctattcgccggcggtgtcgcagcacttggaacgcgcccacgccaagaaactgacgcgcgtcatgctgagcgatgcggatcccagcctggagcagtactacgtcaacgtgcgcacaatgacccaggaatcggaggcggaaacggccggctccggcctgctgaccatcggtgttcggcgcatgttctacgcacccagctcgccggcgggcaagggcaccaagtgggagtggtcgggcggcagtgccgatagcaacaacgactggcggccctacaacatgcacgtccagtgcatcatcgaggacgcctgggcgaggggcgaacaaaccttggacctgtgcaacacccacatcggcctgccgtacaccattaacttttgcaatctcacccagctgcgccaacccagcggacccatgcgcagcattcggcgtacccaacaggcgccgtatcccttggtgaaactaacgccacaacaggccaaccaactcaagtcgaattccgccagcgtgagcagccagtacaacactctacccaaactgggagacaccaagagcctgcacagagtgcccatgaccaggcaacagcacccattgcccaccagccatcaagtgcagcagcagcagcatcagcaccagcatcaacagcagcagcagcagcaacatcatcaccagcatcagcaacaacagcatcagcaacagcagcaacatcagatgcagcaccatcaaatccatcatcagacggcgcccaggaagccgcccaagaagcacagcgagatctccaccaccaatctacgccagatactcaacaacctaaacatcttcagcagcagcactaagcaccaatcgaacatgtcgacggcggccagtgccagttcatcctcctcatcggcctcgctgcaccatgccaaccatctgtcgcatgcgcacttttcgcacgccaagaacatgctgactgcctcgatgaacagtcatcatagtcgctgctcggagggatcgctgcagtcgcaaaggagcagccggatgggctcgcatcgctcgagatcgcgtacgcggacctcggacacggacacgaacagtgtgaaatcgcatcggcggagacccagtgtggacactgtgtccacttacctcagccacgagagcaaggagagcctgcgcagcaggaactttgccatttcggtcaatgatctgctggactgctcgcttggcagcgatgaagtttttgtgccctcgctgccgccatcgtcgctgggcgaaagggcgccggtgccgccgccattaccactgcatccgcgacagcaacagcagcagcaacaacagcaacagcagctgcagatgcaacagcagcaacaggcgcagcagcagcagcagcaatcaatcgccggttcgattgtgggcgtggacccggccagcgatatgatatcgcgttttgtcaaggtggtggagccaccgctgtggcccaatgcccagccctgtcccatgtgcatggaggagctggtgcactccgcccagaatccggccatttcgctgagtcgctgccagcatctcatgcatttgcagtgcctcaatgggatgataattgcccagcaaaacgaaatgaacaagaaccttttcatcgagtgccctgtatgcggcatcgtttacggcgagaaggttggcaatcagcccattggcagcatgtcgtggagcataatcagcaagaatctgccaggacacgagggtcagaacaccatacagattgtttacgacattgcatcgggactgcagacggaggagcatccgcatccgggtcgtgccttcttcgccgtgggatttccgcggatctgctacttgccggactgcccgctggggcgaaaagtgctgcgcttcctcaagattgcattcgatcgtcggctgcttttctcgatcggacgatcggtgaccaccggacgcgaggatgtggtgatctggaacagtgtggatcacaagacgcagttcaatatgtttccggatcccacctatttgcaacgaaccatgcaacagctggtgcacctgggcgtgacggattaaggattagttccctgtccccgagtagaactaccaaccaaccaatcaaccaaccacccacccaccgaagtcccctcgatcattctcttccattcgtcgttaagttactttctacataatctcagtgtgtgtgcaatcctcgtttactatgatatattttttttatagatatattgtaatagcgttcgagctgctcgaaccctaaaacaacagcaaaccacaattgcaattgtagcttcctttccgctcttccaattcgtatttgtacgcacatacgcaataagttggcgtacatcatatgtattagctagttagttagttagttagttgtagctgtagttcccaagagaatcttgacccaagacacctactagtattaggcattatcctgattcttgattcctgattcgattcaagccaagccaagccacgccattcgagtgcaagctgtgccaaaatcgtagcgctcccgtttataggatatgtatattgttgatatagctagctataaccattgcccatctctccatctctctcggtttcgaatttgtctctttcatcagatccatgtgaattttctttatatcggatttatataggattaaaatagtattttgagagaggaaatggagatgggtaaattcgatagacttgtctcacttgtcttggccatttaatctctttcattcagcgaatttgatgtgattttaatttgaattattcattattaaacggagcatttaggaagcatagttgtaacgcagccagatattccattacgcatatacatatacatatacatatacatacatacataaacatattttaacatagccccatagccatacgacataacaataattttttttatcgaatcccttgcatacatttgatgaattgttgctttcatattgatatcatcgagcatcgaacgaactatcgtatacatcgccaatatatagcatatatagcatatagtatgtagagatcgtacggacagctagcggctactgaccgcgccaccatatttgatatatgatatgatatgattttactaagttgtatttagcactgattagttattaaagttcattgcgaatattccacaacaaattccacaccatttatgtatgcatattacgcatatataatacagtacatttatatatagttcaaataaagtaactttcattcatgttcaaattaa

SEQ ID NO: 7647 - protein, 738 aa, DROSOPHILA
MASSAGSAASGSVVPGGGGSAASSCATMALSTAGSGGPPVNHAHAVCVWEFESRGKWLPYSPAVSQHLERAHAKKLTRVMLSDADPSLEQYYVNVRTMTQESEAETAGSGLLTIGVRRMFYAPSSPAGKGTKWEWSGGSADSNNDWRPYNMHVQCIIEDAWARGEQTLDLCNTHIGLPYTINFCNLTQLRQPSGPMRSIRRTQQAPYPLVKLTPQQANQLKSNSASVSSQYNTLPKLGDTKSLHRVPMTRQQHPLPTSHQVQQQQHQHQHQQQQQQQHHHQHQQQQHQQQQQHQMQHHQIHHQTAPRKPPKKHSEISTTNLRQILNNLNIFSSSTKHQSNMSTAASASSSSSSASLHHANHLSHAHFSHAKNMLTASMNSHHSRCSEGSLQSQRSSRMGSHRSRSRTRTSDTDTNSVKSHRRRPSVDTVSTYLSHESKESLRSRNFAISVNDLLDCSLGSDEVFVPSLPPSSLGERAPVPPPLPLHPRQQQQQQQQQQQLQMQQQQQAQQQQQQSIAGSIVGVDPASDMISRFVKVVEPPLWPNAQPCPMCMEELVHSAQNPAISLSRCQHLMHLQCLNGMIIAQQNEMNKNLFIECPVCGIVYGEKVGNQPIGSMSWSIISKNLPGHEGQNTIQIVYDIASGLQTEEHPHPGRAFFAVGFPRICYLPDCPLGRKVLRFLKIAFDRRLLFSIGRSVTTGREDVVIWNSVDHKTQFNMFPDPTYLQRTMQQLVHLGVTD

SEQ ID NO: 7648 - DNA, 2886 bp, DROSOPHILA
aggccaggatatcgtaatatatgttcccctcccgacatagttcctttggcactgttggggctttttgggcaggaagaatctttggcaaatggtccagaaaatcctccagcagccaatcgtcctgtaacttgagattagccgatgtgtacagcttgtactccaagctttcctggacgtagagctggaaaccatgaagagctgggtggtgtggcagatagagtttaaggcggcgccatgtatccttaattatacaatcattattagtttggcgggaaaaattgaaatacggataacttacctcactgcccaaaactcctctgatgatgcacgctccacttggctgaagctccgctgccagaccaggatacttttgacacagaaggcgctctacatcttcgttactttccattatatttgattttggtcagattgtgcttgaatgacttttgtttacattttatgttttgaacggccatagttagagatgtgcagtcttcgatgacacaaagtcttcaatcacgatcgataggaaattaatcggccgcttttttaaatttgattgctcgatcaaaccttaaattatatgtttattaacccttcgagccaatattccgccttgcttacatattcaccctctggctgttttgtttactaggtatagccggcaacattgtagttcagcctctccctacttatcagccaaatttacgttatttactgattcgaatcggcattgtttgctcttcgtcagagcgcaacacctgcaggccacagtggttttcttttgtaacacctgcgtggcggccccgtatcaatggcaatagccaccgattttgataaactgctctctacaggcgttggtcatcgttcgaacacggggctatttaaggttctccaccagccccatcgattccactcacgattgtcatctgcgtgcgcgcgtactcaatgtatattgtattcttctgaagtaagattaaaaaagattccatccagaaaaatgctgcgaatcgttgtaactttggctctaattctggccacagtcaatgccaccaatgtccagcagtgtaagtagctaaaaactcttttattttgttggaaaaacatcaaatcattttaaatcgaccagtttgttagattggattcatgattctaacagatttctatgacgatgattcacttcgcagactttgtctcgaaaactattgccaaaaatacgttctgagagaaatttaaagtcctaacgtgtatctgttggccaggttgatatggcttatcaacaaacagctaatctcttagaaaaaaaaacatagccttcttttgagctcaccttttgattcttcgaaaacatatttccgctttcaggcaaaaataagccgtttccactggatgtgaatattaaggattgcgaggaaccgccgtgcgttgtgtacaaaggaaccatagcagtcatggaggtgcacttcctgggcagtaagtttcggccatctatatccgtgtccacttgaatctcatcatcgatgtcttgcagataacaacaatatcaagagcattacggccaccacaacggcaaaggttttgggcatgaatctgccatatgccctacccgacgaagtgtccgatgtgtgccgcaatctcctgtacggtgccatctgtcccatcgacaaggacgaggatgtcacgtatcagttcaacttctatgtggagccttcgttcccggaaataacggcggatgtcactgtcacgttgaacgatgcgcagaacgaaccgatcacctgcttcgtcgtgagctgtaaaatccggaagggagccactgcagcacagatggacggatatctgttggactggacgaaccccctttaagccgacgatgtacgcaactccagccgtttcggccgactgaatatttccacttgtttgccaaataataaaccacaaaactcttgcacagataagaccatttgtttaccttggctacgtcacgaattccagtgtactcagtgcacaatcaggctgaagattaacacatttctgggcaccgccgattagatattcaagcgtatttatttatatacagtcatttgtgacgttcctttttgcaccgaaagtctattaatttatttccactgattcagtggcacaattggctaataaaatcgtcgtgataatcatttattggccgccgtagatcgcattgaccatatggtcaaaagttgggctctcctgtgtgataaggcgataaacgtcttgctgggtgcaacagtacactcggagaaaatctgccttaaaaatgtctaactagtgatagtgattaccaccagattaaatcataatgagaagtgtttccaaagaagcctatcatttgcaaacatgatttatgggattactttcgaagatatacataaatcattgtattaaatttcagtgaactatagaacaacttatgaaagttattttccagatgctagattaaatagaattttagttaaaaaaaagatgccttcctatttctgttaaacatcaaagataaagaaaattttaaaaagattttaaaagattttctgttatttctaaaatttcattttcagttttcaaactttataaaccttttaaaaggtgagtcaattgtttacagtgtctacatacgttgaaaataaatctgatagtatagttaggttgccgggttttgaaaaatggtcattgataaccgagtacatttccctccatctccttgtgattggacatgaccaggtgtcctaggttaatcaggcgtaagatttgcgaattaacatttgattcgattatagcttttcgcccactcaagtgttacaccttgatggcagcgtgtgcagatagcgccattgtaaaatgagtctttgaaatgcc

SEQ ID NO: 7649 - DNA, 588 bp, DROSOPHILA
atgctgcgaatcgttgtaactttggctctaattctggccacagtcaatgccaccaatgtccagcagtgcaaaaataagccgtttccactggatgtgaatattaaggattgcgaggaaccgccgtgcgttgtgtacaaaggaaccatagcagtcatggaggtgcacttcctgggcagtaagtttcggccatctatatccgtgtccacttgaatctcatcatcgatgtcttgcagataacaacaatatcaagagcattacggccaccacaacggcaaaggttttgggcatgaatctgccatatgccctacccgacgaagtgtccgatgtgtgccgcaatctcctgtacggtgccatctgtcccatcgacaaggacgaggatgtcacgtatcagttcaacttctatgtggagccttcgttcccggaaataacggcggatgtcactgtcacgttgaacgatgcgcagaacgaaccgatcacctgcttcgtcgtgagctgtaaaatccggaagggagccactgcagcacagatggacggatatctgttggactggacgaaccccctttaagccgacgatgtacgcaactccag

SEQ ID NO: 7650 - protein, 69 aa, DROSOPHILA
MLRIVVTLALILATVNATNVQQCKNKPFPLDVNIKDCEEPPCVVYKGTIAVMEVHFLGSKFRPSISVST

SEQ ID NO: 7651 - DNA, 13827 bp, DROSOPHILA
aacatgcccgccattcatcctcattcttggctatgtaggcgaggaagtcgagggtgtcattgtcaccgccggacgcgaacgatatgcgcggcatattgtgattggctataacctcgcccgtttccacgttgcttagcgacagagcacggctcgatacattaatgatgatgttggtgccggcgtgctgcatgctgggtcgatccgatatgaagttggttaatctccgcttgccagcagactttaaaccggccgcctcgcaaactcgattgatgcactctctgcaggcaagggcaaacaaacatgacaatactgctgtgactcatggctattgctcacttaccgcgctaactgcgtacgggtctcgaagtccagggatttcattgaggtcttgacctcaacgcatcccgtgtaccgcacgttgaatgcaacacccacgcccattatgacgtcgtccggatagatgcagccgtcgctggttgtcccggaaccgctccggttgccggcatcgccattcttaggcatttgtgcggtggctgtgggcgcttggcagcgatttggcttcttgctggtcctttttccgcagctgtaggctgcaagcctttgttattagtaattcggatattactcaaggtgggaccgtattcgcgaaagtgtggccgcactgcagcgctggaagtgtaaccgcagctagcaggcatatcgatagttgctcagtggtggagctgaaagggggttctaacgagcttatcatttcaataatgcaaaagaagatataaaaatgtaactgaaaatgctagttgcttggattacgttactcaaatttcgatatcttgaaaatattggaactggcactctttaagactcccatccctaaccaatcgattgaccggttagctgcatgccatctctatgtggcaagccaaagcttcgcctggctccaaagaaaacttcacccccaaaaatttgtgctcgccgcaaacgatgttcagttactaaccgactttcgcgcaatatccacacgtcacggctacggccacaaatcatccggttctttactccgattcccaaagcggcgcgtatacatacacaaacaaacaaagcaacaaaccgcggcgaattaccaggtgtgtggaaaatacagaaatacgaaaggctcaccagtttttaacggcgttttttttgttgggttcaatttgagacaaaattcaaaatcaataaagcaagacaaaccccccgccccgccgacgcgtgtgtgagtgagatacatagttacgaccgaatcgcaacgcgcagcatccgtaagcatccgaaaattgcagcggaaaagccggaatagtgcattcgccgtgccactggaaactggaacgcgaatccgtgagatatttcgatttccaagcccaatccccccgaggctgttgtgtttaaccgttccaagcgttgcggtaagtctacttcgtcaagctttctgtttacgtttatgccagtttttcatacccatttccattccgctgcccaccgctttcgtgccgctgccttgtggctcagtgggcacataaataaaacatctttacgtcatgcgacgcgctctgaagtcatgaccaatagacaaagacaccagcggccacgcagaaatagccaacaagcgcctcatttgcatggcatccatgattgtattatagagtagaatttctgttatgtctgcacttcccttaaatgtggcttttttccaaaatctacgttatttaattagcatccacagtgaaacatttactggataaattacttctttaagtaataaattgcactttgaactatttaaataaaataacgtacaatgagaattgggaaggcctcagaaggcctcctttatagaatccttactgtcacccaaatcacccaaattgagtgattcagattcacttgggctgcagggcataacagacgccttttaagcccagttcattaggatggtgatatcatcggcggctgcttttttcccgttctgcgttcgaatgcaaccttaattcacgcccctataccgttcaaacggcagtcgaatcacgcctaatatggtccacatttaagctggctcaaagcgtttcccgccgccaattaaacacgatgacgttgaccgccaaaccgcccgttccattcatggtttaccgcccaatgctggcacccacgcttcggccttgcctttgtttttgcttctgcttgccaactgtttcaactccgctggagtcgattacagcaattgataattgccgcagaggcgttgttttctggtttttaacggccttttgagccgccaattgctggcaccttcgtgttaaaatcgaaaggaattcaagcttgggcaattaaacagctggtcttcaatcgcaagtaaagcaacaaatttgatgcttaacaaaagtattagttttcctacaaatgtccatatgcccaatctaaattctctcatagtcgaattagtttttaatttggcttcaatacataaagaatatctaaatgggttaaaacacacccatttatccaaaattttgaaagttgaaatctggaatcggctgcccactaattatttattttcccacgacccttcacctttcggtctattgttatcattttgttctggtatgtagatataataggcttatagacttactggtttcgaaagacgtcagaagtcgaaagtaaattcgtcatgaaaagagcatttgttttgttgttgtaacctaatgggctattattgcaactgctaatagctctgcaaggctgcatttaaaacatttaggctttaattggttttacctaattggtacctacaatcaaaaatttaaataaagtatttaacatactattccatagaaaaatgaatgttttatttaaacttttgttgtatttttcgtttttgttcgccataaacatataaatacagaaatttatttttatacatattttatgtgcatgaaatttctttaaattaaataaattgcttacagttggatgctaaagcgtgaactgttcattagcataagggcgcaccctgtatttttacaacttctgctgattcactaacagtgcgcgcttaacatattctgttaagttaacagtaacaaagttgatttcacttgttcgttttccatttattactatcgctttttattattgtttaattacgaactaacgtacatattattacacacatacttgggcataaacatgtgcatcactacgagctataacacgttgatttcaaatactaaattcgccactcccccaccgccttacgtatacgtatctcactgccccatcagctgctcaaaatccgttacgtaatactgtgcacggcgatagacctccggccgcacgacattgccaccgaaacctataaagtagttggctggcggtacggcctccagatcggtggctccatcgccgatcatggtgattagggaatcgtcgctattctccttccttatcagggcgatagcctctgcctttccgccggaacgcgaagtgggctggttgatatcaaagctatcgtattcgcccaaataatcgaacagcatcttgttggcatagacgtttttcaggggaatacccaattcattggccacgggcgcaattaggcaatcgaatccgccggagatcaagtaaacctgttttccctccgccttcaaatggctgacgaaacgcttcacgtttttgctcagtgtactgggtcgctcctggatgaaatccctcacttgctgctgtgtcggccgtatgatgttcaagcgaattttgagggcatcctggaaggtcatggcaccgcccatcgcctccttggtaacgcgagccacctcgctccccttgccacaatattcggccagttcgtcgatgccctcctcgcaaatcaccgtggagtccacatcgaaacagacgatctgcgactgctggatgaccttggccgccaactggggctgcttgggcggtgttatggccgaggccacagtggttttcgccgcgccaccggtggtgccattgccattgcaattcagctgtttggtcagcagattatggccatttgtggctgctgcaggacgcgccaaactcaatacggaaccgctcatctcgaccggcgaacacgttgtgttttttggaagcggtttaagttttggcttttcgtttaacgtttggcgtaaaagcttcggctgtgtttggtgcccaaaattttccactgcttctctttttgtgtatctcttatatcttgtgcttttttgttgtgtatgttttctcgtttctttttgcacacgcgcttcgcgttgcgggccagctgtttttgtttgataagtggttacggtttgtgtgtgccagcgggttttccttagtcgaactgctcgcgatgactgatttttcacaagtgactcaaaaacagtcgatcgcccttttaagaaaacccgctcaacgcacacaaaagcggtttctctctttttgtcgttctctcttttcacactgaccacacggaacgaaaaaatgattaccgaccacacggaaagaaaaatttatgtccagacgaaactatttttgtccaactagctgatttgcataacaatttaagccacaagaaactagattaaaattttacatttaaatacattatcaaatcgaaatatcaataattgtaatttattcttacaaaatgtaaacgcagttgctttcttttcagtgtagcgatcgaacgataagcattacaagtgtgcgagtgggagagaaatgcgtttttgttacaaactccaaaccgttttcgtttttcggtcagttcaagaagacttccagaataccctaacttctatggcttatatttttatccgcgaattacgctcaattttcatttaatcagtttcaattgagagagaattgctttgggggaacgtgaacctttgatcacaacatgtgctgcatgaatgcgacaatgtctgcttatcacaaaatatataaacaatagaaacaattatggttgagctgtcattaaactcgcgacactcgactgcttagaagaaccgcctagaaccagattttccagcaggagaccatcgctccttatcttttctggcaccatttcatacttgaagattgccaggagacctggttctgggtccagacatcgaaagactacctcaaaaattatcgacaaacaaataacaagtgtggcatttatgaccccggttctagaaatgttgtctggtaaaatccaaacacgggcgcatgctgcttatcactttgaaaacgaagtgtactttttgcgtctggttgatccccctgttttcaatactttcttttttgcattaatgcttaatcattgatgtggaaaataaccgaaatctcagctgattaacgctggtgtaagccttaggtatttttaaatcggctagacttatatttaaactgttccagtccgacattctgatgcaatttatagctactgttgcagtgtcatacgctttcatgtaaggtgaagtatcttttttctcaattttctctccgaacattcatgatttgacttttgagtctccggtaattagatacaaatcaacaacaaaagcgaggggcgtgcaattgcaagtggcaaaaacaacaatgacggctgtaaatgcaattctctctgcggtttcttgtttttgttatcgttgctatggcacttttttcgcaattgtagaataacaagttgttttgatcgtttgcgatcgttccgttcgtggtaaacagctcaaaaacaacaaaaagtaaactgcggctagaccgcaaaaagtatttcaatgccacgttatcgataacgataaacaattcattgcgtgcaatgcgtgcatgtgcatgtttgaacatgttctcatgcatatttaaagcttacttcggccaacgacttccactaaacaaagccgtaaacagttgactgcttttaattgccgttgcctcgagcgaccaaataaccaaagaaggaaggaaaatccaagggaataacggccccgaccacacctgtacctttacctgagcctgtcagcggctgcggcacctgtcgtttaccgttattttttgttttaccttggcaactcgtcttgggttttgggtgtacctttcggctctgcatttatcgattgaccttgttgctgcataaatttccaaccaagtccgtttccattttgtatatgtatgtacacactttccctggacatacaaactaaatagaggtaggctcgtcacctgatccggaccgcatggcaaagtacccgagctgactaatttattatgcccattgaatggccgacgcggtaatggttctaattcacaaaaaattcgttgagcagtcgaaactcttaatctcaaaccactaaagaccatttaaagtttattaaaagtttgaactattagtttgttggcatttcagaataatgtaacttttttgttgcctactttctaacacatggttttgaatgggcttctcatagatatgaatgttttgtatataaaagataataatactaggatatcgagcatggaaacatactatgtataaaaaaagttcgacttttgaacagtttactgtacttccatacacagcactgcggaatttggcgaggcagttgacagctgttctgtaatggagctctctggccacaccccaaactatttacgcccacttccagaccaaaatgccgggggcttgcataatgacgcgacactttgtgcgattgttattttgtagccgacagctgataggctcggcataatggctattattccagactgaaggcttggcgaaattgctgtattaattttcatcaccaggcagtttaatcgggaaatgactatttatatttgggttgccaattgtctgcacctctcgattgatttgtttttccactgctgtttccatgccgcattgttgtttgtgcgctgtctactgattaactgttaaattgaatatgacgatccccctttcctctctaacactcgacttgtttatggctgcacgcgattttaatgccgctgattaactctctcacgctcttacattcacagcacacctgcatacgtacatgtatgtaagtggaagagaatcaagctcacttgacacatttacaagtggagcaaaaggggagcacaagaactgcagtctccctcttgcactcaccccttaatgcggagcgtggttttctttgttattctggtcctttctttttatgtcctcttgtatttttgttttgcatcgcttgaggttgcttcataaacagttagaaagtgggctgattgtgtatggcaacgtcaacggttgtgcactggaaaaataaacagccaatgcaataacaacaacaatgtagtcccctttgctgggggccatcaacatgtgccacatacagccgaggttgtgcgactaccactcaaaagctgaaatgttatggataagtaatgaaccattttttcgtcatattcaaattgaaatatccagattgttagtaaaatctttaaattgtcataaattctccagcgttaaaacgttttaactctttattggccatacttttttgagctatactgtaagtattgttgatatgcaaaaatgaaatgaaaacacgtcattcgcgccgaccatagcttttctgttgctatcgcactggaaactcgggcatcgctgctagctgcgacgccggcagagagttgtttaactttttcccccctgacaaaatcgtaacaaagggtaaagttttgctgtcccgccccatcaaaggtaattacaattgaaagccctgctctgcgttatcgccgagttcgttgcacttgcgaattaacaaaagcagtggcggcggcatgcaagcgaccaacgttgtgtcctgacaggcacgcctccatcgaaacggaagccatatccctattcctgtcgcaagggattcgccggcgaaacgcaacagtttcgattgtaatccgagtctaatgcgctgatttaggtcaacaggcggagtcggcaacagcagcaaaacaaatgctgcttatgccgagggattgcgcccaaaagtacactcgcagaaaaagtcacaagtaggaaaatatgtatatatcttgcgttccacatatgatagatgttaaatatttttttgaacgaaattcccattgttatgtaacccaagaaaatttctctctgtgtccacgtgtgggcttgcatctgctgaatcattggcgatggcaatagcaacaatgattggcttgattgcatgtgcagcgtttcccacacagcgaaatagacaaagccaaaagccaaagtagggtttaatcgagcggcatcagataatcaaattgtttgcacaccgctttcgcaacgctccattaagttcgcaattctcatttaccaatttcagagcgttttaaccacatacacaagcttagtgccgtacacggggtccaaaagaacaatcggggtgcagcataatggtggaattccgcttcgatattaagccgctgttcgcgcagccaatcatcaaggtgacatccaatctcctgccgaacacctttcgcggcgatcggcgtcagtgtttgtgagtattgaaattgtacgcggagtatgatcttaatggctttgatccgactaaccgttacactttccacactcacccacgtatgcacgacgcagagatgccaccagcaaaatgaccgagatcattgaccagctgggccagctgtcggccacctcgcagggactcagcaaaccggtgacaacggcccagcgcctgaggatgtccgacaatcagaccatctatctgctggcagataatgaggcgggtcacaagtaagtaatgccaagtaggaaatatacctcttgatgatgagaattgccttcaatatgattgcaccttagggaacctaagttatgttattatagttaacgcacgttttgaccttttccagtggcgccgtcttaggtctgttgaaggtgggcaccaagaatctctatttattcgacgaagccggaaagacgcgcatggtggagcagactccatccattctggacttctatgtccacgagtctcgtcagcgtgccggactgggcaagcgtctcttccaaacgatgctcaacgaagagcagtggaccgcacgcaagtgctcggtggatcggccgtcggaaaagctactgtccttccttagcaagcattacggattaaagcgaatcattccgcaagcgaacaatttcgtgctctacgagggattctttaacgatggggaatcggggaatggaggtggtaacggtcatgctaacggcaccccgaatggcctgcacatcacaaacaggtgagcagcggattgggagcacaggaggcgtcgcccatactggcgcagtccgcggtaattaaggcgttgctttcgccgctgcaggaaacatttcactttcgggccccagtgggccatttcttttggccccatttgcatatcgtttggaaatcggactaaagatttgtttctttgtttgtttgtttgtttgcctaaatgaagcccgccgatcgataaaacgcggtcggatttgattgataacattgcttaaatggtggcctgttgcttgctttgcttcttaaattctctgtataccatttaaatatagaaaattactaacagaaaagaattcataatgtaaatcttatagcttaggttttcattatgatatggttataccaagctgcttcattgatatatatagtatatacagagataataatctaggccattccttattctaaatgactaatgatgcttaactctttctccacatgaaacgctaactgttaaccaatgataaccaacgataacatcacatcgacaacagtcctaacacacacctctttggcgctacttacctgggcgaggattctaaccagcgacgtggttcgcagcagcagacaacaccgaatgcacgactgcagcagataacacagatctctccgtccggacgatatggggctaaacgtcccacctgcagcatggccgaggtactgagagatgctcctcaagcgtaaggatagccatgagggttatatttcgatattgttggcttatatcattccgttgaaagctaaatataattatttgttaatataataatctagagttagggaaatcaagggaattgccagttaattggttaattgggtgacccatttttttgttgctagaaatcaaaaagcattcggatggaaaaacataatcctagttggccaagctctccaactttcaatctgtcagagtcaagatccccaagcgactgtggatttagctcagtttaaatttatacatcccagcggtcggatagctctttcgacttccttcctgtatacaaaaatatatttgtattttgtacacttttttttttgtaactgaaaaaaaatcatcaactactttcctcgcgatttgtgctgaatttttcgtgcggcttgctaattttcagtgatttaatttatggatgccaaacgtggtaatgccaccggggcacgccaagtcggtggtggtggtggtggtggctatcatgcctccaagacgagcgttgctgtaagttggtcgactaactaacactcctcgagatgatgactgaataacttggtttacagtcacgccatgccgctggtggtggagtagcaccggcagtgggtcgcaagcaggtcagtcaggtcagcctgacgcccagccagtcaaggaataccaatgccaccgaaaatgtaagatgctgctttccgcattcggaatcattaacccaaacgataaatcacagccactcaagagtccattggacgctttaagccgcagcggccccgtacgcaatcagaatcccttccagcgtcgctctggcttgcaggatgtcgatgaggcttttctggcatccaacatttttgctcgaccgtcccgtgtccgccattctggacttgatcgggagatcatgccacaggccgcagtaggaggagcagtagctggtggacagcaagcatcgcctcccattcccacccagcagcagcatcatcaacagcagcagcagcagcagtatcagcagatacccccagtggatgccgtgccacagcagcagatggctccgccggcagtggtgccacagcagcagcaaatgcaacagcagtacgtgcaacagccggctgccggtcagccgacacgcatggatccaccaccttcgggacgagctcatgtccatcaacagcaagtaccacatcagcagcagcagatgcagcatcagcaacaaatgccaccgcaaactggctacgagcagcagcagcagcaagtgattcaaccagatgcacaaatgcagaataaatatgcaaaccagcagcagcagcagcatcagttgcagccgcaacatcagtctcctctgaatggatatgtaaatattactacgttcatagacaattttcgaagaggttaaccaactacacacacctgacccacagccctctcagccgccgaatgcggttgctccgcaggcaactatgccaaccaccggaggaggagcagcaccagctccaggagcaactggcggcagtaatgcacccagagaaaacgctggtggctctgctgcaccggcggaagccgagatgtgcaccacatgccccaactgccagaccacgatctatttagtacggtccccggaacttggacacggcgatgccggtttacctgtccagtaaatgattaaatctccgccgagtgaaatgcaccaaattctaagtgcatacttctgttgtttcatcatgttttgttttaatgtatcgacattttctgaaggaatcgcaacttcaaagaagctccttttaaactggaccgtaatataatattgggacgaatgtgtgtaaattgaacaattcccaataaaacaaattagagagttgtaatttagccggttaaatagagtgggtggtcaaatggggtggttatatcagcaccaaaatcttaggggttgatattttggctgcgtgccaagtggtttttttttttgtttggggtaacaaaaagtatattatatatagtatacatattaagttgtagagctggcaagtaatagagaaactcgttgaattttaggtcccacgaatgggctattaatataagttaataggccgatcttatctgaaattattttcacctcgaatttgacccaataaatttctctatttccagataattcatgccggcaactcgaagggcggaaatggcaatggcagtgcagaagcgaacaggtaaaagcgcttaattatttaattaattaatatcaatttccctggcattatcattttgtgtgtttggtcttcatttgggtttcattttgttctttttcgtttgtctttcagaatcaaatagacaaagccagtccacaaaaattgcacacggctgcttcacataaaagaatataaatagaaatcgacactagataaactgatatatcaactaaataaccattgtacaaagctttgattttagccaattatttatattttcgcctagttaatttataaacaaccgatgaatttacttaatgtacaagtacaaacagaagaagctgcacttgccgcatgccaccacccaccaccaaccacccacattgcaacacaagaaataaagaaaaatatgaagagtatcagcccactaaatcggatccgttacacaagacacacgaaaatacctgacaaattgtgattacaacatatataacttatcatttaacatttaactacatacttgttggtcgtaacttatttcgttttttctcgagcaataaaatcaattgaattcaatgaattcaggtgtttctcagtgctgttattatattgtagttgttaagtaaagactagttttaaccgctttgaaaactcttccaacagtggcaatggtaatcacgatattccagagattgccgagcaactgcagcgccagagcctggccgacttggaagccaacagctatgagccggagccagaagttgaaccggagccagagcctgagccggaacccgaacccgaaccggaggtgattacgccaccatcaccgccgccaaagagccacactccgactccaccatccgtgcgatcgcccgaggtggccgagagcattgtgggcgacaaccggagagctccggctttccagctgagcaagcagcacacgggcatgaagaatcgctcgtttggcgtcggaatggccgtgatgcccagcagcaagatggagttcgatcagatggagcgcgaagatttcggcgtagtgaagatcaaccgtccgccgggtcatgaagtcacctcgccgggccaggacaatacggatgccatgtccaccgtgtcctccggcggcggcggcctcaccgatcagggctactacgatctaaagttctatcacaataagttgtggtgaagtcgaagtcacaaaccagaaggcacgcaatatttgctaacatcttttgtacgtgtggcataagcataattaaacaaaaatctaatctagtctgtaagattgtattgtctaatcaaaataacacaccaaacggttcctgtacttcagttcgatgatttcgttgtgagcttcttctccgacttttgttgatttgttcatttgttacaagccacgcacaccgaagagcatccgtaaactaaactagagcctcacaattaaacgttaacaatagcaaattgaaatatacgtagattaattgccgccggtactgagctagataattttacaacacatactcgtctttggttgaaaagatcctttattaataatttcgctttgtactgtgaatttgcaatagcccttaatgtt

SEQ ID NO: 7652 - DNA, 1837 bp, DROSOPHILA
ctttcgcgcaatatccacacgtcacggctacggccacaaatcatccggttctttactccgattcccaaagcggcgcgtatacatacacaaacaaacaaagcaacaaaccgcggcgaattaccaggtgtgtggaaaatacagaaatacgaaaggctcaccagtttttaacggcgttttttttgttgggttcaatttgagacaaaattcaaaatcaataaagcaagacaaaccccccgccccgccgacgcgtgtgtgagtgagatacatagttacgaccgaatcgcaacgcgcagcatccgtaagcatccgaaaattgcagcggaaaagccggaatagtgcattcgccgtgccactggaaactggaacgcgaatccgtgagatatttcgatttccaagcccaatccccccgaggctgttgtgtttaaccgttccaagcgttgcgagcgttttaaccacatacacaagcttagtgccgtacacggggtccaaaagaacaatcggggtgcagcataatggtggaattccgcttcgatattaagccgctgttcgcgcagccaatcatcaaggtgacatccaatctcctgccgaacacctttcgcggcgatcggcgtcagtgtttagatgccaccagcaaaatgaccgagatcattgaccagctgggccagctgtcggccacctcgcagggactcagcaaaccggtgacaacggcccagcgcctgaggatgtccgacaatcagaccatctatctgctggcagataatgaggcgggtcacaatggcgccgtcttaggtctgttgaaggtgggcaccaagaatctctatttattcgacgaagccggaaagacgcgcatggtggagcagactccatccattctggacttctatgtccacgagtctcgtcagcgtgccggactgggcaagcgtctcttccaaacgatgctcaacgaagagcagtggaccgcacgcaagtgctcggtggatcggccgtcggaaaagctactgtccttccttagcaagcattacggattaaagcgaatcattccgcaagcgaacaatttcgtgctctacgagggattctttaacgatggggaatcggggaatggaggtggtaacggtcatgctaacggcaccccgaatggcctgcacatcacaaacagtcctaacacacacctctttggcgctacttacctgggcgaggattctaaccagcgacgtggttcgcagcagcagacaacaccgaatgcacgactgcagcagataacacagatctctccgtccggacgatatggggctaaacgtcccacctgcagcatggccgagataattcatgccggcaactcgaagggcggaaatggcaatggcagtgcagaagcgaacagaatcaaatagacaaagccagtccacaaaaattgcacacggctgcttcacataaaagaatataaatagaaatcgacactagataaactgatatatcaactaaataaccattgtacaaagctttgattttagccaattatttatattttcgcctagttaatttataaacaaccgatgaatttacttaatgtacaagtacaaacagaagaagctgcacttgccgcatgccaccacccaccaccaaccacccacattgcaacacaagaaataaagaaaaatatgaagagtatcagcccactaaatcggatccgttacacaagacacacgaaaatacctgacaaattgtgattacaacatatataacttatcatttaacatttaactacatacttgttggtcgtaacttatttcgttttttctcgagcaataaaatcaattgaattcaatgaattcaggtgttt

SEQ ID NO: 7653 - protein, 291 aa, DROSOPHILA
MVEFRFDIKPLFAQPIIKVTSNLLPNTFRGDRRQCLDATSKMTEIIDQLGQLSATSQGLSKPVTTAQRLRMSDNQTIYLLADNEAGHNGAVLGLLKVGTKNLYLFDEAGKTRMVEQTPSILDFYVHESRQRAGLGKRLFQTMLNEEQWTARKCSVDRPSEKLLSFLSKHYGLKRIIPQANNFVLYEGFFNDGESGNGGGNGHANGTPNGLHITNSPNTHLFGATYLGEDSNQRRGSQQQTTPNARLQQITQISPSGRYGAKRPTCSMAEIIHAGNSKGGNGNGSAEANRIK

SEQ ID NO: 7654 - DNA, 2840 bp, DROSOPHILA
atcaggaaatattgatgaaatttgggcaacccttgacggtagctgctgttttcgccctcaacgagtcaagtgggtgtaagaaattgtgtaaaacttgctacaaattggctatgcatataaattgatgttaatgccgatcgtcggagggttgctctatatatacacatgtacataaatacatatacatatatagagcatatagtccgatggcctgaaagtatgcaacgagtggatagtgtcgcaatctggtaatctggtaatctcggttgccgtatttctttcaataaatactcgataatcgctttctaattttattgcttccattggtctgcgtacaaatgaactcaaaatcgccaagaacacaacaggtgtgcgttcttgctggccatcttatctgggccaaaattagtagaccgtgcacctaaataagttcaaatgtactgactgacgaaatatggctgccaactatagctcctttgaacgcatacatatgagtcatatagggttttggggaacctgaaaggcaatcatgttggctcttggacgagattagcaccgtttcaatcttggccactcgaattgattcattagaatattttaatctaactaaaatagatttcaccactgttgattcccttaaggtgttttgctggcatcgatactgatccaaaaattcataagaaatcttttagaatgggtttcttccatttaattttcatgtaccatgtttttcattcaactcataaattatgcaccaaatagttaggtagacttgtttctaggattcctctaagtgcgattaatacgccatataatcacaaaaatcaaacgtaattttggtgcaaacgttcaaagcccaaaaacgattagattaatggcaagtgcaggagtaccagcttgataacttttggtataaatactgctgcgattggttaatacggaatacaataccattagaacttgcaaagcaaacaaaccagctaccaaaaccccgagaaaaatgtccagcttcaagaagttatccctgtgcctagtgctttctatcatgtggacctcggttgcagacagcacgccaattagacaatgtgagtccagttaaagaaaccacttaatatcattaactaatttctggtaaataaatattccaggtgccgacagcaactatcctcagccactgatggtgcaaatcgacgattgtgacgcattgccctgcgatttgtggaagggaaccgaggccaaaatcgacatccaatttgttgccagtaagtaaaatgccatggtgcatagttcagatctataaatcggaatattattttgatactattttaatttctactacaatattttaataatatttttgttctcccttccattagctcgcaataccatgaagaagctatcagccgaagtgcatctgacctcgctgggagtgaccataccctatgacctagaagcctcccgtggcaatgtgtgcagcaatctgctccatggcgcctactgtcccctggatgctggcgaggatgtgacctaccagctgctcctgccagtcaccaccaaccagccggaggtgcccacgcgcctagaagttcgtctgctggactccgatgacgagaatcgagtggtgtcctgtttcctggccgacactcgggtcaagaagcccagatcggcagtttagatgaagatgacttatagattaggccgcaagacattgtatcaatgtttttggcactggacatcgagtgatgccaattaataccgcataagcagttggcacttaagcccgacaaacactattagcagttatgaataaataattaggggaaaatattataaataatcgaaatgaacggctaagataattacccgggcacatttgggcgtgcggatgtgtagatgtgtgggagcttcgacttgtgggacagactacgacgtcggattagccgggcgcggctcaccacccttgagggcgccatgaatcggcttaattaaatgacgcagaaaattacgcagctccggtgtgggaagatcctaagggtgggtggattgttggtggtggcgggggtggcaggtggtcggagtgggagtggctgcggtttcgaaggctccattcacaagactttaaattttccagaactccagttagcctccatttacacgcacagcccctatggcttccttccggcgctcaaagctaattggcttttcaacactttggagcttcctgccgctgatggcgtctaatgaacaagccctgatgggagcacatatccgacggttagctaattgagacgttgactaggtggtgacatatggctgagaactgcaaatttgtggccaaacactggatctaaggtcaggtagtgccttaaacatcatttaactgatctacattgattcaattcaactgctggactttccggttgaggtactggagatggtcttgaccaatttggacatacgcagtcatcaaatgataagcgatatgtccgaaaaattgaaacagattaataatgcgccggtacaggaggtatgaggatgacaatcgggaacgtcctaaggttcactctgcagatcctgcgcttaacatgcacttatttcgatgacgagtattctgagtcggactttgctctctgcctgctggtttacttcgattataaacatttccagtatgatctcaaagatactctgagctattgaggagttgaggaggggaatgcaaccatccaagtaacttggaagtccaacctacaatacacctacaatattcaaccaaacacggtagctaaatccgctcctcggattttgcttaaatttatagtggatggtccaccgttattaat

SEQ ID NO: 7655 - DNA, 663 bp, DROSOPHILA
atgtccagcttcaagaagttatccctgtgcctagtgctttctatcatgtggacctcggttgcagacagcacgccaattagacaatgtgccgacagcaactatcctcagccactgatggtgcaaatcgacgattgtgacgcattgccctgcgatttgtggaagggaaccgaggccaaaatcgacatccaatttgttgccactcgcaataccatgaagaagctatcagccgaagtgcatctgacctcgctgggagtgaccataccctatgacctagaagcctcccgtggcaatgtgtgcagcaatctgctccatggcgcctactgtcccctggatgctggcgaggatgtgacctaccagctgctcctgccagtcaccaccaaccagccggaggtgcccacgcgcctagaagttcgtctgctggactccgatgacgagaatcgagtggtgtcctgtttcctggccgacactcgggtcaagaagcccagatcggcagtttagatgaagatgacttatagattaggccgcaagacattgtatcaatgtttttggcactggacatcgagtgatgccaattaataccgcataagcagttggcacttaagcccgacaaacactattagcagttatgaataaataattaggggaaaatattataaataatcg

SEQ ID NO: 7656 - protein, 165 aa, DROSOPHILA
MSSFKKLSLCLVLSIMWTSVADSTPIRQCADSNYPQPLMVQIDDCDALPCDLWKGTEAKIDIQFVATRNTMKKLSAEVHLTSLGVTIPYDLEASRGNVCSNLLHGAYCPLDAGEDVTYQLLLPVTTNQPEVPTRLEVRLLDSDDENRVVSCFLADTRVKKPRSAV

SEQ ID NO: 7657 - DNA, 21737 bp, DROSOPHILA
cttgaccaaaaacaaagtggccaaggtggcttgcttcgctgagtgggtggatggtgcagcagggcgcagatttgccgacactttttactacgcgactttcgaactggagaaagcggcgcgactcgacgcgagaaaacgagaagcgcgaacggagagacgagacgagagatttatttggctgcgcggcttcgtctcttcggctttttggcgctcacaattattgcaccaccacaggcactcgctcacgtacatacattatacatatacacagatatctgtattggattttttttccaaagtttggattttgatgatatcctgcggggtatacagcgattttcgaactggctttgaaacttgaaactaaactttatggccagccaaaagcactttaagccttttaagtgtgaaaattaatattgcactttgagttggtactggttttcccttatgtgttttatcggtttagcggattgcattgggcagaatagaattttcgtttggacgcgatttctgctcggaacgcatccacactcgccagattctcgccacgaactgagtgcgctctgtggggccagatagctgctcttggggcacgattccttgatacctcgccattcgaacttgcttcctctcaattcgaatttggccaaaaccgttggggttgctttgagccagtgatgccagatgggttcgttaccctctgttaaccgcttccacaacaacgctagcggttcagaatgttggcagtttgcagagctatcgatataaaggtcaaagtgcaaccgttctgaattgccgccctgttttcaaatataaagcggtttatttgaatcctaatgcattcaacaaggtagtgtctaaaatgtcctacaaatagtatgttttctggttatcttcagtcgcatatttttgtatacttgtttcaagacatgcaatattttatgaccacatttaccacgttgcgcacctaatgatgaatcccattgaaaatgaaacatttgaattgatttcagttttatttacaaaagtatatatagtagcatatgtgccatagtataagaccacatatacttacacacacacacacatacataaccacataggaacagccatacacaaaatcatagaatgcccttaggatataagtcataaaatcatgtatccaataagaacccaaattctggtgacaataacaaatccagcctaccctaatgtaaacattaacatccgctgccgaatcagttattcccaccaaagggtcaaaaccgcttacgcagcccaagttctcggctgatcagtacccatgagtgatccactcaagaaggcacccaatccaacagacataaacatccgcagccgcattcgcgactcccaccagagggtcgaaactgctaacacagctttaagggtcaaaactttccacgtagctcaaactcggctgatctatatccatgcgcaatccactcaagagagcgcctaattaacgtaaacataaatgagagcctatgtacgctcaatatgaagaagtaaataagctcagccaagggtttgctaagcgttcgctttgcaaattagatttagattttattcatacttcaattgtgtaagacgtgaatttgtctccgacattcgcttaagtttttgatcaataaaaatacttttttttataaaccaacaaaccgcgaagttgtaattatatttatttactcattcaattcaacttgatttgtttagtttacgattttgcgatcgtttatttattaacatcaaatcatggatataagcgtagttctgaaattatttaaaattaaattcataattttaaaatgattattgcttttaaaactacaaataaaacataaatagattagtttttttttttgtttgcttttcttttagttgttttttgtttgtttttgttttcaatccagccttaatcgtatgaacacttacatgttatttatgcctaagctaacgaataataatatttttctaccttgcgtggttgccttttgaatgtacataaaatattttaagccatataaagaattgtacacttatataataatatattatatgcgtttcagttacggttaattcttgtttttgtgcgttttgtattgttttgttttatgtacagaatttatttgcttagcaaattatggcaaattagtctaattaaaaaaattttacaatgatgtatatatgaatacatatagtctgttctggggtttcaattcatgaatatttaattctttacttcttcaattgccattttctttttgtcactccatgtcagctgtggacttgtcttgtttgttgattcattgttagtaggattaatggtcgaatgaaatgcattagtagagttagatagattccctcgacttatatgctaattttagttgattagtcaagtactgtgctctgggccgctactgccccctcttctgtttgtcagttttagttttgttagttgctgcttggtgattggtgatatcaaatgattgactgactggttgaaagctaaacatgtatgattgcgaacatattttgttgtttcatttttgaggcacccaacttggtttgtgagagcgtcacaccactgaattctggatagtgttgtgctccttttcagcaggtattagtctaatggttaattcagttttgtctggtctgctatactataagtgtatgtgtatatatatatatataagcttgagcgctttatagatagtgtacatttaaaattatatttctgttttttctataaatacacaaagttaaatattaagctgagcgaggaaaatgattatatcgcgagttgagaatcaagagcgcgtagataatttcaaattaaatatgtttgtagcataggaattaggcaactaataacttttcacttaacaaaaataatttaaatataagaaacacttaacgtagactgtttgggcgggtgtggtgagtgtgagaggatgatggccaagagcagtgaggcgaatctctcagggattgcttctactgctgcagctggtcaccgaattgttgctgctgctcttgccgcccttgttactggcggcagtgttgcagcatgtggttgtggaggagatgccgctcctggcccccgtctcatcgccctcatcgcccaggtactcgtccggcttgtgactagaggcgggaggcgtcagaagactttcgggagcgcgcagcgcggtggccggggaagcttgaatcctagcgcgcatggcatgcgccgcatcctgggccataagcacttcgtcctgaaagatagaagtttcaataagtaactgacggaataaagtacgctttatattcagagtgaatcgaatacatatttggacgtatgcacacttctgtatacacttagatatacttacatacatatccatggtagttgtgtgcgtttggataatgtgcgagtcgtcggtgacaatattggggcagattagtcccaggccaaatttgttgctgacttgctcattctgctcgttcagctgcaggtagggggccttctgggagatcactcggaagaatggctccatccagcgagcacaaggctgaatcacctgccaatccagaccagaacagcgtaaagccatctccctaaaaacgaaaaatattcggtaagataaccatgtcgtatgggatgcaacttccattccaacttaccgactaaatgtatgactgatggcggccgctgccagcaccgagtaggaatagttggccatgcccacgtccagggtgcacagatctagcagctgtgaggtttgcacaaactcaaagccagagaattgcgggtagataaaggcatcgtccgcctccgcgctcttttgcctgccaatctgggagaacgaggccggagtgcggttgttcacattcagttgcatatagacgcccagccagccggtaatggtgatggggctgatgtcccagtcgagcgcctgcagcagaatcttctcgtggttaaggatgtcccgctctgtgcaggcgccatccgtcacataagcaaactccccgatctttggcggataaatctcctctaccttggcggccacaaacaggcaggtgatgccgatcaactgcaagtgcgtcttctgcaccttatgcgccacatgcaaatagcgatccaggtagtcgacggccaagtagaaggtctcccgatgcagcttgtaaacttcacagacctcgatcaaccagtccaagagaatggcacgcatacgtggttgcagtccgggatgctgttccagcatcgaaatgctgcgcagacgcgagtcctgctcatcccggtgacacatcaggcgccaaacatcggcggcgttagcccaggcgagcgcaggaagtgggcactggcgcagaccgttctccacagccggcgacatgggcgtccgcatgttaatcatcaggtcactgaccggatgatggatctgctcctgatgttttggcaggccgggagtacgctctccattcaccgcctgctgctggctgcagccggaggaggctggagaaattgtggaggagtagatctccacgtcgtcgtcctcctcctcaacgtcatcctcatcatcctcgtcgtacgagtagtcctcgcagctgtcgtccaaaaggtcatcatcctccgtcttctgcgtgaccaccgtactggtcaccacctgctccgcagcgtagcgcaccaccactggcgtctgcttgcttccacgatccggactcggcggactgtccgggctgtccggcagcggactgtgtggcgcctccgacagatcctcggccggtgagctacgtatgctgagcagctcctgggtactctggccatcaaccgagacaacgggcgaggtgtagaccgaggaggcaaccgatgacagattgccctgctcgctgccgtacaaagcgggcagtcgctgctggcgcttagctgatggaggctcaaaaccgagttcagggtcctgaaaatgaaggacagatgtttgaataagtaaatcatacaagtgaatgctttaaattgaaatgaactaagatagtagacaatcaaatataattactaagctatattcagatattactttcttaaatagtagttcatatttctcaaaggtgtcagcaattattaccatttcaataaatttgcgcttctgttccaacttcataataacatgaacaaatgagtggagaggatactcaagacaataacaggatcacacgactggcggaattagaaacgtgctccgaatttaattagcgaaggaggtttggggaaatttatgtgggcacgcctgtcaaaattggtaatccttgatagatggactgctggctggaccgaatgcacccgcacaaaatgaggagccaggacttcacacaaaagatcaaggactatggaatggcatggaggtaagacaatagcacttggttggattttctcgtgggaacgaacgggtttcgttttgctctttgtttcttttgaatatttttggtatgatcaacatatagacacgatatcgttattgcacttttaactttaatgttataaatttagtagcagtctttggaaataattttgttgcgtcgtttctctttggtatgattaaataattgtgcaaacagattttttggttatagcatttaaacaattttggcttcgttttgtttttttggtagttgttgttgttgttggtgggtgatcttggcaaatccggttcttaaattagttctttgcactcgttcttggtggtttatataaatatatttatcagtcttaacatttgctacttggcaacgaataattttggaatttcgaatttcgtttcagtttgtctgggtatgtattattatttggctaactccgctcttggcttgatcgagtaccaatcgcgttgacgtgcgctgtgcaactgagctcgacgttctccgttccagatcgccgatccccgaattccccgattaccgatcgtcgttatcctgcccaacgaatgcaacggtctcgaaaataggggttgcttttctctgcaacaacaacagcggtaaaaacaggatcgccaaactaacgtgccgtccctttccaacgggggttgcttgcctaagatatccccgtatatcttgagacgacaacttgtgttgtttttgtctttgcagcagcattgcatttttcgcctctgggtgtttatcggcccaacaacaaatcccactgacggctgtggctcctggatcctttttacaattatttttgtcaacattttcgttcaggtagacgcaagacgtttggaaaatcactacctacatcataatcctcaaaatagcgacacataatatagtacataggaagtatataaattacgatttgctagcttttggctcgagctgccagcggctgcattaagaatctcctgcatcttaaaggctactcaaataataaattatcttttgacattgatcagagggatggaggcggtgccaaagccaaaagtagagcgatcctaatggaacctcataagattacagcacaaaaatgacaaaaacaaaaaaacgaaaatggaaccgaaaatcgaaaatcgaaaacaattgagatccttgaccattgttcttcttgcagacagatgattgaaaacagaagccaaaatcagaaagtccataaagtacaataaaatgtagtcagcatgggacacagatgtctgagattgctgataccataaaaaatacataaatgaacgtatttcgcttaaaaaactattgggaatgttttgaaagttatctcaagaaacccataatttcttggctttctcttttttttttaatgcatagtaaaagatatttatttataagatactgaaatatatcaaaaatagcatttaaagctattctgaaagttttggaagcttggatttccatgttttaaatgtttggcacaattatttgcatttatatatactttgaatgaaaaatatacatcaaaaatatttgaaattgcccaatatctgcacataaaactaagcaatacaaaagatataaaatccacataatattcgcatcagtttctctacaatttcctttggtttacgattgcaattgatctcttctttgattgaaaaaggtgtgcagtgcacaccatataatttatcaaatactgactgcatttcgtcaactttcttaacagtcaatctcacacatcgtaaaagcttaacaatatcaaccaaccctgctggccattaaagattttcacataatttcttgggcgaaaaatggggggaaatattgcgatatttatgtgacaattttaattgtctgagtaggtttgccttctctcgacaaacataccgagcagaactcccctcctgaagtcgagaataaatactttttttttttttttgttcaggcaagacaggaaggtccaagacgcatgacaaatttaatttctcattcttctggccaacaaactgcaacaaccctccggaggagaagatgatgtaggtataaccgggaacggcaatcgtagaatgaaaatgaaaatgaaaatggacatggatatggacatggacacatgtcaaggcacccagatgcaatgtaattaaaatcaaagcgtgcaatggcctaagaagccatctccctggacaatggaaattccgttcctctagccttattatttcacttcatttttgcttttggtgcgtggacattgcatctgccgtttggatttggtcaagcgttatggaatcacaaagattatgcacgaaaattctcagtttacttaacgacttgacggattcgaagagaaagatcgtcggagtgagtgtgagaaattagtgaactgtaaagtgggctggaatctggaccaatatggacccgaagggttgcattccaagtttaacaagggttaaactgggtggttgcccttaagccaccgccgtcgccgctgccttcaaggatttaagtctcaactccaagcaggcagctgctgcaatcgtccttcgcatctcgatcagctccttcaaaatcgaagcccacaaggaaggcacccaaaacatctctcgaaatctcactgggagggagaccatgggtcgccggcgacagatgatgcagttcctcaagttatgggtacatacagaaagcagacaagaagcaattcgattgttaggcgacaacctctgctgcgtcgccgacctcaatactcgatgtcctggtgccccattgtgtcgctctccctctccttttcgcctaccctataaagtcctgcgcttatgtgtcgtaatctttcgacggccgtctgctcgaaaccgaaacacctttagttttcagaccttggcgtgggtccaggtgtaactttttcaccgctgttttcgtgtaatatgctgcattgttgtttccatttatttttcttttcttacagtttttttctttttttttcaattctcccccaagtcctttgataacatttaatttcatactacaatgtgcggtagttgttaatatttttacagtttgaaaagattatgattttcttgaaattcaggatcaagctagaggttttttcttcagatatttcatttttcatgaaggactcataaaagtctgatgatcgttcaaaattagctaaagtcctgtctactttttgggacatcgctgctgctctgcttttaataaatgatatgcaaacaacatgccagtggacaaatccccgaaggaccataacaaacactcatatttcaaaccaattcaactgacccctggtcagtccagaaagggttaatccaacacaacactttcgcggtgacattgctggttttatcatcgcggaaaatggaaaattcggtgggtcagggggacgttgaaattgcttggacatgtaattaatcatgcaattggttagatccatgacaaaacgaattaaagcatatcacattggtgaaacgggaggagggtaagtggacaaaggacaaaccgcgaatgaattttgaatgcgaaaaatgaattttgattaattgtcaggaaagacaattttctttaggggatatgccaacttcttaggtgtaagcctttaataattgaatatctcttgatatatttactgcaattacgttttcccctgttttatctaataatttaccttttaaaattatctgctcaaaaactagtttcttatcagtcgaatcttaatgtaattaatctgaaaacagatcgctgcccaagtttaccattatctcttgtttacctccagctaaataaaatcctctgtaaaatgaaaaaagaaaactttgaattacaaagcaggcgacgcatgatcccaaatcgggatgcaatctgggaaagtgaaacttgaattcagtttcccacaatatcccgatactgacttgacagaaatcaagacccacacttgattgcatcgaaaggaaacccgagcgaaagcaaacccaactccccttttcgggacaaaagaaacaaagaagtttcccaaaaaaaaaaaataacaaggaactttcggcgatttcatgcctgccatgtaaggagtaagaaaaaggggtttacattacactgacaaattggtaaaataataccataattttgatcctgtgccagcagcaaaacaaatattgtataatatttcaagaccgcattccgatgcagacgcgttctccgtgtcccgaaaagcagatgacacaagagttttaagaaggaaaagcctgatgatttgcataaaagtttaacggaaatctaatgagcagacgtcgcaggatcggccaaggcatttgcataaggataacatgtcccgaaacggggtagcaaaatgcaacccagttggaaagaattttttttgttatgctccgaatcttctgcagaagcaaatgtcgtctcgatgaatatttaattagagacgaaaagaaaagggaaaaactcggcccagtgatccttgaaaaggataaggcgttgctcaacccctccgtcggttcgttcgtgtgttgcggtttcagctctgtcccattccggtagtcaccacgatcccttacccatcaccgtccccccatcccgatgccaatcccttaaactgtcttgatctagttcttctgcctcaagctaacctataactatcgcaatttcaaattcttaccacggccctaacggacatttgccgacgccttgacttttggaaaaacccacccctggagaactcggacttggactcaaggtgtgcgcgcatgcgcaacgacgccttctgtccttgttctgcgtctcctgctcctgcgcctgcttctggtccggctcctttgtcctggcatgcatatgctcggcatactgccaaagaccccttcggggaattcccttactcaacaaagttcgcctgagagggggccagacatttccttgccatccacttttttcgtaccagaatgacatttgtttggcacggaagcaggcgcaaaaaccattgcaaaaacaaaaaactcaaaaaaaaaacagcaaaaaaaataaccaaggcagatatcatttgtttggcaacagactgtttgtataccctggtcactacattttaattttacgatatattctcagtacaaaccaaggcaccttataaataatataaatttctatatttccactttatcaataagatatgctgagttctaaaacagtccttttaacatgcctaagatttaatatatgaaaacttatagatattcataatcttgcaaagataaagatacccatctagagggtaccaaactatcaaacaagaaaacaatttctgcaagttcattgcacgtataggagaatattctctcccctacatacatatttcatatggcactggagaaaaaaatcctttgcaccaacacagctgcccatcgtgaggagccgccaggagatgagaaggaagccattgttctccgccttgattgcagctacttgagaggagatctgacttcaaggcttccaaggatgctgctaaatgagcccttttcagtaagtagcgtttatttttgggctcatctttgcattgtgcccgcgcaaaagtgccaagaagtagctgtctacgtgctcaacggcttatttggccaaaactcaagcagcgaaagatcaaatgaagatcggcagccaaacgagtggaagccaccaaagggctgtccattcaaatggaagtacaaataaaagatcgtttgccaaacataataataaaaatggagaattgtttagcgatcgctgatcaatgaaaacaattgggaaactataatcaaatagataaatatataaaatggctattgctcaaattcaaaaagaaatatcacctgcacggttcaaatatgtatgtacattgtttagttataatctcaaatttacattattattattaacagagttcacaagcaatcagattattcagcttggaaataaatctttgagcttataaacagcctaaccttcaattaatagattaaattaatagattcttatttaggctaaaatgaaagtggcaatcactgatcgacgagaatttagagaacagagaattcccagagttcaagagttcgttaaatagaaacatttaattaatttcaaatgcataggcactttttgaaacacactagagctaatcatcggcttcctagaatgccagaatgcctcttgccatttccctgataagattgcaaaaatcaacgaggtcacatgacatgataaagcacttcattcataaaacttatctgcgctgtgtctggctttatgtttaaattacgattcgttttggattacgtacctcgtttgaatcgctgcttaaacgccgtttacgtttattgccattggaagtcgcggctgtggatgctgcaagattctggctatcacaagagcacatctcgtcggttctggaggctgctgaggttcctggtagctcctcttcacttcgttgcgacgctgaagagaacgatgttgatgggattggatctggatgtggaaggatagcgattgggctatcgctgctgctactgatactactgctgctgacgacgacgactatgctgctgctcacttctccgttgctgggggcggttgtgactatgctgccatttggctcagtgctgctggtagaacaaacactgcaaaagaaagtgagtggaattagcagtggggtactaaataataatactaaataatttaaattatatagttgaatgtccccaaagagcagctatttgatagaatacttcaacatagctgcctatatttttgtagatttaaaagacatgattgtatcaaaaacccttccatttaaagaatcccccatatttttgtaaacccaaacccaaactctggagcgcagttatttccaatttctccactttttttttttttttgcaaaatagagaaattcaatatgccacggaggcagggcagcaaatcacataggggcgttctaaaatagatacaaacgaaacgaacataaattcattgaattttgacacggcattcgaatttcgaatcgcgatgcaagactcgagattaaggcgcccaacggatatattaatatttaacatccgggaaattgaaatcgagatgactgatcggggggggaaatggaaatggaaatgggatcgttgtgagggccccggggaaagcctttcctcctcgagattgagcaattttggcaaatttgcatgcacattagcataatgcaggaggctggcaaacgggaagaatacaattttccatactttccaaaggacagatgttatatccttgcgtcgcaactctcaagtgttgcgatccaagcaactgcactttaagcaattcgatgcgcgaatttttgcaatttgagcgaggagctcaggagaacgagagaaaaaaaaacgaaatctaacccttgggaccaaaaacccttcttaaggaactcgtgaaaagggataatagaaaaaaaaaataaaaaagggctgctgcccatacataaattcaaatgctttagccatttctttcttggccagaggctcggcattgcagcctcctgttttgatccttgccctgcactatcgatcgggtttaatggtttaatgaacaagaaaaagtaatcacgtagtaaattacgaggaaatgaaatcgctttaaaaatgagttatggcgagaaaggactaatggagcgtacgtgcacgcggcctgcaactttttcccgctttctttcattgtactcagggtttcggggtcaggggtttccagtcatctccgcggcttaaggttcaaactgaaatttgtcatttcgaggtgaaagtttcctttcctttgcggcaaatgcagatactttgtttcggtttcgtttccccttttctattccgtttcaaatccgaatccctgtaggtagcaaaaggctagggtgactatctcggagatgatatgatgaaaaaattcgaagaagtatttcctggaatctggtccagtggataataagtggactatcgaaggatcgatctttctcacatgataaattataaagcaacggcgacttttcgattagaaattagttatttatgcgtttaacttggtatcaacgaaacagttatgtttcggaatttatgtgtttgatcctaaactcttaaggttacaagaattttgtcattttttgaacatttttatgtgagttccttgtactacttgtactaccatgccctcaaaagtatgcaatggaatctggaaaacctgaacttccgtgacatttttttgataaattccgttatagatggcagggaaatagcttcgcaacacataccaataattatgtcgcacacaagctgaccacgaaatatgtccataaaatggactatcacttaagtgatcgcagtgatcagtgggtgatgatgatgatgatgatgatgatgttgaatgccaaaacggggacgcaactgacaaaaccaaatgactaggcaattatgcaattatggtcatgcgcaggcagctactacaagcaaaaagaatgaatatatagtgcagggtgaaaacatattaaactcaattaatttttgtccaggacatgactgcaaaagccacaaaaagtgtgtgtctgcagtgacagcattatcaagagccgaccaaacaaacccccttcataacccaaccccctgaatgaccaaactgacctgaaccgtcccacaactaaacacttttctaatgacattttcgcgcgcaattatatactaatcacacgcaggacctcggaaaggtcctgtaaaggtatgcaagagtgttgaggaatgcggcacttggttatcaacgctgcctcgactttaacacctacaaacagatggcttttttttttttgttttgaaaattgacagtgaaaatgcattttagattatcgcacttgagtcagaaggttggaacagtaggatcccgagtggttatagctcctgcgggtccaactttcccgcggcgtattcgggcataaccagttgggctctgtcgctttataattacgaaatagctattagataaacatcacttttggttaagagaattaaagggagacgcgctgcctaccaggatagtgttgttagtggttaaaaaggaagtcgatcggatgtcgccacaggaagtcgccgagcgttagaaacaaatggtagctcagtccgttggggagtcagtcgcctcttggctttcatgtggggtgctaattagtttggtcagggctgcggaggaagtggaagtcacgaaaagtgtttgatgggaaaaggaaatgtctaagatcataagagatgtcaagaaaaacatgcaggttcgcttgaaactaagatttttacaaactcaaatcgaacttggggtttgcaagaataatttacctcttaaaacatcgaaaattaaattaaattatttaaaagtaagccagtagaatttaaaatgaataaagtactcataagcttacctcttggcatttaaacccataattgtacggccttgagaagccgtcaaggttctttatcctgaatcttgtttttaagctgctcgtcaaaagcagaaatgttttgcatgaaatgtacaatttaaagaggactgcaagtaaattaaacaaaatataaacttaataaaatataataaacaacatttaaataatattgtaaagcaatcattaaaaactaaaaatggcatataaactaattggataagagtttctaggatatggtcatcacatgcgacgcgttttcgagtttttacgacttcacaaaacctatcaacagttagtaaaacattatctgtagatccttgtggaaaaaacaacatatgatccttgagggaaactcacacacagcatgtggccgaaaagtctccttgcatcgaaaaccccaaacaaatttgtttacgtgagtttttctcgaaaaacatatatatacaccaactttttgcttttagcaaaacgaagaaagaaagtaaatatttttctttggggtgcaaagtgtgtctaagatattcaaattacttaaatagaaagatgggtgggaagaccattttggagttgggtcatcttaacaggtagtcacggaatggtcatctttttatcataatagaatttccacgagtctcgattgatgccttctgctgcagtttcagcttcagctgctccccttgaatttcctttacacttgaaaaacataactatacaattcaaacaactgaaagtgctattaaattatagaaatcaatagagttctgttgttgcaagtacgatgtattgttgataaatacttttttaactccgtaatgcttgacttatgagataatttaattttttgagtgtaccgatgtcaggtgcatcgcattcggcgcatgcgcaacgtccgcattttctagtggtttacaacgcttaattatatcgaggagccgagtccttagtgcccctgttgcacctgttgtggctagagttgatcgctgaccttctgttagaactgtaagtatgggttcgatgcgatgcggggcaggtgagtagagtcgatgggattggagaaggggagtggagtggcagctgttgaagatcctaccccaactaaaaggattctggcaatgtctctgctgttgcttttgtaacttcaattgacttccccctcgctaattgtatcctgtcgcgtttccttttcccctagccctacccctccctcccctcctcgcttcctttcttccttcatttattttcctttttccgtgtgacatatgggcctggcgttatattcgccacgatttatggacctcccttcggcctaccattcagttcgacacctttttttcctaccccatatgcgaatgctttttagccaacgactttctttcccctactttcttgttcttacgcaacggattgtctattttcctcactttttgcctcgcttttcttttgcgttttccggccttttctcatgcacaatattttgctgtttccaaccatcattttcacactaattgcggatatgccttctaattaattgggttccctctgcttccccgaagtccttttagagcatttttgctttcttagttttcaaccccctaactattctacttacaacaaagaaatttccttacacagaaaaataagtctctttggtcatttaagaatatgttaaaaatcttaaaacaattaataagatcatcatttaaatcgtaatcccaatataaagatctgggttttgtaaatattcgagctcaaaaaacattatgaaacaatttgtatctttaagatacagcagaaacctaaaaacgcaatagaatagacatttatctctcagttgtaatcatgttacacatctaacatcatttatagtcggattaatgtaatcttttttgtaaatcacaaaacgtcctaaaattaatattcgttaataaggatgcgataatatcctttagttttacaaaacagttgacagcggctcttggcaaacaaatgactgtattatcgctagagcaatccaattcttgtccaaataccagtgactaagatagattcctacctaattgcaggaactgcccacacgcaggctgcggctgcaacttcctctaatgaagattaagtgaagaaggctgcgagttcgggcgaaatccgcggcgacaggtatacaaatatgaataatgccgcggatcgagcggataaactcgggggtttcctttgcgcacagcgcctaattaaaggtgtacgatgcatgagtgaatctgtttacctggacggggtccttcaaggtcatttaactggaaaaccgagtgtcgaaaataaagtcgaccgtatttttttccctcatcttcggaatatttgctttgtgcggaagatttcccacaaggaaatgggaccaagtctcgagatacaatatgaaatgcaacttgaggcaatgcaaagaagaatgcgcaaaatgcgcaaagaagagcgcaaaaaaaattatatacaaatatgtatgtatctcgagtatatgccagactatatacatatgtacatatgtagagggaaaacaggtctcgagttatccggcgtcttcaactgtctgggcctgcaatttttgtgcgtcctttttgggctgcattttgggctcctctgcacatgcggcgagatacattcctgagatactcgagataaaaatgcacatgcatctgggcatttgtggcgttgtccatgccaatgccgcctcctctccattgttgtggtttggccaccactcttgcaattagttggaactcggtggaccgaaagtctgcaggagttgtgtaacaacatagctacataatgctgatagggtaagagggtgaagttcattaggaagatattttctcaaatcgaaagcctaatcatatttgcataatatgaaactataaataatactactaaaagtttaaaccaatacacgaagattgctttataagcatcattgaattgaacccgatctttgatgcttccttttcatactcatgaatgcgtttaaattctaatggtcaattggcccaagtttgctgtgttgcttcagtcgcatatgcccaccctacccagaactacagggtactgcaaacgagaacaggaaagtcgatcctcgcctgcgcgcatcagtgtatctgtgagtccgagtatctgagtatctgtgtgccgggtatctaaagagcgccgcctgggcaaaacggcgtgtgaaagtaaagtcggcccagccgatggaggagaacaaatcaaagttcttgaatggagcggcagcggcggcgatggcgacggcggcgttccagttccaagaatcgatggccttgaagtagccgttaggacatcgggacgcgctcaattgactatttagtttatatttagcagcgtctaaaaggatgcccacagcgagtcagctagctcaagtggcctgcgtcctgtctcttccccgctccacaaatcgccagtcggacggactatcctttgtttgtctgggaataactggaaactgtttatcattgttgtttctgctcctcatacatacggcttcacctcattccgattccgaatcggattcttctgccgcagcgacaaaaatgtgtatggactataaaaaaaaaatgcccacatatacatacatatgtacatatgaaccatttatttaaggagttactattcacaactcatccttttggagaacatgtaatatttgtaaaacattccgcacttgtaattgagaaatattgttggtattttactaggaattcgggttaatatggccagttgatatgtgtggattcctataaccatttacgtatgtatgtacatatgatgagaaaatattcgagatcagtttgggttcccatctcgtctagaaaatcctttgatgacataccgctttcgaaggtggcaagcacttggaggatcatgagcagaattgaaaggtgttgactaggatttgaatagatcatataaggagtgtttaggtgggtcaaacaaaagaaaatgttgggaaaatatacaaaattcacgacactgaatcatcaaaaacttgatgctcttacttttttcaaaatcacttctaagaaaaacaatttatttccccatggtttaaactggccaaatctaaacataagcggctgattttcggcacgatcatgacataatcgaaaaattaagtatacaaaaatccaccccatcaacaatacaccacccaccccccacgcacacccccgccgcgatcgctccaaaagtttaacggcgcaaaaagcgaacacgcaaactaaaaaacgtcaaaagaatgcaaaaaataaagaagaaagcaaaaattgcgaagaaaacaacaacaaaatgaatgtggcaggtaaatggaagcagaggagaagaggaaagaacgaagatggcgcgaagcaaggtggagacgaaggggaagcgaaagcaaaacgccgagaaatatcaatgaactccattctccacttggcagtctatctcgctcactcattggttgggagcacgtacatagagtaactactcacaaaaataaatataaccacgattttacaataattaaaatactattattaattctacatatgtaaacatacatacatatgtatgtacgtagattgtgggtaagggctaaatgccactaccaatctttttcttcgtgtaccaaagatatttgcgccacttttgacataattcattattttgttcttcactcgtttactccattttgctttgaacctctgcttcgtgttcgtcaagttttcgaaaggtccgtcgactgatcggcgattttccgaattttttcgacgtcgcagtcaaatgctctctttttttccgttttagagcgcagtactaaaacgtttttgtttgttgttggtgttgggaaggggaaaataacttgactcgctgttctgattggaataaaacggaagagagcgagagaaagagagcttactctctctcttagcgagcgcatttcttccaagtttgtgcttgtgtgtgtgtcattggaggaagcgtataaaaatgaaatgagcatgggaaaagaatggagaaacgcaaagtggcgcgaattaggcgtttgggctggggcagttttgttttaccgcccaaaatctatgcgaatggcgggaaaaagtgcaattcgggcgggagaaagattagaaagttggcccaaacagcagggtaaaccataagctgcatctcaagccttctatagtaagaaaagctgtaatagttcactgaactcccgttacgcattagaaactcagtgcacttttagacgtgattagaagctttcatttatttcataggattttccaatttgttcccattggataacggtttaattctaataggacacttttccttatagggggaacactaaaacactgtgtgggggagacaatttgtagttggacaccccgtctcttgccaatcagaaagcaacggttaaatcctacagcgtgtcaattttcttataagaggatgttgtatttgtagcaaaaaatgcaaagacacgacggcaaacgcagcattctctcccgctctttccttcactgttccacacacacttgtcaccgcacacgcgtcataaattttattccactctgaataacgtattgccttttatccactaaaaccattgtgcaattggttttaccttctagtaagcggaaaaatgcttaacataatatccccggtgttttcacttgtttttcttaaagggaattgaacaacgtttttcgagagtttttcgtcgtcgtcgtcgccggccacgaaaaaacttcacgagcagcggagcggcggcagcaaagtgatcgctttggaaccgaaaaaaaaattggtggaactgggtatcaaaagcagcgacgtcgactgcggcgagtgtgcatgaggaacgcgccaaaacaggcggatccgaagcgccaaaaaatgcaacaaacacagggggcaactttgttgtactctaggggagggacggagatggggcgagcatctccagcgcaaagaacagagcgtgagaaagcgagacggggcgatgaagccgctggtggcaagcttggcattttattgaatggagtctgcaattggagtccccagtccccaacaggctagtcagactacaattggaggttcgacgtccagtcagctgggtggtcgaaaaacagctgacgaggatgccagaagggcggatttagtcggatatatcgtggttatatataaatacctaagatttatttctatgtcatatgccaattttaattcaaatatgaccttcagaaaataaatatttaaattttaatatgaaactattttttttaatatatttttaaagcgctccaaaatcaattcaaggttaaaataaatttatcttgaagggtattcataaatctttaaaattttaattatttatttattcttcagaagcctgaaattacatggtttaatatgcttttctagtagtttttatgaactgcagccaaataacatatgacaagatgactgaggtcgaactaggtggtaacgctgctttgaaaccaaacaaaccactgccactttgttgttttcatcgattaacattcgagcatttttggcaccaacttcgagcgcttataaatcaggtaagctaaatgaaaaaccatgcgtgcctataaccaattgaaagatcaaaactcgcagaatctgatttttcactaaaatcgaaaatcccgttcaattcggccaaattagaatcgattgaacttgatgatttcccgcgcgcgggaacccgacgtcggcgcgcgctgctgacagcgatgacagctgcgcgcgcaaa

SEQ ID NO: 7658 - DNA, 3737 bp, DROSOPHILA
actttgctgccgccgctccgctgctcgtgaagttttttcgtggccggcgacgacgacgacgaaaaactctcgaaaaacgttgttcaattccctttaagaaaaacaagtgaaaacaccggggatattatgttaagcatttttccgcttactagaagtcctctttaaattgtacatttcatgcaaaacatttctgcttttgacgagcagcttaaaaacaagattcaggataaagaaccttgacggcttctcaaggccgtacaattatgggtttaaatgccaagagtgtttgttctaccagcagcactgagccaaatggcagcatagtcacaaccgcccccagcaacggagaagtgagcagcagcatagtcgtcgtcgtcagcagcagtagtatcagtagcagcagcgatagcccaatcgctatccttccacatccagatccaatcccatcaacatcgttctcttcagcgtcgcaacgaagtgaagaggagctaccaggaacctcagcagcctccagaaccgacgagatgtgctcttgtgatagccagaatcttgcagcatccacagccgcgacttccaatggcaataaacgtaaacggcgtttaagcagcgattcaaacgaggaccctgaactcggttttgagcctccatcagctaagcgccagcagcgactgcccgctttgtacggcagcgagcagggcaatctgtcatcggttgcctcctcggtctacacctcgcccgttgtctcggttgatggccagagtacccaggagctgctcagcatacgtagctcaccggccgaggatctgtcggaggcgccacacagtccgctgccggacagcccggacagtccgccgagtccggatcgtggaagcaagcagacgccagtggtggtgcgctacgctgcggagcaggtggtgaccagtacggtggtcacgcagaagacggaggatgatgaccttttggacgacagctgcgaggactactcgtacgacgaggatgatgaggatgacgttgaggaggaggacgacgacgtggagatctactcctccacaatttctccagcctcctccggctgcagccagcagcaggcggtgaatggagagcgtactcccggcctgccaaaacatcaggagcagatccatcatccggtcagtgacctgatgattaacatgcggacgcccatgtcgccggctgtggagaacggtctgcgccagtgcccacttcctgcgctcgcctgggctaacgccgccgatgtttggcgcctgatgtgtcaccgggatgagcaggactcgcgtctgcgcagcatttcgatgctggaacagcatcccggactgcaaccacgtatgcgtgccattctcttggactggttgatcgaggtctgtgaagtttacaagctgcatcgggagaccttctacttggccgtcgactacctggatcgctatttgcatgtggcgcataaggtgcagaagacgcacttgcagttgatcggcatcacctgcctgtttgtggccgccaaggtagaggagatttatccgccaaagatcggggagtttgcttatgtgacggatggcgcctgcacagagcgggacatccttaaccacgagaagattctgctgcaggcgctcgactgggacatcagccccatcaccattaccggctggctgggcgtctatatgcaactgaatgtgaacaaccgcactccggcctcgttctcccagattggcaggcaaaagagcgcggaggcggacgatgcctttatctacccgcaattctctggctttgagtttgtgcaaacctcacagctgctagatctgtgcaccctggacgtgggcatggccaactattcctactcggtgctggcagcggccgccatcagtcatacatttagtcgggagatggctttacgctgttctggtctggattggcaggtgattcagccttgtgctcgctggatggagccattcttccgagtgatctcccagaaggccccctacctgcagctgaacgagcagaatgagcaagtcagcaacaaatttggcctgggactaatctgccccaatattgtcaccgacgactcgcacattatccaaacgcacacaactaccatggatatgtatgacgaagtgcttatggcccaggatgcggcgcatgccatgcgcgctaggattcaagcttccccggccaccgcgctgcgcgctcccgaaagtcttctgacgcctcccgcctctagtcacaagccggacgagtacctgggcgatgagggcgatgagacgggggccaggagcggcatctcctccacaaccacatgctgcaacactgccgccagtaacaagggcggcaagagcagcagcaacaattcggtgaccagctgcagcagtagaagcaatccctgagagattcgcctcactgctcttggccatcatcctctcacactcaccacacccgcccaaacagtctacgttaagtgtttcttatatttaaattatttttgttaagtgaaaagttattagttgcctaattcctatgctacaaacatatttaatttgaaattatctacgcgctcttgattctcaactcgcgatataatcattttcctcgctcagcttaatatttaactttgtgtatttatagaaaaaacagaaatataattttaaatgtacactatctataaagcgctcaagcttatatatatatatatacacatacacttatagtatagcagaccagacaaaactgaattaaccattagactaatacctgctgaaaaggagcacaacactatccagaattcagtggtgtgacgctctcacaaaccaagttgggtgcctcaaaaatgaaacaacaaaatatgttcgcaatcatacatgtttagctttcaaccagtcagtcaatcatttgatatcaccaatcaccaagcagcaactaacaaaactaaaactgacaaacagaagagggggcagtagcggcccagagcacagtacttgactaatcaactaaaattagcatataagtcgagggaatctatctaactctactaatgcatttcattcgaccattaatcctactaacaatgaatcaacaaacaagacaagtccacagctgacatggagtgacaaaaagaaaatggcaattgaagaagtaaagaattaaatattcatgaattgaaaccccagaacagactatatgtattcatatatacatcattgtaaaatttttttaattagactaatttgccataatttgctaagcaaataaattctgtacataaaacaaaacaatacaaaacgcacaaaaacaagaattaaccgtaactgaaacgcatataatatattattatataagtgtacaattctttatatggcttaaaatattttatgtacattcaaaaggcaaccacgcaaggtagaaaaatattattattcgttagcttaggcataaataacatgtaagtgttcatacgattaaggctggattgaaaacaaaaacaaacaaaaaacaactaaaagaaaagcaaacaaaaaaaaaaactaatctatttatgttttatttgtagttttaaaagcaataatcattttaaaattatgaatttaattttaaataatttcagaactacgcttatatccatgatttgatgttaataaataaacgatcgcaaaatcgtaaactaaacaaatcaagttgaattgaatgagtaaataaatatatacttttgtaaataaaactgaaatcaattcaaa

SEQ ID NO: 7659 - protein, 709 aa, DROSOPHILA; identical to SEQ ID NO: 7593

SEQ ID NO: 7660 - DNA, 2612 bp, DROSOPHILA
cttttccacatttcgcacactttaaattagttaaattggcctttattgctcggtgtgctaaattttcgccattcgatttgggcataaaaaaatcccgtggtttaaacaaacactatcgtacacgcatacacactcagcgctcacctaacacacacacaccaacatacacatacacagattgaataatcgattttttacattcatttcctttttctgagtttgtttgactttgcttttccattttcgctgcgcgaaattacctttttgaaatttacgactacgatgccagcgatttgtaaacactttcagaaatattgcctcgactttccgatcgatttgatgcactgtagctgtggattgatggcttagattaaaaatacccgcatagccgccgaaccgagttttcccgaccaaatcgttcaaagtttttttttcgactgacgcgactcgcggatgcgccccagcacgcaggtgtgagtaggccagcgataggcagctcgctcagcgtgaaccgtgcggcgcaatcatgagtaatccctactgcgcgggttctattccgtctgaaaatctaaatgatcggaaatagctagcggttatccaaaattttaataaataattataataatatataattcgtaagctgtaaggattattttattgttatgtttaaagagttctaagctgcatgaaagatataatttttaataaaaatagagcacttgtttaatgaaacgttgtattatgaagtaagtttagattcgattttacgaaatatttttaaatggatttccttttttattttatgaaattctatttgggaattcccttaaattatcaaaagtatatttaagctagggctgcagagaacacaatttccgttacgattagtattgcctagatggcagtatgaccagtcttatttggtatttccgaaccacctgcgaacggttttctaacgctaacgcacgtgtttgaaagcgatttcaattgttctgcaattgccctcagtgaagcagcaagcggagaggttgcattttaaagcacttttttccagtaaaagtatacaataaacaagccaatatggtgagtgcatccacgttagcatcgagagatgtaaatttcaacaagtatcccaatctttgcagactgaggaagttaatcccaaggcattcccgctggccgatgcccagcttaccgccaagatcatgaacttgctgcagcaagcattgaactacaatcaactgcgcaagggagccaacgaggccaccaagaccctcaatcgcggactggccgatattgtggtgctggccggtgatgcggagcccatcgagattctgctccatttgccgctcctgtgcgaggacaagaacgtgccctacgtcttcgttcgttccaagcaggccttggggcgtgcgtgcggagtttcccggccaatagtcgcctgctctgtgaccaccaacgagggcagccagctcaagtcgcagatcacctccattcagcaggagatcgagcgactgctagtctagtaaccctttagatttaagtgaacattcgtacaaagtggtaatttcaaattgaaattttgaataaacatgtgtattctttaatgcaattgttgtttccaacgcacatggttggcttggagtgcccaatttttggacaccggataccaatgccgaaaaataccagaaaatactaaaccaaaggggtcagctggtatagccggcaaagtgctggcaaataaataagctagtttaatataagcttatttcatataaattattgaaccagaccaaaatgtacatgtgcatgtagaatatttatttataactataagttatttattcatagaaatagaaaaaaatctgaatggtagcttatgcaaactactttaagaaagccaatcctggcggcaaaatagccagtcgcacatcaccgttcgcccctggtgaatgtcacttggccgccgattctactgaccaccaccattgccacaccatcctgccgattcgatcagcggtgtgaacttagcaactgcgtgaacccaatgacaacgatgcaccgccgcctttgtgaacggagggaattactggaatctgggtgcaagtgacaagcggctagaggaatcaaagcactcggtataaaggcagtgcctgccgacgaaacaaataccaaatcctgaccagcaacgagacgggatgaagctgctgggcaaatacgtggacaagggcatgcaggggtgagtgaatatccccagagtcttaaactattttcgttatgcctcgaaaattcttttagaaatgtgaccctggtgccggaggagtccgaggatatgtggcacgcctacaatttgattgcgaaaggcgacagcgtgcgcagcaccactattcgcaaggtgcagaatgaaacggctactggctcctccaccagcagccgggtgcgcaccacactaaccatcgcagtggagagcatagattttgatacgcaggcttgtgtgctccgccttaaaggcagaaacatcgaggagaaccagtatgtcaagatgggcgcctatcacaccctcgacctggagctgaatcgcaagttcgagctgcgtaagccggaatgggaca

SEQ ID NO: 7661 - DNA, 550 bp, DROSOPHILA
gccctcagtgaagcagcaagcggagaggttgcattttaaagcacttttttccagtaaaagtatacaataaacaagccaatatgactgaggaagttaatcccaaggcattcccgctggccgatgcccagcttaccgccaagatcatgaacttgctgcagcaagcattgaactacaatcaactgcgcaagggagccaacgaggccaccaagaccctcaatcgcggactggccgatattgtggtgctggccggtgatgcggagcccatcgagattctgctccatttgccgctcctgtgcgaggacaagaacgtgccctacgtcttcgttcgttccaagcaggccttggggcgtgcgtgcggagtttcccggccaatagtcgcctgctctgtgaccaccaacgagggcagccagctcaagtcgcagatcacctccattcagcaggagatcgagcgactgctagtctagtaaccctttagatttaagtgaacattcgtacaaagtggtaatttcaaattgaaattttgaataaacatgtgtattctttaatgcaa

SEQ ID NO: 7662 - protein, 127 aa, DROSOPHILA
MTEEVNPKAFPLADAQLTAKIMNLLQQALNYNQLRKGANEATKTLNRGLADIVVLAGDAEPIEILLHLPLLCEDKNVPYVFVRSKQALGRACGVSRPIVACSVTTNEGSQLKSQITSIQQEIERLLV

SEQ ID NO: 7663 - DNA, 23407 bp, DROSOPHILA
ctgacattccggccgaatgctgacattacacaaaagtcgcactgcaaacattgtccccagctagccagccacatgccgagtcggcatgttcattatgcttacaattaagaacctatgtacttatgtataagacgaaaacggaggactcgagtagccactctctgacaataaacttcatactgattttgaacttcaagaaagtcagtcgtattctttattggaaatcttcacactacaactatctgctgaaacttaaaaaccttcatacatttacacatcatatcttcacaaaaggctccaccctcgatcacggacttaactcgcgcatcattgaggttaggttatgcttgcatggcacttgcaacaacaaatagcgccttaaaacgtgcaacaagtgctgggaaaactgtagtaaaatgaggcttatttcgccactgtgaaaattaagacggaatactacagtaccctacaaagttataggcatctttagtattggttattagcgtttatctatatgaataattgtctaaatatggaatgtaatatctcgttgagctcgaaatttaattcccaatcgattggcattccaataaaaaaatatttaaaaaaaattttttttttcaatatttgatgatgttaccccttataaaaaaattaaaattgacctaaaaattttttttttctaaatcccccaaaaagtgattgggattttttctactgataattagctattcaaaacagttactcatttgtctgtatggacgatattagtgaagttatgcctaaaaaccccttgattttgttgaaaaatctgcttttctctacttacgccttgactatttagacgctgacccgtggcggtgggtggcaacatgctctccacgccctgcataatgacactggctcccaggaatttgttgagcagagcacgggcctcgcgatcctcgctagaatctccgggctcctcgactggaaaatgcaaagccacgatgagtctttttaaaaaaagtgaggcgagtgtattgagtactcaccattatccgcatttcgcatgcgctcgaggacatcgtccacactggtcacctgtcgctgatcggcactgctgttaaggaatgaacgagtgttgctggatcgagtggtgctcatggtgtgactctgattctgacgcatctgtggtgcctcgatcacgctgcaaacgtcattggattcgctatcatcctcggtctcatcctcatgcctcaccagcgattgggcgattgaagagtgggtcgaatgtgtggatgaggaggattccttgcgaatgaacttctcgctaagctccttcaccgatccccggcgtacataacgagcatcctcgggcagcgattgctgtgactccaccttcttgaactcacgcaccacgcgggcatccaatagcggcggtgagctatcatcctcatcctgaagctgctgttttatggcggccagttcgtccgcattgcttgagtagatgagttccttgcgctcgtgacgaggtggcgacttattatctgagtagaactgctcctcgatcacataacctgtgacttctggatggagagatcggagtggatattgagcaacattgcgtatggtttaggtaacactaaccaccatctactcaccttgcttggtctcacagggttcctctgccggtggcgtcgccttcttcttgagcgcccgaattccgaagagcggcagtccgttctcgtccgttggacccacaccataactggaggtgatcgagtcctcttcgcgctgcttgttgcgtgtgttggtagtgctgctggagctcgttgtggtgctggaactggtcattgtgcgagtgatcttgccactgctcgaagtggtactagaggtggatcctttccggggagtgcttccattcgtttgtggaacggtggcatggcccttcaacactttcgagcgatctgcccaaatgggtccttgagctggcttgctgggagcaccacgggtggtgcttgtggtggtgaccttagtggttgtggtggtgctcctgtctccgggcgattgctttcccggcggactaatgcggcgcttctgcgcgggactggcactcctttccctcggctttactggcggcttaccatgaggtgatgtttttcccggagctattggtgttgtgctgtccacctgttccactctctgttgttgctgtcggcgacttgtggtggtgcgcacttccttggtctttacttcagcagcgcccgcaggactttgatctcgcctgatcttgggtagtggtgaactcttgcccggagttgtgctcgtggttatggtcgtgatggtggtagttgtacccgcattgatcatattcttgcgtataagacgcatttgtgcacgaatgcggcgacgcatttcgtagctggcaactgtttccaaaagcttctccagtcgctgcaaatcgaaaatttcctcgatctccagctccaaatcggagtcctcatccttgcccttcagcgatgtctttcttggctcatctgcacctcttgacgaagactttcttggcacatcgaatttcacggatgagttgggattgcgtggctccacaggagagtcatcctccatggaggactttctggaatagtgactcttattgatctccagcgaatcgcgtcgaatgtgctcaagggaactctttgtatgatccatgtacgagggacggcgaccagttggctcggaatccacgtgtgtttcgtgaacaggttcaaacacattcctgcggctagccacatttcgtccagtggtgttcgtcgtgtaagtggtggtgatgctcttttctgtaagggattcaatgggtatgatttcgggttcgtctttggatgggttagttgaagtcggttttggggtagttgtcttgatggtgctcgggtgctcagtggtggtggtggtgttggtggaggtcgtgttcaaattggtggaggtgcgtctactgggcgatcgggagggagatcgcgatagcgatcgcgatgacgttggggatgggctctttccttgcggcttctcgctgatgtgggaaggtggcgcaggtcccaccacctctacgtcaacatcaacatcttgaacaacccatgactgctgactgatttgctccattcgtttggaaatgctggtggtcttgggtggtggcgattgcgctggggaattggccgagggagtggtttttctggttcccggcttgctcacattggtcacctgatttctgtacgatctcttctcttcggtaatcaagttggtgctgggactaggtcgaccacgagttccatttaatttagttggcgatggcgtagtgctggacttgcgctctggcgtgcgctggccaaatacagacgggcggttaaggatatccttttgacgcttcatttcaatagctgtggtgtgtgtctttgtcattggcagaggttcatcatcgaattcttcttcgggggagaattcgggctcatcttcggattgtctcagtggttccttgcgtggttccttttggggtgtctttttggtcaccctttctggttcctctttgagcttggtttgagattccttttggggcacctttggttcccttttgttcaccttttcgggttcatctttaactttcgaaagtggttgtttcttgggttccaatggggtttccttttgagttacctttggctccctttgaggttgctttttaggctcccattgtgacactttttgtgaaacctttgcctgatacttgggcacccttgcagattcttctttgaccttggtttgaggtgatttcttctgtagcttttccggttcggcctttgaatcccgacgtgtctctctggtttccttagtttgttgtttgaattcctttagggtttccttcttagttacagtttgggtgatctcttcctccgtctcgagttggctagtctgatcgtcgtcctccacatctgtgtcccgatctaactctggttcagactcttcatccaattcgcgttctggctcgctctgtcgggaaatatgacgctcaatattggctactagacgtggtgacttctgtggcatagtgggcgctaacttctcggctgtgtcgatgaacttgtgtactttctgggagacgctcagagtacaatcgtcgcgcagaagctcctcatctatctcctccaatcctggacgctcgatctcaggtcgagaagggagtgacgtaggcctgataacattctcggcagtgcgcaagaacttgtctactttctgattgatgctaagcagacaatcgtcattttccggaatcttggcgttcacatcaaattccctgctaaatggcgcggaaacctttggctccttaaccttttcggctgagtgagtgaatcgagagaccttctcgtgcacactcaatagactttcgtccgtatcgggagtatttacgggatagtctaggctcttgggagcctccacagtggggttatccagaatatcaacctctatgccatttgagctatgcaattcggaaatttgacacccgacataggtttgagattcttcctcgaaaatcggaatatttgtgacctgtggcttgcgacgcggctcatcatcgggctcctgtacaacatccggataacggggctttcccgtttccagttcagcgggcacaggagttggcacaatcctatccggagatggttccctagagctcttcgcctgctggatatcgatgattacaccctctatatcagtggccgtgttgatgcgctgctcgctcagattgatcgtcttggtggtgcagcacttgctgggtcggctcctatctccacctggcttaaggctactcatctcaggatgaggcttagtaccgctcatcttaatgatattttcgcttgtggagcgcgtgaccttctcggctttatcgcgtcgagtcactcggggcacaggtgctgactccttgcgctccgttaccggaagctttctaattggactgggtacatttccggtgccaccttgggatcgtctctccgttttcggtgacttgggcgccatgtgatctatgatgatctccgtgtgtacggaaatattgctagatcggcgacgttcgttacctaccctggtgggactggcatctggggaagaggagtctccgtctacgtcatcttctggattacgcgtttgtgccggcgtgggcgtcctggtctgttgtggagaagttttttgcttgcgcggcgaagagcgaagacgatccttaatcgaaggcgagccattcgtatcgctgggctttcgaccctgccgagtggttgtggtcgttgttgtgatacgtgtctcctccaccagactatcccgcttgcgacccgtcagggaatccttgcgaggactcttcccggctgggacctttgattgtggttctttgagcggcagtggctgcttggttttagtggtgcgtgaattgcgacgttcggtttcagtttttgtgacacttacactggtcgtcttcttggtctccgattctgaatccttttccggctccgattcagtttcgggtactctctctggaatcttttgcgatggcttcgtattctttttgggagttgttggacttggagtacgcggtctctggctgattttctctacaactgtttttccccggcaatcgatgatcttttcggtcacaaagtttgactccacttcgttgggtatcttcctaccagaaacgggagatactgatggcgatgcagtaggagaaggaggctgttgactcttaggaactctacgttcaggagaaggagaccacctgggagagggagactttgatccctccttggtaataacaatggtggtctcttcatttatattaatggtctcggcatcctcttttggattgcgaggactctccttgggatattgagaagtttctggttcttttggatacctctcttgttcctgaggatatcttggagtttcttctgtcttgaattgaacaggactctgtcccttctttggaatgctgggaatcctttgatcatttctgggagatttgggagtttctggtccttttggatattttgggctatcctcttccttgggtgactttttcgatgggttaaccagaatctccacatcctctgcttcggtcacatccacaaagagctcctcttccaccttaatcttcggttgcgtgcgtaccacatatgtctccgtcacacgacgcggcttatcatcttcgtcatcattggggcaatcctcgatcttaacttgaatggtttctatggttgtgtgggaaacatttacatcttcctgttcgttattcggtcgctcagtataagttccctgagtatcgccatcttcctccatacccaaaatctggcgacagcgatcctcgaaggtctcgcgacgagtcaagccctttttgcggtaggtgggtgactccttgacttcgggttgagcctcaacttcagtggtcttggaaggaaatccaccatctggactttcaatcgtctcagacggcttggtgttcggttcagcattagctgggatctgtggtttcttttcggaaatgggctgattctggttatctcgttcgttcgttataaattcttcgtttagattgtttgtggttcgtttctgtgtagtggtaatggtgctgcggaatatttcctcctcccgtctctgctggttggttagatccttctccgggctttggcggctcttctggggaacatccttgggcaactgtttctcaggactttggcgaggtgaaatacgaggaagaccaggaccttgatcgcgagtctttgggtcgggtatttgcttctcgggactttgacggggagaaacactaggttgccttactgcaggaaccttttcggggctctgggcacggggcaattgcttttcgggactttgacgaggtgagacttggggttgggtccatccaggagtcttctcgggactgcgagcacggggaaactgtttttcaggttggcttggcgtgtagacctcatgtgtttgcttaaaggccggctgctccttctcaggactttgtctgggtgttgccctaggctgtggtttctcgggactttgggacctagtcgctggttttccaggactttgagccctaggtgatggaattttcggcgaaccaggagctccgctcgtctcttcgataagaattagctcgtcaatcgagatctcccgatcctgggagacgcgacgaccctcaaaagtggtttcccgctgcacctgacgtggctccacactgggcgacttggagctacgcctcagctgtggctccggttcgtcgtggggcctcctcatttggtggggcttcttgttggctgcaacggatcagggcataagactgggggacgcaaggcgctatgtgaactcgtctacttcttcaaccgttgtgtgtttggtgaacgtatgttgtgtctactatggcatagcccttgttaattggttaggattagttacatctacgctgtcagcttccgctacggatgttaggcaaagtctacggtattggtattaggcaggcacaggcacgttctcaggcaatatcgaaccaaatagaaatacacccattagtggaagctcgagagaaagaaatgttagacttgtagtggtagagttaagggcgcagatctctttcagtctgccacccacagaattggcatcccattttgtgattgattcagtgcaaattcggcttttttgtgtaatgtgcttggtcaagacattgaacattgaacatttcatagttgcggttttggtaaacagttttcaagtatatttatttgcaaaaaaatccaaaaaataaagaagtaaagatagcatagttaggtgtacagagtttcttgattttattgttttttttttatttttgtatttatttttttttttttgcctactttcgggtagtggttgaattcaagccttaccaggggtccctgagctctcgggcgtctcggggttttccccctcatttcccagctggtaatattgacgccgcacacagggtgcctcttccaccacctttgcctcattagcgctcagcttcaccttgcggatcggctgggagtcggtatcggtagcaggttcgattgcagattttttcgggtgattctggagattgtcggaggtggcggtggtggtggtggttgttgttgttgttgtattgcgggtggtggttagtgttggttcgttgttaatagtaggaggagtagttggtggcagagagaatatatcgccgggcttagtggtagtatacgtatactgtgatagcttgttatctgaaggatatacattcatatacatagttcatagttccaatatttatatagcatatatattcatgtggtttctattattattttttttttttttctaaaaaagtcatcaaacttttttttttttctctaattcgtacctggtggtgcggaactggctggtgctgaggtgggtggtgcagcggttgtgggtgaggctggtgctggactgggactggacttggtggtaatggtagtcgtggtggtggtcacacttcctcctgcctttggggtgggcgaccttggctcgctggcagttttcaccggcttggtggtcttggtcttgatggtgttgctggtaacattaccaccggtggtgtgcctagtcacagtggtcgaactgatcctgctcgattccgatggcgcctggctgtcatgggaaccctcacgcatttcccgacggaaggtgcgattcgaggaaacgctcgatcgtggcgtctgatggtgtgaacccaccgaggtggtgctgtccgccggcgaactgctgcgcagcgaggcggcaaatgcccgatgggcggcgtccacttcgcgctccttttgcagctgacgccgcgtcaacggctccgaagtggtggttgtcttggtggtggtgctacctccagtgttgctgggccgcgattgactcggtttgccagccggtccgcgtggcgaactggcgtaatcgtctcgtggctgagatcgacgtggacttccggatcgcggagtcgagtgcgatggggcattgggatgctcaacctgtgtctcaatgatccgttccgtgttcgtcttgcgattggcgctctgattgcgactcaccgtcttggacgtgtgcaacacctcaccatcgggttgatcgggacgagtgcttgttgtggttgtacgcaccgaaggaaaaccatgagtgctaaaatcctcctccaccggctgacgtctggtggcgggttgctcccagctgggtgtcggtgcctccctcagcttctgtggagacctctgcggctcttggtaatcatcgcccacaacttccgtttcgatggtgcgctgtgagctggtctgttgcttcacttggcggctcttctccgaacgtaccaccaccacctcctcgccagcaatgccgggtctttgcgagggatattcctgtgtggccttattcggacgcaccgaggggaaaccatgggtgctaaaatccttggccggcgactgacgtggtgaatgggatggtggggcgtaagagggtgtcggtgccttctgcaccaccctggatgtaggctgatcacggtcatcgtactcctccacggtctccgaggtggtttccgtggagaaacgtcgactggacttcttcaccgaggagaagctctgcgactccgtcacatgcttttgctccacattgtccactacatcacgagtttggctatcctgctcatcctgctcgcggcgctgattgtggacttggttacgggtttgattgtgtgtctggttgttggtctgcttgtgcgttgtatgactctgactgggagtaagttgctccgtctcgtagcgcttgtttttgacaatggttccgtccggcaggcgcttaacagtagtgatcatcttgacattaggcttgggatactccaccgtattagagattatctcgccgggttgctccattagatgttggacatggcgttgatactccggcgatgccttgtccatgtccacatagcgcttgttctcctcgtaatgctgttgggtctggacattccgggtgctgttgctttgctcgcggctctccgtgaatcgctcctgctgccgttggacctgctcctggcgttggatctgctcctgacgctggatttgctcctgccgctggaattcctcctggcgctgcagttgctcttggcgaatctgttgctcttggcgctgctcctgaatgcgctgctcttgacgcctctgatcctgctcccactcgcgggtctgatgctgcttatgtggcttctcctggttatccagcagataacgcggctcatcgccatactccacggtggacgaagaagacaccaccttggatgaggacgaggtggaggtggagctcatcttcatctcggtgcgaccactggtctcgtcaccaaagaccaccgtctcttggagctgggtcttcgagctatcggaggcctgtttcacaaagttcttgtcatcgccctgatgggaggcactcgagcgctgctcgttgcgacctttaaactcggccaggccaccaccattgagcttctccacgcctgcgtttgtgttggtgttcgttcgtcggttggttcgttgggtggaggaagttcgagtggtcgagtggtcgagtggtcgagtggtggacatggacatacagaacaaacagagttgggttatacacaaaacttcaccgacaagggacaagggggttagatcgctcaggcatttaccgtaatctcagttggctaacttatatgacttgtaaaaccaacaatttgctatcaatatgataacaagtccatagagtcagtgagttaccagcaaatgcctgtgtttttggacagctttggtgccagccagacaaagggggctaccaccaagcaaaacgaatagtcacttaccatctgttttggccagagtttcggtacgataggcccgtccatcgggactgacctccgaggaggtctgcacatcccaaccggtggtgttcggctggctgagcgtcattgaatggaatcgcagctcatgcgtgggactagtcgaatcgcgcacctccttagacttgaggctctggaaattctggtcgagcagggcatcgccgtggctggtggccaacggatccttgcccgcgtaaccggccagcgtgttcacgttgccatgtccgtttccgttgggctccgacattgggtccgtttcgtgtctatagaggttgcaaagtcgcgactcgcgcagcttatagagatgcgatcggatctgcctcttgcgctcactgtcctcggactgctgccactgaaaggaaggagaaggagaaaattccattaaaataataaattccataagcgatataattgcaaaatatttccagtgtatctcgcttatatgcagtctcagcacttgttttattccaatgtagttcacccatttacgctctcaactcgttatgtgtagataggcccgtccttgggccaattaagccaagtgaactcgtgctcaagtttgagtgcctgcgagtggagtccaagtggagtgcagggagcccacgcttgtcgcttccagcggcttggatcgccttttatggcgcccgcgggccactaacaattagccggtcagccaacacaacaaatgcagccgccatcggctgactcagccactcagctttatagactgaaatcgaatcgaatgcccggttctagccggtgaaacgatgatgatgatgataaagatgacgcccccaataagttctcagatttcaatggcagaagcaaccgatgaccaaaaatggttgagattagcgtaagggtaacaaattgaatgattcagaccaacgaaatgattgatggagattggtttttttttttttgtgtagaaatagagcaacaagtatacaaagaatcgatgacacgcaagagagtcacctaaatccgaattcagtttacgggaatttgctccatttacgcccttattccctggaaatcccttaaactttcgcatagttcccttatcagaatcgaatcgaatttgagggctgacgttttagcttataaataaaacatggaacaattcgcactgaccgataagcggatcgtattggcctcaacaaagagcctagcacgatcatatttatttaaacaatgatctagaaaggtggtagacttaatagagggagagaaagagagaactagcgagtgagcgagtgaaagagagaggggtgctagatgagatagcgcgatcgaaatatagttagcaaacacaaattgagtgaagttgatgcggtgatatcacctcacctcaacacaaccagtttcgctatagcggaaaaacatgtcaaataacatttgtattaacaataatgacacctcgatctctgtgccgggtgacttaacttcgctaactgtttaaatttagccaaactgaggccatacgacaggcaaatgagaaacttcccgaaaccagatggaattgaaattacgaataatttgcagattagtagttaagattgggcattaaatttatgatgcatagaactgtattaatggataaaagtacatacattgggaagtggaattatgatttaatctaaagttttggctaatactattttcaaaatactagatattaacaggtatactctcattaataacatatgtatatggtagtaaatatcattctctcatgaccatctgttcaatttggcagccaaattgcaatacgttttaattagatcagccggtgaccaatggttttagagttatgaacaacctttccagcagatgccggagatttatgaacgctgtcgtttccgcctagttattagcgaaatctcatatttgtgggatccccagtgattgatatgcgaagttggtgctttcttttctgacaaaacggaacgacagatggcgctgccattactttcagcgctttcactcgcccaaatcaaccgattcgaattgacaaaataaaacaaaatgcgcgaaatcaaaatgagagatatgtatgtgcatctatgtgtgatgtgtgtgtgtgtgtgtgtgcgaaaagtttgcaactttgccttgttgttgttttcgtctatttgtttgtttgtttgtttgcccgcttgtgtttgctagtgtgtgattttttcaagaactggtcgcgtggtcgcagtctagacctgcgtcttaagtcgcctctgccagcgccgctgccagcagactccgactctctgagtgcactgcaaacaatttctaagcatctatatctacattcgttatcaaaactaaatagcggtataaagagtattcatattgaaaatgctctaagcgttctaatgataacggataaaaagaataacacacactttgctgctcagtgctcaatcggaactcgtttctttcagtgtagctgagcccctgtctctgcccgcaatgacgtaatttctaaaagtaccgggccgtctgactgagatgaagaagaagacgctgatttcgcacctctgcagcgacgtcggcagcggcaggcaacctgttggcgtcgacgccaacgccaacgccgactgcaactgcgactgcggatggaccgctcttgcctctcgctctgcgcccgctctcgccgtctctgtctgatgacgtgacgtgcgagatttcgttgatgtgcgaatgctgataaattattttgaagttttttttttcgcttcttagctgtttttgtttttcatttattaagctgtcgtgtcagcaacgttgacctccaacttttccgtttttttttttttttattttttttggttttggttttttgcgccaaaaccgaaatctttttgttattgaaattaaactttattaaaacttaattgaggtggaaatcaaaagagagaaagataaggtcgcggagtcaggcgggagctcccacttagccggtgcccactgtacagataaaccttggctgcgattagctcataactaaatgcttccccattcaatgcacatcaatccgagataggacatgaaatattcagaaatatgtcagatagtaagcgtttaaaaataatgcatattttactgatatatttccctgtagataagaacttcctatttttatcagtgatattggcagtaaacaagaacttaaaaaatgcaggtactttcagacttgccatgttaactgttattaagattggtttacaagttatatacagattttaattgttgatgtacttatattttaatgcaaattttgcattaatctttgaatgtcacacttatgcgtatggtttagcaattcacgatcagcaacttcacgttaatggtaccgagttcaattttttgtttttcagttactagcgagctctacaatacgctgaacaaaattgctttgcactttgctgccggcgttaattgccgtcacttgttctgtgtgctttgttgtgtatttttatggcaatttcgatttcgatttcaatttcaatttcgcttcaattcccgatcccgattccccttcaatctgtactgtgtggtgtgcatatgcatattaaagtgacccaattgccattgtccatacgcccaattgcgaatcaagaatccagaatcgagaatatatatatatagaatatagtctacaataatttgaattgtgtcatttttaggttgacaaaaacggtggtgtgcggtggcaaaaacatgtttatgtttgctttcgtggacttatttgtgctttcggtatcgctgttaattgtttgcctcttattttgggtatgacatcgccccaggtgaataaaacatggcactataaaaccacagcacagcagcaacaacaaagttctgaaagtggagcactttcgtgggccgtcgcttgcatacgaaaaagagaaccacgagaactggacgcacattagccggtcctcactgtctacagtgccatgggaaaacgtgaaaaaataactcaattttcggtttttggggtctctcggcattttgatcgatggacagctgtcaaatggttaggcgtgtgggaaattataatgcaagcttggatccataggtgatatatagccgacaatcgtcaccaaatcggtgggggccacagccagccgcaaagcaaacaaataagcagtataaatcttaagcccaataatgatctcatacatatacgaaaacggaattacgcatagtgtatatatgtatatatatgtatattccagacaattatcggagccacagtcattagtgcaggtggagtttttttgtttcgctggccggaaagccatttgcactgttttctcaaattatagttggctcaatttgaagccaagcttgagattcgcagttagtttgtctggctatcaaattggatagacattggaagccataattctatgctataagcaaacgatattttgtttagaattgaaatttccagttaagtaatcgtagcaccgcacaccaaaaggatcaattcgaattcgaataatacaatttgagatccacactcgaacctagaataaagacttctaggaaagtatatggttatatgatagtttccctaacttgaagcaacagatggtgttatatcgaatagcgcaaatttccttatagagaaggagattataccaggtggatagcgggcaatataaagtttagcatattgtgaacgttgaagatttatcggaacatcatctatctccgacaatgggagcaatttccatggctaattacaaccgaagccccgctccccgaaaataaatccctttcggctgtgatctggtttcgtgagtggaaaagtggaaaagcgtaagagcgtagaacagttggttgccaaggccgacggcccacggcggtgtaaacttgttcgccagtaattagatacactcccgattagcatatgcatacagtacatgcatatacatacaaagatacatatgcatatacgtacgtatatctctcctcgctttataactcttaactctttctatttggtaacgcccgcccccgcccttgtcagctgtttcagttgttctagttgtacgatcttcgatcaactaactggcgacgaaaacccacaaactgagcactaaattccccgataagatccgtttgtttgtttacaagccacttggcgcagttaaagatacatccagagatacataaataggcgtataaacagtacagctacaggtagcgctcgctaattggcaggcgtcgtttattttgtctttttattagagactatgagtgtgataattgccgaagtatgaaaacttttgggtggcatttaatgctttcaatcggttcatatcaataaatttgcaaaagcggacttaaaaataactattcaaggactgaaaaaaaaaaaatggcacaggtcaatttccccacgcaataagaaggtctgccatggattttaaacaccgcaattacgcgcaactatcgattgtgctgttaaataataaatcgtgggggtgtctttggccaacttgtttgcccttactgtagcttttgcattgcggccaacgatgactgtatcttacagatgtacaggtatagctacagttagcgactaactgttatgcaaagactggggggaaaaaaaaggttaagctaaactgtgcgaaagtgtgaaagttatgcgaagacggttgaggagtgaaagagacggggggttgagagagatggctttacgacctcttgttcgcagcttcttttacgttttactacccatattctggtcgaaatgacagagaattacctcaggtaaaaaagaattggtattccttttctttttttttgtatatttatttttttgtttcgtgaattcttctccttgctgctgtgttgttgttacgggagattctgtgtggttgagttgttattgcaccggcaaaaaatcacgttaaaaaaacacttggtgtaactaatcctgtgggtttctctctctcttccttctgttttttttttttttttactttcgtgcgattaacaaataactagaagtgtgtgtgtaaaaaaaaagcgatcgtcgttgactgttgtcgtttggatggttgttctttttcacggagcgtcggcacgttgcaatcgatcgagcaccaaaatcagactgaagtttccaatcagaatcaaagccgcctaaagtggccgctgtcgcttagacgtcgacggcgacgccggcagcgagccgagatatgaccgaatacgaaaaagcgacgaatacgaagatgacgcgaccgcccagccgcacagtggggcaaatcgagcaggttggcaaatgaaaatgtatgatccacacattcagcagttctctattaactcaggtgacaacatattggtttgaatacatgctttatatagagagctacagagatatatagctcaaacaatttgcctaaattggggtcaccaaattcaaagtttaccggctcataacttggtgaaaaatggtcgtatcatgaattgtaatactttctgcaactcggctcatcaagtacaagcagctggtttcattaactagttaagagataaaaaaaatttcaatcattttccataaaaattgacaaaatacagaaaaaaaaataattttaaataataattcagatttgtaggcaattaaattgccatcattttgagatatgccacatctaaattggagcaaaatgagcaaagttattggaaaataatgaaatgcaaaccattacaaaggtgtttaccaaaacgagtcacctttctgcaaaacaaaacaaaacaaatgccctcacttcactttaataaaagtgtaagtaatattttgttacattgctcatccgctgcgattgcattgaaacgtgttcaatttcggacttttgtgcaaagaatccgtgtccgtgcggatcgacaataataaatcacttgatcgtcggccggaggtgggtgtcattgttgcaatatgttaataaacacctttagcccaaccaaatgtgtgtgtgtgtggctcaaaactattttcagcatttttggaaaacactcgagccgctggcgcccaccattcccactgaaacgctgcgattcgaacgggcaccaaaaaaaaaaaaaaaaaattactcatcgacgttggcgcagacgttgcgcagacgcaaatggagacgcagacgtcgtgactagacggtcgttctaatttgccgcactgtccaccggccatttggtggcccactgtccaccgatgactgaccatttggccacttgctgcatttggccatttgccatacgcgggtgttttatttatgttttttatacattgttttttttttttaatatttttttttctttatattcgttactccgtggtgtgccaattcaactttggctcactgatttattcagcagtcgacggctggcgacccacgcgattttttgactcgcgcctgaatcgaattgaattgactggaatagaatcgaattgactcgaatcgaactcatactcgaagctgaattgaatcgcctcatggccaagaaactcggatcgtggccaaccagcgctgctttctggcggttttttggtttattctgagtcgagaactgagcgcccagggatgcgcacactatccttgatggtttttaaatatgcattcgattttaattgtataaatatttattactttataggaaatgctgtgtgtgtagaagcttcgctcgttaaattcaaataaatttcatttgattagataagaaagtgtttctaaattggcagaaatttgataagatttaatggcaaatttgattgtcattctcattgacattttaggtgttgtctttacacctctaaaaaattggttatcttcgcgacaccactgtaatttattcaccattgtttatggacatattaatgtagtaaaagccgcatttgtgaattaaattaatgttatttgattagacaaggcattgctggctgacaagcttgagcaaaaccaaagttgatagatcaaaaaaaaaaaataaagaatgaccatccctggtcaaggaggaaggagcagagatagctggccgaaaagagaaaaaagagagcgcgcatggagcgggctcagaggccaaagctgaaattgattcatggccaatgagtcatcatcgcaggctttttatcagcgtccgtcgcagtcgcagcgcagtcactgcgcagtcgcagcacagcctcccaatttgtctctctcccaccctctttctcaccatatatacatatctctttcgcgtcccatctttctttctctttccaacaccgactgcgtgggctatctctcgtctgctgtttgccgcttcttcttcttcgtctggtctgttattgtcttataccctctataaaggtatgatataatgctcaaagtagtcgtagaatcattcataaatagatcataccatattctcgtttactttctatttcaatgttgatatgagtttccaaataatattttttttttcaggtttctaactttaagtaatattgctcttttttcgttataaatcattatacgatttttctttattttatatatatattttttttctgttttaaaagtaatccgtgcttcgattctgaaactatcacaacattcttagcttatacagatagatagatcatcatttatttggacagataccctcgatgcgacatcgtcatcgtttttccattgacttttctaacgactttttaacgattattgcaaatgtctgagccaagtcagcgactagcggcccacgcggccaagtgagctccagtgagcaaccccataaatgacccaatttggccaggttgaactgggtttggtttggactgcgactggcgactggcgattgcgactgactaaccgattgagtgaatctctggccatggatggtctggatcgcttctggccagttctcgaaattgtcgtctggggaaaaacagggctttaaaggcaatacgattggcattgagctgggaacggggacacaagtccgtcaaggagccaatgaactggcattcaatcgatgaactgcctcatggttgaactggacgccaatggagcttattgattttcatggatcataaacttaccatttttctcagcaattcctcattttgtatatcacccagatcgcattccacctccatggcaggaatgactgaaaaatagaagcaaaatgaatatataaatgaatattatgcgagatagtatagcttagacataagattaattccatagagggtggccagagagattgctcgttttgtcggatgatgcaattatttcgctgcacatttctcatgttgatttatttgatgatcatttgaatttgtcgttgccgcccggggctacgcaaaataaccgagcaatatcagttgccatcgatcatgatcagtagtgtttaggccactgtggacgacgaggcgagccagaatcggaatgggaatcgcaatcgtaatcggaatcgcatagaatagcccagaatcggtcagatccccacaccccaatgtgcgttgtgacatttcccccgtaaatggccaacttcaaacatggacagcatacatatacataaaatacaaaactagaaacgaaactacaaaacgaaaaacacagtcaagtgcatccattaatgcacgcagcaaaactgatgataatgtttgaatttcattagtattatatagttaacattctatttaggttctatttggctcattataaataactaagaatgataactaatctcaaaaattgaatttgaattatttcaaaaaggtatattgcacacattttcttgctgtgcattcgagttgcaagcttgattagcacggccgcaacattttggcttcgcttttggttagcatcaacgggctcggtcaactggcaatccattggtggggaggggcggagccgggaaaaagctcgggccaaagccaaacaagttcaaaaccacaattgggcaaacattgggcccaacattgagtcgagcaattgaacttgaaaactgagccagctcgaaagagagcaccttgcgattggtttttaggtggggatcgcatgttttgcgttctgtggatgggtctggtagaaaggttcggtcaagttaagctcaaatatgtctcaaagaattcatatattaatatgaataacaaaatttgtatattaatatagttgaatttcaaacattattaatctataatcctaatccttcccatttacgataactatttaaatgcaaacacaaatcaaatcattcagacgtcagacgagcagacatttaacgcatttatgggtcatccatcacaacagttgtccaataaagccatgtccgctggaccaaaagatacatatatatatattttttttttttagcacaatccgtatcttatacaaatcgcgtgggttggcgtgtggccaatgccctaagaatgccgattggcgatcgcataaaattcatgaattaccaaaacggcgaaacgaaaccgtcatattttgctgttggtcaattaaaaaacgttttattatcgaaaatcactccgtgtttttttttttttttttttgtaagtcaagatttatggcgagtaaaataagcataagcgtaaaatgggcaaattcaaagccaggcaataaaatacatgatttaatgcatgataccatgaaaatagcctaagcatcttaaagtttctttttttgatattatttaataagtttagactttaaacttttttttaatcagtgcctcccatgagcatagtattcgccgctaggtggcgccaggcggcaagaaaaccgcagaaatcaccgcaaaactgttagaattcctccaccaaacattgtagtcaatcttccgcccaatatatatatgtatatatatataactatatatatatcttacatatctgtagtacctgtgcaattgtacccacctgttgctgctgctgttttttgagcttattatcagagaaagacgtcgacttgaaggcttttgtaactttagacgacgcaacaacgagcagcaacgtatgtatttttgtgtacttgacaaatatttaaacagtaaatagtttaatttacggaaagatcaagttgcgcctgcctttccggcgaaaagttgccagcgacttgcgcgcggttaaaaacgcgggcgctactttgttttttttttgttttatttcaactctgccgattgtttgattgatttgcggtttatttgctggatgttgctgctgtcacacgcgactaataacgcgaaggagtcgggtttcaccttaaaacaaatactaattatttcacaaaaaaataaagcacgaagtgttgcagtgtcctgcaacaaaacagtcaaaaaaaaaaattaaacgcgtaaacactttaaaaattttttttttatttttcgaatgcaacagcgagtgagttttgatgttgggtttgtgcggcaagccaaaggaggcggagggctgaggggcgtggcgaatgatgcggttggcacgagcggaggctcttgactgattgcaagccgctgttgttgccgcatttaggcgcgggctctctcggcggcccaaagcggcggcgtcgacgccactgccactgcaacgctctctacacttggggaaaaacatgatcacaactaggaagtatgtccagcatatccagagagaagggagtgaaaaactgagacttaatgtggcttgcagcaagcatagcatactttgtggcgttctagatacgcaaattgtataggatcttaggatcttaataatagctgtgattatattaaacaccatcttattgatatgaaatttgggatacgagtggttattgaaaaaacaaagaagttgccttcaggtcgaaagtgtccatttcttaagctgctctttttatgaactatttttgcgagtgcatgcaacatgcatatctctcagcgtcagctgatcctgagcgataaggaaagtgagagcgagcgagagagcgacaaaacttgataatcccagctcatttgcatgactaatgaccactgggtgcgcaaatgggaggggtatatacgagtgtagtggaaagacaggaacaagaacacaaagataaagacaagaacataaacaggaacaaagtcaatgcctgccaaaccctttgcatatttttcttatgagactttgccatggcaatccaatatggatttctcgcgtgaattggaaaatttttcttttatcatgttatacaatacaattggcttgtgcaacttaaaacttaagtggtttttgggttatgagccaatataatagctgttttttaccatcaaaactgtgtgtgtttgccatatatttcagttgagatatctgatgttagagttaaggattaaggccttttcttctagatggatatagatgtagaacctgaaaaagaagaccagttcgaatggccttatcgctggtgtctgtcacaaaacatgaaaatggtcaggacgaggctgagg

SEQ ID NO: 7664 - DNA, 9807 bp, DROSOPHILA
ccacgcccctcagccctccgcctcctttggcttgccgcacaaacccaacatcaaaactcactcgctgttgcattcgaaaaataaaaaaaaaatttttaaagtgtttacgcgtttaatttttttttttgactgttttgttgcaggacactgcaacacttcgtgctttatttttttgtgaaataattagtatttgttttaaggtgaaacccgactccttcgcgttattagtcgcgtgtgacagcagcaacatccagcaaataaaccgcaaatcaatcaaacaatcggcagagttgaaataaaacaaaaaaaaaacaaagtagcgcccgcgtttttaaccgcgcgcaagtcgctggcaacttttcgccggaaaggcaggcgcaacttgatctttccgtaaattaaactatttactgtttaaatatttgtcaagtacacaaaaatacatacgttgctgctcgttgttgcgtcgtctaaagttacaaaagccttcaagtcgacgtctttctctgataataagctcaaaaaacagcagcagcaacagtcattcctgccatggaggtggaatgcgatctgggtgatatacaaaatgaggaattgctgagaaaaatgctcaatgccaatcgtattgcctttaaagccctgtttttccccagacgacaatttcgagaactggccagaagcgatccagaccatccatggccagagattcactcaatcgacagagacggcgagagcgggcgcagagcgagaggcaagagcggtccatccgcagtcgcagttgcagtcggcgttggcgttggcgtcgacgccaacaggttgcctgccgctgccgacgtcgctgcagagtggcagcagtccgaggacagtgagcgcaagaggcagatccgatcgcatctctataagctgcgcgagtcgcgactttgcaacctctatagacacgaaacggacccaatgtcggagcccaacggaaacggacatggcaacgtgaacacgctggccggttacgcgggcaaggatccgttggccaccagccacggcgatgccctgctcgaccagaatttccagagcctcaagtctaaggaggtgcgcgattcgactagtcccacgcatgagctgcgattccattcaatgacgctcagccagccgaacaccaccggttgggatgtgcagacctcctcggaggtcagtcccgatggacgggcctatcgtaccgaaactctggccaaaacagatgttttgtgtataacccaactctgtttgttctgtatgtccatgtccaccactcgaccactcgaccactcgaccactcgaacttcctccacccaacgaaccaaccgacgaacgaacaccaacacaaacgcaggcgtggagaagctcaatggtggtggcctggccgagtttaaaggtcgcaacgagcagcgctcgagtgcctcccatcagggcgatgacaagaactttgtgaaacaggcctccgatagctcgaagacccagctccaagagacggtggtctttggtgacgagaccagtggtcgcaccgagatgaagatgagctccacctccacctcgtcctcatccaaggtggtgtcttcttcgtccaccgtggagtatggcgatgagccgcgttatctgctggataaccaggagaagccacataagcagcatcagacccgcgagtgggagcaggatcagaggcgtcaagagcagcgcattcaggagcagcgccaagagcaacagattcgccaagagcaactgcagcgccaggaggaattccagcggcaggagcaaatccagcgtcaggagcagatccaacgccaggagcaggtccaacggcagcaggagcgattcacggagagccgcgagcaaagcaacagcacccggaatgtccagacccaacagcattacgaggagaacaagcgctatgtggacatggacaaggcatcgccggagtatcaacgccatgtccaacatctaatggagcaacccggcgagataatctctaatacggtggagtatcccaagcctaatgtcaagatgatcactactgttaagcgcctgccggacggaaccattgtcaaaaacaagcgctacgagacggagcaacttactcccagtcagagtcatacaacgcacaagcagaccaacaaccagacacacaatcaaacccgtaaccaagtccacaatcagcgccgcgagcaggatgagcaggatagccaaactcgtgatgtagtggacaatgtggagcaaaagcatgtgacggagtcgcagagcttctcctcggtgaagaagtccagtcgacgtttctccacggaaaccacctcggagaccgtggaggagtacgatgaccgtgatcagcctacatccagggtggtgcagaaggcaccgacaccctcttacgccccaccatcccattcaccacgtcagtcgccggccaaggattttagcacccatggtttcccctcggtgcgtccgaataaggccacacaggaatatccctcgcaaagacccggcattgctggcgaggaggtggtggtggtacgttcggagaagagccgccaagtgaagcaacagaccagctcacagcgcaccatcgaaacggaagttgtgggcgatgattaccaagagccgcagaggtctccacagaagctgagggaggcaccgacacccagctgggagcaacccgccaccagacgtcagccggtggaggaggattttagcactcatggttttccttcggtgcgtacaaccacaacaagcactcgtcccgatcaacccgatggtgaggtgttgcacacgtccaagacggtgagtcgcaatcagagcgccaatcgcaagacgaacacggaacggatcattgagacacaggttgagcatcccaatgccccatcgcactcgactccgcgatccggaagtccacgtcgatctcagccacgagacgattacgccagttcgccacgcggaccggctggcaaaccgagtcaatcgcggcccagcaacactggaggtagcaccaccaccaagacaaccaccacttcggagccgttgacgcggcgtcagctgcaaaaggagcgcgaagtggacgccgcccatcgggcatttgccgcctcgctgcgcagcagttcgccggcggacagcaccacctcggtgggttcacaccatcagacgccacgatcgagcgtttcctcgaatcgcaccttccgtcgggaaatgcgtgagggttcccatgacagccaggcgccatcggaatcgagcaggatcagttcgaccactgtgactaggcacaccaccggtggtaatgttaccagcaacaccatcaagaccaagaccaccaagccgaatcacccgaaaaaatctgcaatcgaacctgctaccgataccgactcccagccgatccgcaaggtgaagctgagcgctaatgaggcaaaggtggtggaagaggcaccctgtgtgcggcgtcaatattaccagctgggaaatgagggggaaaaccccgagacgcccgagagctcagggacccctgccaacaagaagccccaccaaatgaggaggccccacgacgaaccggagccacagctgaggcgtagctccaagtcgcccagtgtggagccacgtcaggtgcagcgggaaaccacttttgagggtcgtcgcgtctcccaggatcgggagatctcgattgacgagctaattcttatcgaagagacgagcggagctcctggttcgccgaaaattccatcacctagggctcaaagtcctggaaaaccagcgactaggtcccaaagtcccgagaaaccacagcctagggcaacacccagacaaagtcctgagaaggagcagccggcctttaagcaaacacatgaggtctacacgccaagccaacctgaaaaacagtttccccgtgctcgcagtcccgagaagactcctggatggacccaaccccaagtctcacctcgtcaaagtcccgaaaagcaattgccccgtgcccagagccccgaaaaggttcctgcagtaaggcaacctagtgtttctccccgtcaaagtcccgagaagcaaatacccgacccaaagactcgcgatcaaggtcctggtcttcctcgtatttcacctcgccaaagtcctgagaaacagttgcccaaggatgttccccagaagagccgccaaagcccggagaaggatctaaccaaccagcagagacgggaggaggaaatattccgcagcaccattaccactacacagaaacgaaccacaaacaatctaaacgaagaatttataacgaacgaacgagataaccagaatcagcccatttccgaaaagaaaccacagatcccagctaatgctgaaccgaacaccaagccgtctgagacgattgaaagtccagatggtggatttccttccaagaccactgaagttgaggctcaacccgaagtcaaggagtcacccacctaccgcaaaaagggcttgactcgtcgcgagaccttcgaggatcgctgtcgccagattttgggtatggaggaagatggcgatactcagggaacttatactgagcgaccgaataacgaacaggaagatgtaaatgtttcccacacaaccatagaaaccattcaagttaagatcgaggattgccccaatgatgacgaagatgataagccgcgtcgtgtgacggagacatatgtggtacgcacgcaaccgaagattaaggtggaagaggagctctttgtggatgtgaccgaagcagaggatgtggagattctggttaacccatcgaaaaagtcacccaaggaagaggatagcccaaaatatccaaaaggaccagaaactcccaaatctcccagaaatgatcaaaggattcccagcattccaaagaagggacagagtcctgttcaattcaagacagaagaaactccaagatatcctcaggaacaagagaggtatccaaaagaaccagaaacttctcaatatcccaaggagagtcctcgcaatccaaaagaggatgccgagaccattaatataaatgaagagaccaccattgttattaccaaggagggatcaaagtctccctctcccaggtggtctccttctcctgaacgtagagttcctaagagtcaacagcctccttctcctactgcatcgccatcagtatctcccgtttctggtaggaagatacccaacgaagtggagtcaaactttgtgaccgaaaagatcatcgattgccggggaaaaacagttgtagagaaaatcagccagagaccgcgtactccaagtccaacaactcccaaaaagaatacgaagccatcgcaaaagattccagagagagtacccgaaactgaatcggagccggaaaaggattcagaatcggagaccaagaagacgaccagtgtaagtgtcacaaaaactgaaaccgaacgtcgcaattcacgcaccactaaaaccaagcagccactgccgctcaaagaaccacaatcaaaggtcccagccgggaagagtcctcgcaaggattccctgacgggtcgcaagcgggatagtctggtggaggagacacgtatcacaacaacgaccacaaccactcggcagggtcgaaagcccagcgatacgaatggctcgccttcgattaaggatcgtcttcgctcttcgccgcgcaagcaaaaaacttctccacaacagaccaggacgcccacgccggcacaaacgcgtaatccagaagatgacgtagacggagactcctcttccccagatgccagtcccaccagggtaggtaacgaacgtcgccgatctagcaatatttccgtacacacggagatcatcatagatcacatggcgcccaagtcaccgaaaacggagagacgatcccaaggtggcaccggaaatgtacccagtccaattagaaagcttccggtaacggagcgcaaggagtcagcacctgtgccccgagtgactcgacgcgataaagccgagaaggtcacgcgctccacaagcgaaaatatcattaagatgagcggtactaagcctcatcctgagatgagtagccttaagccaggtggagataggagccgacccagcaagtgctgcaccaccaagacgatcaatctgagcgagcagcgcatcaacacggccactgatatagagggtgtaatcatcgatatccagcaggcgaagagctctagggaaccatctccggataggattgtgccaactcctgtgcccgctgaactggaaacgggaaagccccgttatccggatgttgtacaggagcccgatgatgagccgcgtcgcaagccacaggtcacaaatattccgattttcgaggaagaatctcaaacctatgtcgggtgtcaaatttccgaattgcatagctcaaatggcatagaggttgatattctggataaccccactgtggaggctcccaagagcctagactatcccgtaaatactcccgatacggacgaaagtctattgagtgtgcacgagaaggtctctcgattcactcactcagccgaaaaggttaaggagccaaaggtttccgcgccatttagcagggaatttgatgtgaacgccaagattccggaaaatgacgattgtctgcttagcatcaatcagaaagtagacaagttcttgcgcactgccgagaatgttatcaggcctacgtcactcccttctcgacctgagatcgagcgtccaggattggaggagatagatgaggagcttctgcgcgacgattgtactctgagcgtctcccagaaagtacacaagttcatcgacacagccgagaagttagcgcccactatgccacagaagtcaccacgtctagtagccaatattgagcgtcatatttcccgacagagcgagccagaacgcgaattggatgaagagtctgaaccagagttagatcgggacacagatgtggaggacgacgatcagactagccaactcgagacggaggaagagatcacccaaactgtaactaagaaggaaaccctaaaggaattcaaacaacaaactaaggaaaccagagagacacgtcgggattcaaaggccgaaccggaaaagctacagaagaaatcacctcaaaccaaggtcaaagaagaatctgcaagggtgcccaagtatcaggcaaaggtttcacaaaaagtgtcacaatgggagcctaaaaagcaacctcaaagggagccaaaggtaactcaaaaggaaaccccattggaacccaagaaacaaccactttcgaaagttaaagatgaacccgaaaaggtgaacaaaagggaaccaaaggtgccccaaaaggaatctcaaaccaagctcaaagaggaaccagaaagggtgaccaaaaagacaccccaaaaggaaccacgcaaggaaccactgagacaatccgaagatgagcccgaattctcccccgaagaagaattcgatgatgaacctctgccaatgacaaagacacacaccacagctattgaaatgaagcgtcaaaaggatatccttaaccgcccgtctgtatttggccagcgcacgccagagcgcaagtccagcactacgccatcgccaactaaattaaatggaactcgtggtcgacctagtcccagcaccaacttgattaccgaagagaagagatcgtacagaaatcaggtgaccaatgtgagcaagccgggaaccagaaaaaccactccctcggccaattccccagcgcaatcgccaccacccaagaccaccagcatttccaaacgaatggagcaaatcagtcagcagtcatgggttgttcaagatgttgatgttgacgtagaggtggtgggacctgcgccaccttcccacatcagcgagaagccgcaaggaaagagcccatccccaacgtcatcgcgatcgctatcgcgatctccctcccgatcgcccaaaaagagcatcaccaccacttacacgacgaacaccactggacgaaatgtggctagccgcaggaatgtgtttgaacctgttcacgaaacacacgtggattccgagccaactggtcgccgtccctcgtacatggatcatacaaagagttcccttgagcacattcgacgcgattcgctggagatcaataagagtcactattccagaaagtcctccatggaggatgactctcctgtggagccacgcaatcccaactcatccgtgaaattcgatgtgccaagaaagtcttcgtcaagaggtgcagatgagccaagaaagacatcgctgaagggcaaggatgaggactccgatttggagctggagatcgaggaaattttcgatttgcagcgactggagaagcttttggaaacagttgccagctacgaaatgcgtcgccgcattcgtgcacaaatgcgtcttatacgcaagaatatgatcaatgcgggtacaactaccaccatcacgaccataaccacgagcacaactccgggcaagagttcaccactacccaagatcaggcgagatcaaagtcctgcgggcgctgctgaagtaaagaccaaggaagtgcgcaccaccacaagtcgccgacagcaacaacagagagtggaacaggtggacagcacaacaccaatagctccgggaaaaacatcacctcatggtaagccgccagtaaagccgagggaaaggagtgccagtcccgcgcagaagcgccgcattagtccgccgggaaagcaatcgcccggagacaggagcaccaccacaaccactaaggtcaccaccacaagcaccacccgtggtgctcccagcaagccagctcaaggacccatttgggcagatcgctcgaaagtgttgaagggccatgccaccgttccacaaacgaatggaagcactccccggaaaggatccacctctagtaccacttcgagcagtggcaagatcactcgcacaatgaccagttccagcaccacaacgagctccagcagcactaccaacacacgcaacaagcagcgcgaagaggactcgatcacctccagttatggtgtgggtccaacggacgagaacggactgccgctcttcggaattcgggcgctcaagaagaaggcgacgccaccggcagaggaaccctgtgagaccaagcaagaagtcacaggttatgtgatcgaggagcagttctactcagataataagtcgccacctcgtcacgagcgcaaggaactcatctactcaagcaatgcggacgaactggccgccataaaacagcagcttcaggatgaggatgatagctcaccgccgctattggatgcccgcgtggtgcgtgagttcaagaaggtggagtcacagcaatcgctgcccgaggatgctcgttatgtacgccggggatcggtgaaggagcttagcgagaagttcattcgcaaggaatcctcctcatccacacattcgacccactcttcaatcgcccaatcgctggtgaggcatgaggatgagaccgaggatgatagcgaatccaatgacgtttgcagcgtgatcgaggcaccacagatgcgtcagaatcagagtcacaccatgagcaccactcgatccagcaacactcgttcattccttaacagcagtgccgatcagcgacaggtgaccagtgtggacgatgtcctcgagcgcatgcgaaatgcggataatgtcgaggagcccggagattctagcgaggatcgcgaggcccgtgctctgctcaacaaattcctgggagccagtgtcattatgcagggcgtggagagcatgttgccacccaccgccacgggtcagcgtctaaatagtcaaggcgtaagtagagaaaagcagatttttcaacaaaatcaaggggtttttaggcataacttcactaatatcgtccatacagacaaatga

SEQ ID NO: 7665 - protein, 2951 aa, DROSOPHILA
MSEPNGNGHGNVNTLAGYAGKDPLATSHGDALLDQNFQSLKSKEVRDSTSPTHELRFHSMTLSQPNTTGWDVQTSSEVSPDGRAYRTETLAKTDVLCITQLCLFCMSMSTTRPLDHSTTRTSSTQRTNRRTNTNTNAGVEKLNGGGLAEFKGRNEQRSSASHQGDDKNFVKQASDSSKTQLQETVVFGDETSGRTEMKMSSTSTSSSSKVVSSSSTVEYGDEPRYLLDNQEKPHKQHQTREWEQDQRRQEQRIQEQRQEQQIRQEQLQRQEEFQRQEQIQRQEQIQRQEQVQRQQERFTESREQSNSTRNVQTQQHYEENKRYVDMDKASPEYQRHVQHLMEQPGEIISNTVEYPKPNVKMITTVKRLPDGTIVKNKRYETEQLTPSQSHTTHKQTNNQTHNQTRNQVHNQRREQDEQDSQTRDVVDNVEQKHVTESQSFSSVKKSSRRFSTETTSETVEEYDDRDQPTSRVVQKAPTPSYAPPSHSPRQSPAKDFSTHGFPSVRPNKATQEYPSQRPGIAGEEVVVVRSEKSRQVKQQTSSQRTIETEVVGDDYQEPQRSPQKLREAPTPSWEQPATRRQPVEEDFSTHGFPSVRTTTTSTRPDQPDGEVLHTSKTVSRNQSANRKTNTERIIETQVEHPNAPSHSTPRSGSPRRSQPRDDYASSPRGPAGKPSQSRPSNTGGSTTTKTTTTSEPLTRRQLQKEREVDAAHRAFAASLRSSSPADSTTSVGSHHQTPRSSVSSNRTFRREMREGSHDSQAPSESSRISSTTVTRHTTGGNVTSNTIKTKTTKPNHPKKSAIEPATDTDSQPIRKVKLSANEAKVVEEAPCVRRQYYQLGNEGENPETPESSGTPANKKPHQMRRPHDEPEPQLRRSSKSPSVEPRQVQRETTFEGRRVSQDREISIDELILIEETSGAPGSPKIPSPRAQSPGKPATRSQSPEKPQPRATPRQSPEKEQPAFKQTHEVYTPSQPEKQFPRARSPEKTPGWTQPQVSPRQSPEKQLPRAQSPEKVPAVRQPSVSPRQSPEKQIPDPKTRDQGPGLPRISPRQSPEKQLPKDVPQKSRQSPEKDLTNQQRREEEIFRSTITTTQKRTTNNLNEEFITNERDNQNQPISEKKPQIPANAEPNTKPSETIESPDGGFPSKTTEVEAQPEVKESPTYRKKGLTRRETFEDRCRQILGMEEDGDTQGTYTERPNNEQEDVNVSHTTIETIQVKIEDCPNDDEDDKPRRVTETYVVRTQPKIKVEEELFVDVTEAEDVEILVNPSKKSPKEEDSPKYPKGPETPKSPRNDQRIPSIPKKGQSPVQFKTEETPRYPQEQERYPKEPETSQYPKESPRNPKEDAETININEETTIVITKEGSKSPSPRWSPSPERRVPKSQQPPSPTASPSVSPVSGRKIPNEVESNFVTEKIIDCRGKTVVEKISQRPRTPSPTTPKKNTKPSQKIPERVPETESEPEKDSESETKKTTSVSVTKTETERRNSRTTKTKQPLPLKEPQSKVPAGKSPRKDSLTGRKRDSLVEETRITTTTTTTRQGRKPSDTNGSPSIKDRLRSSPRKQKTSPQQTRTPTPAQTRNPEDDVDGDSSSPDASPTRVGNERRRSSNISVHTEIIIDHMAPKSPKTERRSQGGTGNVPSPIRKLPVTERKESAPVPRVTRRDKAEKVTRSTSENIIKMSGTKPHPEMSSLKPGGDRSRPSKCCTTKTINLSEQRINTATDIEGVIIDIQQAKSSREPSPDRIVPTPVPAELETGKPRYPDVVQEPDDEPRRKPQVTNIPIFEEESQTYVGCQISELHSSNGIEVDILDNPTVEAPKSLDYPVNTPDTDESLLSVHEKVSRFTHSAEKVKEPKVSAPFSREFDVNAKIPENDDCLLSINQKVDKFLRTAENVIRPTSLPSRPEIERPGLEEIDEELLRDDCTLSVSQKVHKFIDTAEKLAPTMPQKSPRLVANIERHISRQSEPERELDEESEPELDRDTDVEDDDQTSQLETEEEITQTVTKKETLKEFKQQTKETRETRRDSKAEPEKLQKKSPQTKVKEESARVPKYQAKVSQKVSQWEPKKQPQREPKVTQKETPLEPKKQPLSKVKDEPEKVNKREPKVPQKESQTKLKEEPERVTKKTPQKEPRKEPLRQSEDEPEFSPEEEFDDEPLPMTKTHTTAIEMKRQKDILNRPSVFGQRTPERKSSTTPSPTKLNGTRGRPSPSTNLITEEKRSYRNQVTNVSKPGTRKTTPSANSPAQSPPPKTTSISKRMEQISQQSWVVQDVDVDVEVVGPAPPSHISEKPQGKSPSPTSSRSLSRSPSRSPKKSITTTYTTNTTGRNVASRRNVFEPVHETHVDSEPTGRRPSYMDHTKSSLEHIRRDSLEINKSHYSRKSSMEDDSPVEPRNPNSSVKFDVPRKSSSRGADEPRKTSLKGKDEDSDLELEIEEIFDLQRLEKLLETVASYEMRRRIRAQMRLIRKNMINAGTTTTITTITTSTTPGKSSPLPKIRRDQSPAGAAEVKTKEVRTTTSRRQQQQRVEQVDSTTPIAPGKTSPHGKPPVKPRERSASPAQKRRISPPGKQSPGDRSTTTTTKVTTTSTTRGAPSKPAQGPIWADRSKVLKGHATVPQTNGSTPRKGSTSSTTSSSGKITRTMTSSSTTTSSSSTTNTRNKQREEDSITSSYGVGPTDENGLPLFGIRALKKKATPPAEEPCETKQEVTGYVIEEQFYSDNKSPPRHERKELIYSSNADELAAIKQQLQDEDDSSPPLLDARVVREFKKVESQQSLPEDARYVRRGSVKELSEKFIRKESSSSTHSTHSSIAQSLVRHEDETEDDSESNDVCSVIEAPQMRQNQSHTMSTTRSSNTRSFLNSSADQRQVTSVDDVLERMRNADNVEEPGDSSEDREARALLNKFLGASVIMQGVESMLPPTATGQRLNSQGVSREKQIFQQNQGVFRHNFTNIVHTDK

SEQ ID NO: 7666 - DNA, 3041 bp, DROSOPHILA
ttatacgcttgtccttgatgatgttgctattgccatagagcggcttcttgtagactatcttggatgcctccaaatggatggctagcagaagtgtcagcagcagcagggaatttttaaaggcgcctgatatatgaaatatatacgatatgaaatgtgttctttagctaatattactttcaaagcttacccatcttggtatctacggaaacactgaatacttctgcctttgcgccatccattttatataagccattttcttacttggcttgcagtttttcaagatttcggtcttccattttagtcggcccccaacgaagttcaagttgtgagaaccggcaaaattgtgtcagggttaagtctgattaagcagaattttcacacaaagcgagtggaattcattcatttggaggaaagtgagaagaaagaaaaagaattacttccgaaaattatgcgtaatcaataaacccaaaagttgtgtcttgagctgcacaaagtttaccttaccgttctaaactactttccaaaatctttttaaatatcccgccaaactgcaatgaaactgttatgattataataacataatggataacataaataaacggccgattaaacagcaattattatccaaattatacaagttataatatggtaatattaacaaacatttcaacataagcaaagctttggtttttaatctaattatagatttaatttaattttcattttttggtttgtttttcgttaagttagtattttttgcgctgtttatggaacttaacagaaataccaatcaatattgggcggccaacatttgaaatataaatacagattatcgatatgtatcttgaacgaagttttaaatgtttgttatttgttaaactcaacaatcctatagatttatgccataaaaatgtcaaaattatcgttgcttcaaatgatttaagtacaaaattcgagtttcgataaacggttaacagtgccgtactcaccacggtgcgcccaacagcacgcacacacagccggctgtggtgggttcgctggacaggcagtgtggtgaatatactagttgctggagcttgccgcaaaaaaaaaaaaaaagaaaacaaaacagatcgaaaaacacagcaaacaacaaaattatacgccattaattacccgataaacttaccgatggccgataagcaacggctaagtgatccgtaacacccagcgataagatccagataagattggaattaaattttgggtttgccatccgcatcgaaatcgccgcaatcggaatttacttgtacaccagccaactcgccgttcaagacgtccaagttttttttaatccagaaatcccatacactgccaaaatgcccgaatatgtgccggcacggggcttcaaggagatggaaaatctgatcaagctgtacgagaaccagcgcagccccatctacatctacttctacggcgagaaagacaaggacggacgcagctggtgtccggactgcgtggcgggtaggtgacgaattctcctcgcccagcggggcgttactagtccagttgggcactctacattctgcttatcacgcttctcatttgtgggtttcagttagttactttctacccagctaacttgagttacttttgatttgattttcgctctccattgagagttccatctacattgtacattgtcctcatcatttcgattcatttcatcgcagagttataacataacataaagaagtgacatacattaagttaatcccattatcgctgatattttccagccgaggaaactatcatgagtgcctttcgcaaccacgcgccggcggattgcatgatcctggtggtggacgtgggtagccgggaatcctggataggcaaggacaacatgttccgaaagccgccatactcggtggaaggcataccgacccttatacgctggaagggcgtggagcgcctggatggggatcagctgctcaagtcgagtcttctggagctctttttcgaggagaccgatccgaagaagtccaattttgtcgcccaataaaacgcgatttggctttggcttaaactcactcccactctcagtctctctctctatcactctctctctctctctctcgctgcggctctctttctctttgctgctttgcgctcaactcggtggaaagaacgagtgaaattgtcgttgggaggggtggtgctaaaaaaggggggaatggagaaatgggggagaacagaatgagtggagcatttctggctggcagcgcgtcgctcggcatttactcgtttatttgcacgcatgtcgtcgaccaggacgaatcgtttggcagagcgcggctgaaaaaggaatcgaaaacggggctataacggtaatagcggcacacgcgtccaacggtaaacacgcgtgccaacgcgccatctcgctcgcacgcgctaatgccgcgatttaagttttgttttattttttgcaagtgttcgaatcaaaaagcctaacaaaacacaaaacccgaaacagttctcaagaaatacataggtaaatgcaaagtaagatatgtatatatgtagctaaacatagcggaaaagcgcagagtatcattgaatttgaagcacacgaccgcacagttttgcaagctgattaactgtaaacatgctgaacataaacaatggataaaaaaacatgatagatcctgcctaaaagtgaatggttataaattaagaatgggcttgcaacggtaaatcctgttgcgttttgctttaactgtttgaaaataaaaaaaaatatatatttaataatagaataataaaaggtttcgtaagtaaagtaacatcaaaactaaactaaaggtaaatgtataaattgatcaaatgttttaaaaagtaatacgttcaatatttagccaatgcaaaaccaggcaaacgcaatttaccgtaacttcttagccaaaaaccctgttgcttcggccgcgttgcatattaattgtgtggcaagactgttgcttcttctcgttcgatttgtttggtaacttttacgttaaatcattgac

SEQ ID NO: 7667 - DNA, 766 bp, DROSOPHILA
caacagcacgcacacacagccggctgtggtgggttcgctggacaggcagtgtggtgaatatactagttgctggagcttgccgcaaaaaaaaaaaaaaagaaaacaaaacagatcgaaaaacacagcaaacaacaaaattatacgccattaattacccgataaacttaccgatggccgataagcaacggctaagtgatccgtaacacccagcgataagatccagataagattggaattaaattttgggtttgccatccgcatcgaaatcgccgcaatcggaatttacttgtacaccagccaactcgccgttcaagacgtccaagttttttttaatccagaaatcccatacactgccaaaatgcccgaatatgtgccggcacggggcttcaaggagatggaaaatctgatcaagctgtacgagaaccagcgcagccccatctacatctacttctacggcgagaaagacaaggacggacgcagctggtgtccggactgcgtggcggccgaggaaactatcatgagtgcctttcgcaaccacgcgccggcggattgcatgatcctggtggtggacgtgggtagccgggaatcctggataggcaaggacaacatgttccgaaagccgccatactcggtggaaggcataccgacccttatacgctggaagggcgtggagcgcctggatggggatcagctgctcaagtcgagtcttctggagctctttttcgaggagaccgatccgaagaagtccaattttgtcgcccaataa

SEQ ID NO: 7668 - protein, 123 aa, DROSOPHILA
MENLIKLYENQRSPIYIYFYGEKDKDGRSWCPDCVAAEETIMSAFRNHAPADCMILVVDVGSRESWIGKDNMFRKPPYSVEGIPTLIRWKGVERLDGDQLLKSSLLELFFEETDPKKSNFVAQ

SEQ ID NO: 7669 - DNA, 7752 bp, DROSOPHILA
ccgcacacacagtacctacctatcgtcagcggtgggcgcgtgaggcgataacttctcgattagctagagctgtgtcacggcagccaggggaggatacaaaggaaaaatgtcaaattacttatttacaatttggcatagaattgttttattttgttttttatttatattaagccaattaacagctttgttgtacgtaatttagaaatcacggccaaccactatcgatataatttagcgaacgagtcacgacattatggatgtagcccatccctatttacttgtcaaaacagcaaattttcattcgggccaagaatcgactgaaaatatgtccgctattctaaaccacgcaattcgccgccaattcggcgcttctgccgcccggaatatgtccggcaccgccgccgtggccggcgagcactctggtaagtgaccgtccagcgtcccaattgccaaattcatccccttttgtaaggttaaggttatgtaatttaccattgggcaagatcgattggtggagaaggattcgctcttataacacatcctttcatgctcatctcatctctcatccttcaggtggctacaaggtgtggaagcgcctgtccttcttcgtggccgtgcccgccgtgggactgtgcatgctgaacgcctacctgaagcaccaggaggagcacgacaagccccgccaggagttcgtcaagtacgactacctgcgccgccgcgagaagcgcttcccctggggtgagggccagaagagcctgttccacaacccccacgttaacgccctgcccgacggctacgagcactaggtggccaccgtctccggttccctctgcgggatgtattcgttgtttggtagtgatagacgttaatgtaaactgaactttacgcggaaatacacagaaaacacatatacccaaactccagttggcgcttcaataaagatcaaattagagcgaggagagatcccataaagaccatttcaatgagcgacagcggaattctggtgaggagtttatttaaaaggccttcggttaaaggaaaaattaaaagttacaattaaatagaatttaaatttaagcataagcacggatgcacttttcgcatgcaatatattcaactactatcattattttgcggatcggcgattcttaaggttgcgttccagtttgtgatgaggcttgccttcgttctttcctgtcttctgagtgattctttgagcatcccgactgcgagtttggcgcacggattgctgggcatccttgggaggattggttttacgctgctttggaggcggcggcgtgaaggattcgtcgctatcgtctaggtggtcctcatagagagcatcgtcttctaagtattccgtcacgaattcttcctgcttcacattgtccatgtcttcaaaatcgtcaagatgttcctccttctcatcgacgccgccttctccttcgccgtcgtcttcgaactcgttctggtacggctccatttccaccacatgatcgtcctcgatgtggcgctgcaggcatttctgcgtcaagaagatgtggtcacagaactcgcaggcatggcgctcgctctgcttgtgctggtccatgtggctctcgacactgtcgatatcttcgatctgcttgcgacacatgggacatttcaggctggcggtggcatgaatgagcgcatgatccagtaggtcgttatagttgctgtacgacaccttgcactcactgcacacgaacgaggcgtcggaagtctgcgtgtgcgtgcgcaggtggcgcgagagatgatgcgacagcatgtaggacttgtggcagtacttgcagggataggctctcttcccggcgtgggcaaccaggtggcgggccagcttggaagcggtggaaaagcttctctcgcaatgctgacaggggaagggaagattggtggagtggactgtctgaaagtggacataatcgttagccggggcaatcccaaatatgcttgtcaacccacctcatgacgctccaatccctgcttgaaggcaaacgacttggtgcagacaccgcattggaacggacgcttcttctgatgtcgctcggcgtgcttctccatctcctggcgcgaaaggaagggcttctcgcagtacacgcagatgaacttgggtacgtccgtgtgggtgcgctcgtggcgatggagcaatgccttccgtgtgaaggctttcgagcagatggcgcacttgaatggccgctcgccggtgtgcacaaagttgtgcttggccaggtcgtacttggagaagaagctcttctcgcacaggagacactggaagctgcgcgagcgagtgtgattcagccgatggatctcgagcagctgctgcagcggaaaggagcgttcgcaatcgggacaggggaacacatcggtggccaccttctcggcgttcttggtcggatcatcttgatcgtccaatggcagatccgagtccagaacctctgtcactatggccacattgccactatcatctcgcttgactttgggtgtggccaggcgcggttccaccggagcggcgggtcccttgttcaagatcctaatcgaggacttgttcagcaccttcggcttgacgggtgatgccttctgggggatatcggggaactccttctctagctcactggccatatcctccagcatgctctgcacatcgtccatggacagctcctggttgttatccaccttcagctcataggcgtgcgaacgacgtggcactggagaggaaccggctaccgtcctgggggtcaccatggcgctctccagcacctggacgtcctcgatgatcacctgactactggatttggccattgtgttcagcagctttttgggcgtttcgcttggctcggctgtctttgctggcacgaccaacaacttcttggaagccaccatcgtcatgggcgcacggggcttctccagcggcgatggccagttacccgtgagcggatactggcgcaggagggtctccgcccgcttgcacatctgcttgaagcggtagcagtgctcgaagaggaggcggcactccagacagatgtgccccggcattccgtcgccggcgtagacctgtttttaatgttagattagataaatgtgtgagtgactaggaagctacatttattcggggaagtccgtgcttaagccaaataataaggtaatattcgtggaacacccctatatgtttttcgctacataataaattaaacgccataaatgtctctttcccttaaaatgaacaatataatgttagagtttaaatttaaacaaaggcgccgaggaccagaacaccctctacaaattaatcgatggccaccaatcgatgattagtgctatcgacgagcggccatcgccgcttggcggcaagtgcatacacacgactacatgcaatcgcagtttgttttcgccgctcagagcacgcttaacctccgttaattgattgattaaacacgtccgactgtgagccataaaaggacattcgctcgatcgaaagccgacaaaagctggctgagaagcgcaaaacagctgcgctgcgcaaagtttggccaacgcagagcaatagaaaacagaagcagtgtcagaataaaacaagaatcagaccaaaaagggcgcaacaactgcggagagagaaaaggaaggaaagagcagcgcgtgagcgagggaggagcaggagggagcgaacaaaaggcaagaggaaacacaaggagaaacgcaaacaatcaaaacaagaacttaagcaagaaaaggggcgcaagatgaccgacgagtgcgtaaccagaaactacggagtaggcattcgcagcccaaatggatcggaaaatcggggcagctttataatggctgataataccgatgccaagggctgtacgccggagtctcttgttgttggtggtgcaactgcagcgaggtgagtccatgtgcctcgctctctccctctcccatctctctctttatgtttctgtgttttgttatcaatgcaagtactggcataactgctatatcctagtttcaaatgcagcatataaagctcttttttttttatttattccattttcattccacaatctattatttttatattatttatactgtctattgccaacatttaaaatcaatgtgtcaatctgtctttataatgttgttaaaatggctgaagtcacaaagtttgaaagcacttgactttaattctattgttctatttagtcttattcacaaatatatttgaaaataattacataaataaatacccaatcatcgattatttcgccgattaccttatcttatcatgctgcttcccaaatggctattataattctgatttctttttccccagccccttgccggccaacaagtttgtggctcgaatgcccgtggaacgatatgcaagcgaatacaacatgagtcacaagcaccgcggagttgcgctgatcttcaaccacgaattcttcgacataccctcgctgaagagccgcaccggaacaaatgtcgatgcccaagagctgaaaaaggcctttgaaaacctgggattcgcggtgtccgtgcacaaggactgcaagttgagggacatcctgaagcacgtggggaaggccgccgagttggaccacacggacaacgactgccttgcggtggccatactctcgcacggggagcacggctacctgtacgccaaggatacgcagtacaagctggacaacatctggcactacttcactgccaccttctgcccctcgctggcgggcaagccgaagctgttcttcatccaagcctgccagggcgatcgcttggacggaggcatcactctggagaagggcgttaccgagacggacggggagtcctcgacgagctacaagatacccatacacgccgactttctcttctcctactcgaccattccgggtaaggaatatgattaggtaactattttagtgaatttcactagcaatctcgtcctgttaggctacttctcctggcgcaacatcaacaatggctcctggtacatgcaatcgctgatccgcgagctgaacgccaatggcaaaaagtacgacctgctcaccctgcttacattcgttaaccagcgcgtagccctagactttgagtcgaacgtgcccgccacaccgatgatggatcgccagaagcaaataccgtgcctcacctccatgctgacgcgcatactgcgcttcggcgacaagccgaacggcaataaggctggctaggaagagatctcccttcgaagaagaactttcaacagaggttgtacaaccatcgcccgcaatcattcacgttggattccaattcacttcaagtttagttttagctgacgcgtgcgattatcccgatggatattgaagcacccgactccctttcattcattcccctgcctttcccatgcccatttcggccttatcattgacgaaattcgttacccatttacccactagatgacttccgtatgcataagcgagaccttgccaatagaaaacccacaaatttgagataagataatacaatgaagatttatacatacatacatacttttatgtacacgcaaacatttatatttgatatgaataaaaatgaattaaaaacatagcaaggtatctccccaattgaacgtagatgggtaatttcgatctaagcaactttgtttgaagacaggagctgtctgggccagattgagtacgttgatatgggaaataaaagataacaatgaagacttggttggctgaatcagtgaaattgtacgaaactttagtggaattcaaattagcattattaagagtgattaattaagatttttctcactctaattttattaatttcctaaattttatatttatttcctaattttataatttaggaaattaataaaattaaccaaatgatgatttttgcgtaaatataagtatcgaaggaactattaatgcatttaaatatgatctcgatttgaatttagcgccaaaaacaactgacagctgtcagggcgatcagctgttgacgcactagtgtgcgtgtggcgcagtacagttgccccaaatcgcagaaattttcatttttctttgcacaagaggaaaaagggaaagcccaatgattagccaactaattgggctgtaacctggtcgcacttttcaaggacattcggctgggaaagggaagcggggcagtttggagcggggaaacttagccaagacgcctcgcagtcgatgcggaaacccgcgatgcggcttcttagccaagttatgcgtggcgctggttagtgcaagccagaacccatggatggagccgcttacctcgatcgccgtgatggccataatctgcagcggcagattggcggttgttttcacccgcggattctcctcgaaaatcgaggccagcttctgctcggtcagacagaagcggcagaccctcttctcggtcagcatggcctcgcgcacctccagtttcgcggccatcggcaattggcggtaattcgttccgggcggcggtagaaacgcggaatttcacttgcaaagtgcgtacagattacaaatgagaggaaaacaatcgcttggcgtcgcttagagatgtgcactatgcagatatcgatgtttctgtgtgaattttgctagcgaaactttttgtttttattttacacaatcaagtatttgtcacaaatacaacgtcacactaatatgggatgacataaaaataaaaaatttatgccgagtccctttatcatccaggcagaatcacttttcatttgcacaaaccgccagggcgttgccggatcgctaatgtgtgctgccactcggtgcgcgtcctggtaaaatatcgatattttagctgctttttaactaaaagtaattttaagtcgaaacttttaactaaaactaaagtgctatgaaaatgtatgtattttttaaacgccaataaaacctaacttatatgcaataaatgttttcttttttaaagagtttgtgtattttagaaaacctgactttttattaggaaaccaacatttatcatacaaattcaggaaatatcaaatgaacatttttattaaacagaaagcttgcgatagttttcagtgtatttaagattttagcccactgatgcaattttgaaatccaccaatttcgaacccattgaaatgttaatttttcatttgacggtagaaaatacattaacctctatttaagctacttgtgtataaaatatatgtatatgcatatatactactcgtccgcgtccctcagacgagcctgcgtctgctggccgatgtcgtagatggcgttctgctggagcagctcgtgggcctcgtagcgcagggactcctcgtaggcgtactggatgctggtgtcgtaaatcatcagcttgcacttggccagcgcgaggatggagttcctcagccgggcgatcacctcccgatccgcgcgcggcacatgctcgttcaggttctgagcgaatcctccctcgccgccttcctcctcctggcccttggtcggcgatatccagatgtagccattgttgcccaggatcacggaggcgccgcagggcaggttgtggaagtgcatcttgcggcgcttgacgagagcggggaacaccttgaccaggatgccctgcgatagttttccatacttcaaactgcgcgtgtacagcgaaagggagccctcctcaaagatgttctggtggccagagaagaaagattatatagttactccagtaccagcaagttaggaagtacccacctggacctcggcagagatgagatcg

SEQ ID NO: 7670 - DNA, 2442 bp, DROSOPHILA
gcggtttgtgcaaatgaaaagtgattctgcctggatgataaagggactcggcataaattttttatttttatgtcatcccatattagtgtgacgttgtatttgtgacaaatacttgattgtgtaaaataaaaacaaaaagtttcgctagcaaaattcacacagaaacatcgatatctgcatagtgcacatctctaagcgacgccaagcgattgttttcctctcatttgtaatctgtacgcactttgcaagtgaaattccgcgtttctaccgccgcccggaacgaattaccgccaattgccgatggccgcgaaactggaggtgcgcgaggccatgctgaccgagaagagggtctgccgcttctgtctgaccgagcagaagctggcctcgattttcgaggagaatccgcgggtgaaaacaaccgccaatctgccgctgcagattatggccatcacggcgatcgaggtctacgccggcgacggaatgccggggcacatctgtctggagtgccgcctcctcttcgagcactgctaccgcttcaagcagatgtgcaagcgggcggagaccctcctgcgccagtatccgctcacgggtaactggccatcgccgctggagaagccccgtgcgcccatgacgatggtggcttccaagaagttgttggtcgtgccagcaaagacagccgagccaagcgaaacgcccaaaaagctgctgaacacaatggccaaatccagtagtcaggtgatcatcgaggacgtccaggtgctggagagcgccatggtgacccccaggacggtagccggttcctctccagtgccacgtcgttcgcacgcctatgagctgaaggtggataacaaccaggagctgtccatggacgatgtgcagagcatgctggaggatatggccagtgagctagagaaggagttccccgatatcccccagaaggcatcacccgtcaagccgaaggtgctgaacaagtcctcgattaggatcttgaacaagggacccgccgctccggtggaaccgcgcctggccacacccaaagtcaagcgagatgatagtggcaatgtggccatagtgacagaggttctggactcggatctgccattggacgatcaagatgatccgaccaagaacgccgagaaggtggccaccgatgtgttcccctgtcccgattgcgaacgctcctttccgctgcagcagctgctcgagatccatcggctgaatcacactcgctcgcgcagcttccagtgtctcctgtgcgagaagagcttcttctccaagtacgacctggccaagcacaactttgtgcacaccggcgagcggccattcaagtgcgccatctgctcgaaagccttcacacggaaggcattgctccatcgccacgagcgcacccacacggacgtacccaagttcatctgcgtgtactgcgagaagcccttcctttcgcgccaggagatggagaagcacgccgagcgacatcagaagaagcgtccgttccaatgcggtgtctgcaccaagtcgtttgccttcaagcagggattggagcgtcatgagcattgcgagagaagcttttccaccgcttccaagctggcccgccacctggttgcccacgccgggaagagagcctatccctgcaagtactgccacaagtcctacatgctgtcgcatcatctctcgcgccacctgcgcacgcacacgcagacttccgacgcctcgttcgtgtgcagtgagtgcaaggtgtcgtacagcaactataacgacctactggatcatgcgctcattcatgccaccgccagcctgaaatgtcccatgtgtcgcaagcagatcgaagatatcgacagtgtcgagagccacatggaccagcacaagcagagcgagcgccatgcctgcgagttctgtgaccacatcttcttgacgcagaaatgcctgcagcgccacatcgaggacgatcatgtggtggaaatggagccgtaccagaacgagttcgaagacgacggcgaaggagaaggcggcgtcgatgagaaggaggaacatcttgacgattttgaagacatggacaatgtgaagcaggaagaattcgtgacggaatacttagaagacgatgctctctatgaggaccacctagacgatagcgacgaatccttcacgccgccgcctccaaagcagcgtaaaaccaatcctcccaaggatgcccagcaatccgtgcgccaaactcgcagtcgggatgctcaaagaatcactcagaagacaggaaagaacgaaggcaagcctcatcacaaactggaacgcaaccttaagaatcgccgatccgcaaaataatgatagtagttgaatatattgcatgcgaaaagtgcatccgtgcttatgcttaaatttaaattctatttaattgtaacttttaatttttcctttaaccgaaggccttttaaataaactcctcaccag

SEQ ID NO: 7671 - protein, 562 aa, DROSOPHILA
MTMVASKKLLVVPAKTAEPSETPKKLLNTMAKSSSQVIIEDVQVLESAMVTPRTVAGSSPVPRRSHAYELKVDNNQELSMDDVQSMLEDMASELEKEFPDIPQKASPVKPKVLNKSSIRILNKGPAAPVEPRLATPKVKRDDSGNVAIVTEVLDSDLPLDDQDDPTKNAEKVATDVFPCPDCERSFPLQQLLEIHRLNHTRSRSFQCLLCEKSFFSKYDLAKHNFVHTGERPFKCAICSKAFTRKALLHRHERTHTDVPKFICVYCEKPFLSRQEMEKHAERHQKKRPFQCGVCTKSFAFKQGLERHEHCERSFSTASKLARHLVAHAGKRAYPCKYCHKSYMLSHHLSRHLRTHTQTSDASFVCSECKVSYSNYNDLLDHALIHATASLKCPMCRKQIEDIDSVESHMDQHKQSERHACEFCDHIFLTQKCLQRHIEDDHVVEMEPYQNEFEDDGEGEGGVDEKEEHLDDFEDMDNVKQEEFVTEYLEDDALYEDHLDDSDESFTPPPPKQRKTNPPKDAQQSVRQTRSRDAQRITQKTGKNEGKPHHKLERNLKNRRSAK

SEQ ID NO: 7672 - DNA, 3692 bp, DROSOPHILA
cgttatccaatcagaatatccccacattaaagtcattaagtcttgtgatcgcttcttaattaaagggaatatctttatgacttttcatacgccgctaatttaattcaaattcagtacatcttcaaatggaataccctgcttgctcagagcattattaaaagttcattaaagaataaagaaatattatttttaatcaagaaaggccataaatcagcgatctttccctccgaataattgcgtcacagggcgaccgaggattatactagggaaacatcagctgatgagcacgttgccccggcaaaaagtatattaaaacgattatatacaacatatagtattcggtactcgggtacctctatatttagtactctactttcgcagctgcgatcgacatttgtctttttgcacggaaaattgcaaaaatgccaggcaacaagcataaatactcgaaagattaaagacgaagcataaattatcacacttgtttgcggactttttattaacccattaatgttgaatatggcttaataaaaacgctattttgtccacagatcatcatcaccacagacgcgagttatgttgatggttcagtggtttttaaagccaaaatggatcgtaaaagtttaagcaaaaaaaaaaaaaggcaacaaaccgcacgcatttaatatagttgatattttgatgtgcagatgtcaaaatgctttcaggaggagaaagcggcaatatttgaccatttgttggcgggttaatgaaacatttatgtgcggctgcagaaacgctgggtattttatacgtttatatgtagttgaaatcataaatatcaggtgtatttttagcacagtcaagtgcaaggtgccgtgttttcagttgagactgctgctgccaaacatgtgtagattgaccctctgtcaggccaacacatcaagtcttttatgggccatcagtgcagtttttaaagtgcttgttttcttgttatttttcttcttttatttttttttgaatgcccctgaggcattcggtgggcattcagtcggtcaagttgaagtttatttaaattgcgcccatttggcggtagcacacggcgtatacttgatacttatctatgccacccgttcttttgcattttttcagtctgctgctctgtttcgtttagctgggccaacgaatggggctatccggacttggacaacaaccaggatgagcgtaagtaaaggcaatcgagtttatttgctaaaattagttaatcaacgccacgacgaatgggtcactcattgtcaagtgttttgcataccagagcgatccaaatctgctcggacatatcatccgtccgtttgcacgctttcggctcgagctagcctaaattattccaaattgttgtgtatgcaaattgaacatgaataataataaattccgacagatacttggacattattgtgaaaacttaaattctgcctacaggttttaattgacaaaaaagcatccaattgctgaatattttgatttatgagcatttatgttcaaataaaagttttgcttgtgcaaaaatttgcaatagtgcaaatcaatatgtaaaaaaacaagatgctttaatgaattatattagagttttaagtaaccaattgtataaagtttgattgatggtctttaaattgtaaatacaattttggagtgcgccaaaatttaaataatgaacatcaattagacaataaagtgcacatttttcgcggaatattgcaaataatgttgcttgtgcaaaataattctcgatttctgacattgatggatgtttttttttactttcgacagcatttccaaaatggggcggtctttgcgatagcggaaagaagcaaagccccataaatttgcacgtcaaaggcgcactgaagggagagtttgatgccctgaagttcgagaactatgacgagcatcagaagaatctgcgaatggtcaacaatggacattcaagtgagttggaaaataataagaagaaatcgaaaaaaatacccttcaaccgcgaaattcttttccaattacagttcaactatctggcttcgatcacgaactgaccctgagtggtggtgccctgctgcaagactttgtggtggagcagatccacatgcattggtggtcggagcacaccatcaacgacatccggtatccgctggaagtgcacatcgtgcaccggaataccatatacccgaacatgacaatggcggccaactttaaagatggcattgtggtcattggagtgctgtaccatgtgtccaacacgcccaacgaggccataggtagcatcatcaagagtttgggagccgttaagagctacgatagcatgaacaagcccgttctggtggcggattccctggcagtggatgacctggtgcccagtgtggagaactacttcacctacgccggctccctgaccacgcccacctgcgccgaggccgtcacatggattgtgctgaccgagaccttccccgtgaccctggaccaggtcaatgagttcaaggagatcgagtacgatgagggcaagcagctgcacaacaactacagggagctgcagagcgaaaacaatcgagctgtggtcctggtcgagcaacctgagcagagatcggggtcagcaggactcactgcatccgtatccttgggcctgatgaccctcatcctggcgggccagaagttcctgctttagatttgagatggacaacttgaagggagcagccaatgacatactcgtaccaaagaatcgtttaagacaacgaatttgtttaccaactattttaacaatttaacaaaaacaaaacggagacacaggagagcaacgtcagaccagacaatttatactcattaattgtaatgcagaacagaacaagaattcagctagtcagtttgtgtaaagttcattaagtgcaaagatcacagataataaatgaaacattttacaagcattcgtctcattcggattgatggttaaacggggcgtatgagcaacatgaaagtgaccgcttatttccgtttaaagttcacactaacaccattgaccaatattgctttatggccaagtgccaaaaatagacgatgaaccattcttctgcatattttgtcacaagaccccaggttagaatcggcatttttatagctcgtggtcagtgtgattccttgaaaggggactcatgccgagtgtagtgcccctcataaacgggaatagagtatttatcaccgcattgtattcagaaatcactgataactgcaaagcgtcgactgaccaattgcgctgcctgataacgctaattgatattggatggactctaaataaatcaactacactaacagcgggccatgcaatttgatttcgcttattgccggccacacttcatcatgattgttcgttgcgaaatgacactgcgattggagcgagtgtccagtggataagtttattgatgggacggctaattatacacatggtctcaactgtatcttatctgctgcagatacaagcacggcgaagagtccaaaataatctaaagtccaataagccgattgataactcaaaataaaattagggcttaatgttaagctgggcttcctgatcaaattgaacacgaatttcttaagtgagagctccaattatttgaaaagaatttaaaacacatgctttaaagattttttcgtgaatgtatttgtcaatttta

SEQ ID NO: 7673 - DNA, 909 bp, DROSOPHILA
atgcccctgaggcattcggtgggcattcagtcggtcaagttgaactgggccaacgaatggggctatccggacttggacaacaaccaggatgagccatttccaaaatggggcggtctttgcgatagcggaaagaagcaaagccccataaatttgcacgtcaaaggcgcactgaagggagagtttgatgccctgaagttcgagaactatgacgagcatcagaagaatctgcgaatggtcaacaatggacattcaattcaactatctggcttcgatcacgaactgaccctgagtggtggtgccctgctgcaagactttgtggtggagcagatccacatgcattggtggtcggagcacaccatcaacgacatccggtatccgctggaagtgcacatcgtgcaccggaataccatatacccgaacatgacaatggcggccaactttaaagatggcattgtggtcattggagtgctgtaccatgtgtccaacacgcccaacgaggccataggtagcatcatcaagagtttgggagccgttaagagctacgatagcatgaacaagcccgttctggtggcggattccctggcagtggatgacctggtgcccagtgtggagaactacttcacctacgccggctccctgaccacgcccacctgcgccgaggccgtcacatggattgtgctgaccgagaccttccccgtgaccctggaccaggtcaatgagttcaaggagatcgagtacgatgagggcaagcagctgcacaacaactacagggagctgcagagcgaaaacaatcgagctgtggtcctggtcgagcaacctgagcagagatcggggtcagcaggactcactgcatccgtatccttgggcctgatgaccctcatcctggcgggccagaagttcctgctttag

SEQ ID NO: 7674 - protein, 302 aa, DROSOPHILA
MPLRHSVGIQSVKLNWANEWGYPDLDNNQDEPFPKWGGLCDSGKKQSPINLHVKGALKGEFDALKFENYDEHQKNLRMVNNGHSIQLSGFDHELTLSGGALLQDFVVEQIHMHWWSEHTINDIRYPLEVHIVHRNTIYPNMTMAANFKDGIVVIGVLYHVSNTPNEAIGSIIKSLGAVKSYDSMNKPVLVADSLAVDDLVPSVENYFTYAGSLTTPTCAEAVTWIVLTETFPVTLDQVNEFKEIEYDEGKQLHNNYRELQSENNRAVVLVEQPEQRSGSAGLTASVSLGLMTLILAGQKFLL

SEQ ID NO: 7675 - DNA, 3866 bp, DROSOPHILA
acgcatctggcggttcttcttgctcagttccaggattttggtgctggcaatggaggagttgcagcgcagctcatcaatgggcacggagttgagcacctcgttgagcgaatcaaccgatttcttcaggtcggatatctcctgattcttctcatgaatggcctgggccagtgactgcttctcctgctcgcattcggatagctttttgcgcagctttttggactccggctttgttggctttggttttaccacagcggtggtcagcaccacatgggcagcggccatggcatcatggtcatgccgacgtcgagaggaacggcccactttgcaccccaacagctcctgatcccgatgggctacatactcttccggcaaagtctccatcgcaatgccctctagttgttcacataaaaatatacacaattgaatctaacaatttcgttggctgggcgaaaataatttgtacgtgtgcctgttcttgttactaaaatattcacaaattttggttgtcatcagttgtttctaggttattcaaatttaaacctcatttgaaacagacaaatcaaaggcaaggcaatttttaaatttggaactcttgtcataatcaggatttcttcaataataggtaagttaaaaataaacagagtttctgcaataataaaattgacattgacaattcttttcttgatctttccaaactgttgttttatttaagacaggataatttacatttaaaccgttattctttttttacatttacattattttattttaaataccccagcaaagtacggccaacgtcaagcaagccagccccccatgtgtttcaaattataatttaaaatataataataaaacaacgataacggcttagctaaaattcaaaaattttaacagtttttctagatagttttaactgtatctagctatttattttgtgactcgagttggcagtactgtttagttggtataatttagcggtcgcaatatggtcatactaaagtgacgtgtaagacacgaaaacaagtgaagatggacggatttatgatggtaaattgcaaaatacacaagtaactggcttaaaatcaaacccaacatgtgctgcaggatatcatcaagggcatgtgcatcatggacaacgatggcaaccgcatcctggccaagtactacgacaagaacatcctgtccacgttgaaggagcagaaggccttcgaaaagaatctgttcaataagacgcaccgctccaacacggagatcattatgctggacggactcacctgcgtgtacaagagcaacgtggacctcttcttctacgtgatgggcaacgcctacgagaacgagctcatcctgctgtccgtgctcaactgcctctacgattccattagcctgatcctcaagaagaacgttgagaagcgcctggtgctggaaaacctggagatcatcatgctggcatttgacgagatctgcgacggagggtgtgtattagcgtatacagtgatggatggaaagaacaagggaccaagttaaagcagctttcattagcagcagttcgtttagaaaacatcaaattattactacacaagttcccataaataacattgttatttactagtctatgagttaggccagctcaagtgaagcctctaagtagttaaccgcatttaaagcttccttttttttaacaaaacctagtcaagtccaatgaaaagttatatgataactgcgatgttagggtataggtacaaaagtttaattatataaatcaaactaaatattaaaatatattaaacttaaagattaaactaatacatacgagcactggcatcctaggcatgcagctcgtataagtttttaagtttataggctgagctttagaaatcacctgaggtacaaaaagatatactttgccattcatcactgtatattatgcattacatattattaaatacaaatattctatttaaacctttacccgttttccaaatagcattattctggatgcggatccctcgtcggtggtgaaacgcgttgatctgcgcaacgatgacattcccattgccgaacagaccgttgcccaggtaactaacacccttaatggtctattttggtagtctaactacttggtagctcttctaagtgtttataactcaatggtagccgtttgtactttaattttgtctggtttcgtttcgcaatttgataccctgcagtcaaatatattctcatttagttttacccgccctatgaacaaataattaggctctttgtttttcaagactatatgtagttagtaactgagttaatataagtttacaagctttacacatttgcctagatttatttgttattcgcatttttgtttaattacgatctattttcagtttcaacaaaagtgtttaaatgttgtaaaattgtacctattttaatgaatgcttccagataatattacttattacaatttaaagtagttgtgtcggcgtaaatttctttttaccttttgtacatgttaccgaatttcgattacttttccccatatcgccccattcattgtactccgagaatgttcaaaataaaattggtgaaaatgttctggaacttcgcgctcattttgatttgtttcattagctaattgatcgaaattattgccgagtatctgtatctatatatgtgtgtgctatctatcttttaggttctgcaatcggcacgtgaacaactcaaatggtccattctgaagtgatgtgaaatggggtggcggaagagaggaagccacttccgtgccgcgttgtcgcaatacattcgattcttcttttagcgcccacttgttttcgcctagttgtaaagcatataataatacatacatttaactggagagcactgcatgttttaatttagcattaaactactaactcggtgtgtcatagagtagccaaaggcaccgacgggcgattggagctgccaagttccgtttgcgccactataaatcttttgtgcgtggtatgcaatcgagttcttagataagggaaatcacctgaataaacaaggactgtatttaggcaaatctaataaaagctttgaagactttccagactaatactgaatgtattaaagagtattcccaggttcgttgctatcgagctgctatggcttatcgcagaactttatggtgttactgaagtccacaataattcttattttgcttaatcgatgaagtagcgcaagtagccatataatgccagaactgacccattcaacgcaacgcagatcggtcagtattacaataagataatgcaggcaggcattatgttgcaactgacagcgcaatcaccaatcatatgcagatggggtaaatcgaaaccacttgtctccagatacgaggataaagtatgtcgtaaacccacgtgaccagctggtgtccaagcaacttggcctgaagtggcacctaaaactgggagtgctagggtattaaagtctctttacgaggcagtgctaattattaagcgattaagcaccgataatctcaacatctttatagtaggggggcgcataaaaaagttctatttgaagaagcagttccaaacggctttcaacagctttgttttctggcaaactcaatgtaagggcattggcacttaaactcatatttgtttgatttatggccattacaaccaaatggattacctcttcgccatcgcatggggctattaaaagctttagttatgaaatgaagttctgcgttgcaggaaaagagggcaattaacgaagacttgttcaattgggggacttacatatcatctctctaaattgccttattccgtaactccgtttaatatctaaccaaacaataaaaaacaaacagctagcaattgtga

SEQ ID NO: 7676 - DNA, 662 bp, DROSOPHILA
tgacgtgtaagacacgaaaacaagtgaagatggacggatttatgatgatggacaacgatggcaaccgcatcctggccaagtactacgacaagaacatcctgtccacgttgaaggagcagaaggccttcgaaaagaatctgttcaataagacgcaccgctccaacacggagatcattatgctggacggactcacctgcgtgtacaagagcaacgtggacctcttcttctacgtgatgggcaacgcctacgagaacgagctcatcctgctgtccgtgctcaactgcctctacgattccattagcctgatcctcaagaagaacgttgagaagcgcctggtgctggaaaacctggagatcatcatgctggcatttgacgagatctgcgacggaggcattattctggatgcggatccctcgtcggtggtgaaacgcgttgatctgcgcaacgatgacattcccattgccgaacagaccgttgcccaggttctgcaatcggcacgtgaacaactcaaatggtccattctgaagtgatgtgaaatggggtggcggaagagaggaagccacttccgtgccgcgttgtcgcaatacattcgattcttcttttagcgcccacttgttttcgcctagttgtaaagcatataataatacatacatttaactgga

SEQ ID NO: 7677 - protein, 160 aa, DROSOPHILA
MDNDGNRILAKYYDKNILSTLKEQKAFEKNLFNKTHRSNTEIIMLDGLTCVYKSNVDLFFYVMGNAYENELILLSVLNCLYDSISLILKKNVEKRLVLENLEIIMLAFDEICDGGIILDADPSSVVKRVDLRNDDIPIAEQTVAQVLQSAREQLKWSILK

SEQ ID NO: 7678 - DNA, 6544 bp, DROSOPHILA
ttgatgacttcatcgaggggtccgcacttttcaagaagttggagaggaggtcagggcgcaggtgcgtcctttttagccaggacctcgaagcccccggcccgctgaacattaaccccaactccccaaaagcagactgcaaattcccatacagtcagcacgcaaatcccaatccccgcaaatcatattattagttactaatatatagtgcccattcttgcatagaactggcttcttaccactcatttttctgattggcaggccgaaattccaacgctgcggtcaatttttttttaatcagcagatacttagcgaaaaatcaatgggccactcttttttccacgcagtttcagattggcaatttcccaagtgtgcagctcagctgttccacttgcagtcctttggtttcaagccgggtttataattcagtccacgccatgatttgcaaacttaatttttattttagcgccgtgcaatacagtgaatttttgtttattgttattatactacgtctatcgataattggaggcgtgatgtcgttatcggcagcttgaaaactcaagactgcgccgctagttatcgattgcacttccttagacttatcgcaactgccaaagcccgcgtagttcaaaaagcttagtactgtgctgagcaattacccaataagaaaaccgatactctttacagtttacagtgttcgcataaagaataaataataagaactaaatttaaataaaatatttattttcataatttttttaaacaccccgtagtgttttatatttactgaaatgacgtgtgatccaatttctagctggatgccaaaacaggctattgccaccaaagacgatcgaagttaagtgaatttactgagcggatacaattccggagcacatctgcacgggatgctggcacagctgtgagctggtaacggaaacgggaatggaaatggcaatggcaatggaagaagcaatggtgatagtgctgatagttcggttcaatttcaggacttgatctcgatgcaggcatccggaatcggcgccacctcgcagccctcctggacaacgggcttaagtatggccagcgtggtggcaccgtccaagacctcatcctttcgcacgtgcagcatatcgatctcggtaagtgcaacatttggttcctagataagaaatatgacttgaaaatggactacagaagcggtacggaaggggaaattcaattgaattgaattgatcgttcaccttttccatggcggcgtccgacacctgtaaatggtatttgtcccggcaatagcgcgacagcaaggcaatgcccatttccctattcttggcgtacttcgtctcccaggcgtccagcaggcgattatagtaccgggcattctcgacatagcgcagatatacatgtgtgccggcggtggggaagatccgttccagcggctgacacctggccagctcgtcctcggcaacgatcaggcaacggacatcgtccggcagtagattgtccagtatggtatcaacgtactcctcccggaattcgatgctccgattggtgtactggttatgtttgcggacctcctctgcagtcaggcaggtggtgaagatgcgtttgtcatggcacaacggaccggtcagattaagctcctccaggatgtccgcctgctgacgttcgttcagcttaggcggcacctgatatagagccgtattcagcacggcctgaatgagcggacccttcacgtgcagatccagtggcaattccgaatgcaacgacggcgatatatttatctccaacagccagggcactagattctcatccaggagcacatcgaagccaaacaactcgaagcaattgtagcgaaagttcacattctggcggtacatgcgattcaatcccgattccccgctcacgatgcccttgatgaccagattccgtagcgtggcccacaggcgcttagtgttcacgccacgattctccaggcaggaccacagcgattgaagcgtccacttgtggccctggcaggcattgaaatcctcgttcttcgcatagttctgcgagaacttgttgatgctgtagttggtcaggtgcatgcagcgctcgtccagattgctcagctccgagctgtacttaacggacgcgaaacgcgccagtccatccttgtacatatagatgcggagtgggttgatcgaggtcagtaccacatacagacgcatatcgaacttattgtcgttgatcaacagcggacgttcaatgtatctgaagtggggtttagggttagggaagatttttaaagaagacgaagttatgggcacccacttctgaaccaccagaggacgatctttgggaaattggctccacttgttcacaatgcgtatgcccgtgcctcgggcactcgccggcggcttaacaatccacttggtcagcttcgaggcatttttgggccacacctgacgcaggctctccagatcgtctggcataatgtaggatctgttaaagaagatatcgagtaaaataatagaaattcaaagttatattttcgcagtgctcacttttgcataaagccaaactccttcttgccgaacttcttcatattgttgtagatgctgcgccacatggtgtcttttctaccgatgcggaacgatccgggtatatggttgtacttctggtgcgatcgaatggtcctaaacccggggctcttcatgtgcttctcccacacggccatccagtcggtggtgtctgcaacaaagttttttgaaacaattagatggggtttaaaccacagtaatcatacgacgacccactcttgatgatgcggaagcccgaattgagcaccactcgcttgacaatcttcggcatcacggggctgagtttccatttgagcactcgatgcaatgctgccggcattggaggacccttgtccgcgtgggacgtaaagttcaggtacggcggaacgtgcgggaagagactgggcgagagtatggcctccggacggaaatagacagacgcctccgagtccgtggtgcgcacagattccttcgatggtgtcttttgcggcagcaatcgagtgtgcttgctctggcgcgtctccgtgttgtcctcctccagaaagaatggcgtgcccacatactcctcctccgagtctgaatcgtcgtagtagttaatgtcgtcgatggctgcaaatgtagtgagcataagaagattcctcttgaataaatcacttatatttccctacctgcgcacggatcatcttcgtgcttcctgtcgttatcgtgtccggctcccttgttcagtgagacgcccacataggacgcgacgtgatctcctccggaaatccgcgggctatggaactgcggctggctgttctgtggcgcattggcgtacagcgaggcgtagagactcgtttccaaagcggtggccgccgacttggtcagcccgttttgggtgaggagtctgctcttctcctcctgttgctgcgtgctcagcatgctgctgccgtggaacgagttcaccacaatcttgctgggcggcgacggcttaagcgtctgggtgcttgggcaggacatgttcgacggcggtaccttggcctgaatgggcggactgtgggcggagcgcttgggtccgttgccattcgcggctgaattgccagccgtgtgcttggcgaaggcctcctcccttgcgcgcttcaatagcatctgatcggttagtggagcggatgcggaaacggaaacacacaacatggaaaggaaggggcgaaagcgacataggttattcagacatgctcgttagtggggttttataaacggagagatattaaattatgtggttgataggaatcaagagatatctcgattagtcattgaacatgataatgcatatcgtattattaagcatagagatgttaaagatgttaaattaattaaatgacaaacgtagaaatactttcaaagaggcaacgctaaataaataaataaagacacagaaagtgatttcccccgatgattacagagatacaaacaaatagtcaggagtcgcgctcacctggactttcttgtacggttccgattggagcacactgttggccacgacgggaacatttgagggcgtggcggctaccttgggtgtggagctgttgggcggcgttccacggatgatgatgcgctgcgcgcctaccttagagccaccgcctcctcctcctaagttggccaccttctccggcgtcagccgtttgcgcggcgagggcggtgatctttgcttttgaccaggcggcgagtagcgagccgagacggaatcggatgctgtggctccagccgcggatcctccgccggccgagctgcgatgctgcggggtgctggactggacgattctgccatgatttcgattcggggcggccaggtgcggctgcaggtggtgcgatgaggcgggcacgtgattgtgatgggccagcttcttgcacatgaccatcttgtccttgtacagctccacctcctccagccacgattcgtggaagtcgagtatctcgatgcccttgccgctgcgctggtgtccctgattgtgatgattctgctggttctgccgtcccgtcaggctgtggttctccttggcggcagtaccagatcgggccgacgttgtcctcttctcggtcatctgagccatattgagttcacaagtaatttggataactgcaagtgattaaaacaggtataaaaacaggatttatttcattgaatatttgtcgtttggaattattatttggaaatgtttcaattttcactttaagattccgctattttttaaacaatgattcggttagttgaaagcactgtttttcttctatttaagaaactcttattttattgaacgaacacctgcaatgctgttgactgcacctgctccgaattccccaaaaatagggagaactatttcggtctcgtgctggtcgaattcgaaaattgggttttcgaatgggttcaaggtggctgattttgtctttattttaattgacggtggttcaggttattacttcaccactcgggcggtatttgtgtgcgcggcggcgtgtcaatggatggctattttcgaaaactcatggcacagccaagatcatccaaggaaaatagaaaaacaaaaacaaaagagagcgagaaaaatacagaatgcggggcacacttcgttcatcgattgcaaatcgatcaatagcaacgagatgcgtgccaaaaaaagaggagcagacaaaaataaacaagactttcgccttcaatgaacacgcactgcaatattcaaaaacttcaattggcgcgcagatcgcgctatcgttatcgttcttgttgttgtttccgacagccggcttttgctgcacttgtgttagtgggtgtgtgtgcgtgcaagggtgggtgcgtgtgcagacttaccgtaatacttttttttacatacgcacaacaaatttagtttaattacacaaacaaaccgagaactataagacagctatcgactcgagtactcgatttgaaaagtattccatatgtacatgtcccactcgggatttttgtttgtgtttcaagcagggatgggaaaaatttacgagccaggtctcgataccaatcgataatatttgaaaaaagaatattttcatcgtaacaagtcacaggtcggagtttgtaaatatcgatattgttattttatttattatctgttggcaacgctgtttcttggcggacaatttaaatataatcaaaaacaatgtgtcattccaaaaatgggatttacattgccagtaaattttgtttccgattaaaaactcttattatccaggaattccatatattatactagatatttaaatcttatgaaataacaattcttttaagtaactaaattcaaagtttcggtcgaaacaaaatatttattttacaaaaacagtttcaaagcgtatgtgttcaataaataacaatataaaattccataaaaatcttaaaaataatagtcagctattaaggtaaatacataatataaatctattatttatttaagcaaatgtataccacaacataaataatgctgctaatgggagtgattaattagaaggcaataaaataaagttaagaagttcatgcgcggctcctggagattaactggccatcaaacagtttgacataaatcaggcatctggtcggcggtcgctctacctaaattacgaaagaactaaaatcgaacaaaaaaggagacctacatgagcgtaacgaatactgtgatcaaatgccgcagttgggccaatgatgaagccatcaacgtttcagtttatatacacctcctttgccaggcgaacgagcggcccttattgattttgatggctgcgcagcagtacaaagtgatttatcgcagatcctgcggcaaatggggaagaaacacacacaacgaggagcgcatccacaagatacgaatccgggtccgaaaacgtcgataagttgtggcggcctttaaacggccctcgaggcgacttcatcgccatcatcgttaccgcctacaagacgtcaacactcagtggtcagaagacaag

SEQ ID NO: 7679 - DNA, 3141 bp, DROSOPHILA
aacacaaacaaaaatcccgagtgggacatgtacatatggaatacttttcaaatcgagtactcgagtcgatagctgtcttatagttctcggtttgtttgtgtaattaaactaaatttgttgtgcgtatgtaaaaaaaagtattacgttatccaaattacttgtgaactcaatatggctcagatgaccgagaagaggacaacgtcggcccgatctggtactgccgccaaggagaaccacagcctgacgggacggcagaaccagcagaatcatcacaatcagggacaccagcgcagcggcaagggcatcgagatactcgacttccacgaatcgtggctggaggaggtggagctgtacaaggacaagatggtcatgtgcaagaagctggcccatcacaatcacgtgcccgcctcatcgcaccacctgcagccgcacctggccgccccgaatcgaaatcatggcagaatcgtccagtccagcaccccgcagcatcgcagctcggccggcggaggatccgcggctggagccacagcatccgattccgtctcggctcgctactcgccgcctggtcaaaagcaaagatcaccgccctcgccgcgcaaacggctgacgccggagaaggtggccaacttaggaggaggaggcggtggctctaaggtaggcgcgcagcgcatcatcatccgtggaacgccgcccaacagctccacacccaaggtagccgccacgccctcaaatgttcccgtcgtggccaacagtgtgctccaatcggaaccgtacaagaaagtccagatgctattgaagcgcgcaagggaggaggccttcgccaagcacacggctggcaattcagccgcgaatggcaacggacccaagcgctccgcccacagtccgcccattcaggccaaggtaccgccgtcgaacatgtcctgcccaagcacccagacgcttaagccgtcgccgcccagcaagattgtggtgaactcgttccacggcagcagcatgctgagcacgcagcaacaggaggagaagagcagactcctcacccaaaacgggctgaccaagtcggcggccaccgctttggaaacgagtctctacgcctcgctgtacgccaatgcgccacagaacagccagccgcagttccatagcccgcggatttccggaggagatcacgtcgcgtcctatgtgggcgtctcactgaacaagggagccggacacgataacgacaggaagcacgaagatgatccgtgcgcagccatcgacgacattaactactacgacgattcagactcggaggaggagtatgtgggcacgccattctttctggaggaggacaacacggagacgcgccagagcaagcacactcgattgctgccgcaaaagacaccatcgaaggaatctgtgcgcaccacggactcggaggcgtctgtctatttccgtccggaggccatactctcgcccagtctcttcccgcacgttccgccgtacctgaactttacgtcccacgcggacaagggtcctccaatgccggcagcattgcatcgagtgctcaaatggaaactcagccccgtgatgccgaagattgtcaagcgagtggtgctcaattcgggcttccgcatcatcaagaacaccaccgactggatggccgtgtgggagaagcacatgaagagccccgggtttaggaccattcgatcgcaccagaagtacaaccatatacccggatcgttccgcatcggtagaaaagacaccatgtggcgcagcatctacaacaatatgaagaagttcggcaagaaggagtttggctttatgcaaaaatcctacattatgccagacgatctggagagcctgcgtcaggtgtggcccaaaaatgcctcgaagctgaccaagtggattgttaagccgccggcgagtgcccgaggcacgggcatacgcattgtgaacaagtggagccaatttcccaaagatcgtcctctggtggttcagaaatacattgaacgtccgctgttgatcaacgacaataagttcgatatgcgtctgtatgtggtactgacctcgatcaacccactccgcatctatatgtacaaggatggactggcgcgtttcgcgtccgttaagtacagctcggagctgagcaatctggacgagcgctgcatgcacctgaccaactacagcatcaacaagttctcgcagaactatgcgaagaacgaggatttcaatgcctgccagggccacaagtggacgcttcaatcgctgtggtcctgcctggagaatcgtggcgtgaacactaagcgcctgtgggccacgctacggaatctggtcatcaagggcatcgtgagcggggaatcgggattgaatcgcatgtaccgccagaatgtgaactttcgctacaattgcttcgagttgtttggcttcgatgtgctcctggatgagaatctagtgccctggctgttggagataaatatatcgccgtcgttgcattcggaattgccactggatctgcacgtgaagggtccgctcattcaggccgtgctgaatacggctctatatcaggtgccgcctaagctgaacgaacgtcagcaggcggacatcctggaggagcttaatctgaccggtccgttgtgccatgacaaacgcatcttcaccacctgcctgactgcagaggaggtccgcaaacataaccagtacaccaatcggagcatcgaattccgggaggagtacgttgataccatactggacaatctactgccggacgatgtccgttgcctgatcgttgccgaggacgagctggccaggtgtcagccgctggaacggatcttccccaccgccggcacacatgtatatctgcgctatgtcgagaatgcccggtactataatcgcctgctggacgcctgggagacgaagtacgccaagaatagggaaatgggcattgccttgctgtcgcgctattgccgggacaaataccatttacaggtgtcggacgccgccatggaaaaggaaccaaatgttgcacttaccgagatcgatatgctgcacgtgcgaaaggatgaggtcttggacggtgccaccacgctggccatacttaagcccgttgtccaggagggctgcgaggtggcgccgattccggatgcctgcatcgagatcaagtcctga

SEQ ID NO: 7680 - protein, 989 aa, DROSOPHILA
MAQMTEKRTTSARSGTAAKENHSLTGRQNQQNHHNQGHQRSGKGIEILDFHESWLEEVELYKDKMVMCKKLAHHNHVPASSHHLQPHLAAPNRNHGRIVQSSTPQHRSSAGGGSAAGATASDSVSARYSPPGQKQRSPPSPRKRLTPEKVANLGGGGGGSKVGAQRIIIRGTPPNSSTPKVAATPSNVPVVANSVLQSEPYKKVQMLLKRAREEAFAKHTAGNSAANGNGPKRSAHSPPIQAKVPPSNMSCPSTQTLKPSPPSKIVVNSFHGSSMLSTQQQEEKSRLLTQNGLTKSAATALETSLYASLYANAPQNSQPQFHSPRISGGDHVASYVGVSLNKGAGHDNDRKHEDDPCAAIDDINYYDDSDSEEEYVGTPFFLEEDNTETRQSKHTRLLPQKTPSKESVRTTDSEASVYFRPEAILSPSLFPHVPPYLNFTSHADKGPPMPAALHRVLKWKLSPVMPKIVKRVVLNSGFRIIKNTTDWMAVWEKHMKSPGFRTIRSHQKYNHIPGSFRIGRKDTMWRSIYNNMKKFGKKEFGFMQKSYIMPDDLESLRQVWPKNASKLTKWIVKPPASARGTGIRIVNKWSQFPKDRPLVVQKYIERPLLINDNKFDMRLYVVLTSINPLRIYMYKDGLARFASVKYSSELSNLDERCMHLTNYSINKFSQNYAKNEDFNACQGHKWTLQSLWSCLENRGVNTKRLWATLRNLVIKGIVSGESGLNRMYRQNVNFRYNCFELFGFDVLLDENLVPWLLEINISPSLHSELPLDLHVKGPLIQAVLNTALYQVPPKLNERQQADILEELNLTGPLCHDKRIFTTCLTAEEVRKHNQYTNRSIEFREEYVDTILDNLLPDDVRCLIVAEDELARCQPLERIFPTAGTHVYLRYVENARYYNRLLDAWETKYAKNREMGIALLSRYCRDKYHLQVSDAAMEKEPNVALTEIDMLHVRKDEVLDGATTLAILKPVVQEGCEVAPIPDACIEIKS

SEQ ID NO: 7681 - DNA, 4530 bp, DROSOPHILA
actatactgcttgagttcaggcccaaatcggttgaccatgtgtgtgcgcaatttgtccaaatccacgcagtgggccgctgtgtctcctaaggttggccatcgattgctccatccacatggtcactagacactggctgttgtccactttagctggccagattggctgacagttgactcggttcgatccgaacgatcgattggcgtatattggcagcggacaaggtcaacaggaaagcggagagttgagttgagttaactcgacttggttttaatttcgggtctcgctttcgattcaatgaataatttagtcgtgaataagtgactcaaacaggtgctaacaggtacacaattacccggcatgagtgcaagtatcaaaaagttgacagtgaataagcaacgaccttcgtgtaaaagtgctttcgtcgaggaatttacaattactaattgatttcaagctcaattgaagcttgaaacgattacgggcttaataaaactgccatattttaatccgattatccggctttggtcgcaatcggtagcgcttctgattggattgattattatttatcagaaaatgaaggtcactttgctacaaattttaaatatgtagatatgtagagtatcatcatcaccttgcggtgaaaaatgtgtattaaaaatgtattataatcccctttgcaagatggaaatgttcttagacctatgtaagttcagtaataagctttaatggcgataacaaaggcatcaaataaattggttgtcaaggcttttatgtgtcgagaatggcaaattggcttctcagatttcacagaatccctacagcaaataggaaacgacacccacgcccgtctttgtgcaacccctttatctgcagaatttcataaacaaaactattttcttgttgtttcatgctttcacttgcctcctgccaggctggaagaagagaaatttaatttgataaatgtgagttgacatttctggttttccggggccactggccatgacgtgcaatactgaataccttgcttttaatccccaccaggacaccgttctcccggaagccgtgcagttctgggaacaggccctgatggtgcgagagaccaagggcgttatccgactcaataggtacgttggacgaacgctttcaagaaaaccgcaaaactgtataaaatattaattttacgaaatttgtttcaggaaatgcgacagcacgcaggtgtacgtgaaaaacggacacacccactgcatcgaccattgcaaggcgacgacgatgtgcggcgaggttcaggtgcccgatgcgcacttggatgtaagtaatccacggaatcctatcaaagcaaccaactcaagtgcagctcaagaaaactctagttgaaaattagccacaccttgctcagctcgaaatgacttattttaaagaatgaccttggtttgatccaaatttaaactggtaaaattgaaaactggtttaagccactcatgagcacttgcagctttgattgtgggtcacttaaatagttggtagcttacaacacgccctttgctaaaattacatttctgtagtcaggttataaacattacaacaaattatgggattatgtaagcagcatttatattggtaaaggttacaaataattagcgggccttctgtatttaatactcgttttcttaaaggcagaaatttatttattttctggagatttttatgtcttggctaaaaaaaaaaataccttacgagtattgccacaactttttttttacacttgcccattatatttataattgtatttttacaggtatgtcgggtgtgcaatgccacgggtcagaattgtagaatcgatagtaacacacagccgggcgaaggaattgagaatgcggactttgtgttctacgtgtccgccaggcagacgcagcgttgtttcaagggtctaaccgttgcctatgcggcccattgtcaacaggaagcggctctggatcgtccaatcgccggtcatgcgaatctctgtccggagagcattagcacaaagccgcaggaactgcagacactgatctccaccgtaaagcacgagattctccatgcactgggattctccgtgagcttgtacgcattctttagggacgatgatggaaaaccccgaacgccccgaaaattagacactggcaagccgtacctgaatgaaaagtgagccaattgtcttgttataaattcccgtctaatccgtaaagtccattttcagattgcagatccatcagtggagcaacgagaccattcgcaaggtggtgcgagagaactggtctgtgcgtggtggccatgttaacaaggtagtggacatgatggtcacgcctcgcgtaattgccgaggtgcgcgcccactttaactgcaataagttggagggcgccgagctggaggatcagggtggcgaaggtaccgccctgacccactgggaaaagcgcatcctggagaatgaggccatgactggcacgcacacacagtcgccggtcttctcgcgcatcacccttgcattgatggaggattccggctggtatcgggccaactactccatggcaacgccgctgacttggggcaagggactgggatgtgcgtttgctatgcgtagttgcaaggattggatacagtacaaccatgctaggtaataggattctttgataaaatatgtgatcctttacttattacctttcatttcatttgtaaaaggggtcgctctatacatcccttctgctcgaaggtcaagcaggatcccctccaaaccgaatgcacagatgatcgcaactctgtggcgctttgcaatcttatccgccatgagtttgagctgcccaaaggctatcagaacttcgacagcctaaatcatgtgaaggacggcgaggaggggttctacggcggctcggtttcgctggccgatcactgtccctacattcaggagtttacctggcgcagcaagaacgtgatagtgcgcggatctcattgtcgatttacagagaataatcccagtaagactaccaaactattattacttaaatggatgcgtaactttcttttataactgtctgcagggcctgaaaagaacttcgccttggagagctatggcgagggagcaaagtgctttgatcacagcgaatcgatgtgggaggagcgatcctgtcaccagacgcgtgagtggcagcattggggcagcggatgctacaagtacgattgcttcgacgggcgactgcacatcctggtgggcaactatagctacaagtgctcctttcccgggcagaagctttctattcgaattgcggccaatggatggctgcacaagggcgcgatcatgtgcccgccgtgccacgagctgtgcggagcacaatttgctgctcagggcaagcagtgtcgtccgggcgaggagcccgatccgctcaataagtacccgcgcgacaacctcgcctgtggagcgggcagtgagaaatcacgttccgtggccataatcaccgctgtactgctgcttttcggcctgcgatggggattcagttaggctgatcaggttgcagggtgcagatttacttgctctttatgtatgtagtgcaatttgtacattttagctgtatgatataagctcaatttgtctaaaagtaggtccatgtagtgtagtactcccaaatctgagttggtcggttttctaggcaaagaagctgggaatttaatctttggacaattcgtatccacttcgcacaaactttgccatttaatagtctttggttatttcgtaaaagaaaagtgttttaaacaatgctcaaatatgcaactatggaatcatacttaaattaaataatattgtccttagattaacccaatccttttatatttcttcgcaaccgtacgaattgacaactcctaccaaacatatagttataaaatcgtaattgtattttgtccatcccgaaatgtgatcttttttaagtgtgtcctcggatatttaccgcatttgaaaatgttggccacatataaagccaatcattttcgggtggatcatccaaaggcagttctatgcttcttgaatatcgatctgtacattccaaagcctattgcgaaaaatatttcatttatggtacggtggcactggcagttccactagcttgttgttaaattctttgttatttattatgaatatggttttcgaaatttgttgattgccttgtgatttatgtattctattaattttgcctaagctaaatgcgttttttccatttctgctgcctatgaagcatttaagaattgtaaactcaactctcgatttgtaatctagattttaagaacctaaaccagcaatgtgaataaaccaagagacccttgtaatcgcaagttttttgtgagtatcttattaatgtttatttaaatacttaggagtaatcaagctcctcgaccagctcgtagaggatggcaccatcggtgtccttcgttggagattcattgccattatcttgatctttgggcgcagcttttggcctactaccctttactttgcaaggacctgc

SEQ ID NO: 7682 - DNA, 1788 bp, DROSOPHILA
atgacgtgcaatactgaataccttgcttttaatccccaccaggacaccgttctcccggaagccgtgcagttctgggaacaggccctgatggtgcgagagaccaagggcgttatccgactcaataggaaatgcgacagcacgcaggtgtacgtgaaaaacggacacacccactgcatcgaccattgcaaggcgacgacgatgtgcggcgaggttcaggtgcccgatgcgcacttggatgtatgtcgggtgtgcaatgccacgggtcagaattgtagaatcgatagtaacacacagccgggcgaaggaattgagaatgcggactttgtgttctacgtgtccgccaggcagacgcagcgttgtttcaagggtctaaccgttgcctatgcggcccattgtcaacaggaagcggctctggatcgtccaatcgccggtcatgcgaatctctgtccggagagcattagcacaaagccgcaggaactgcagacactgatctccaccgtaaagcacgagattctccatgcactgggattctccgtgagcttgtacgcattctttagggacgatgatggaaaaccccgaacgccccgaaaattagacactggcaagccgtacctgaatgaaaaattgcagatccatcagtggagcaacgagaccattcgcaaggtggtgcgagagaactggtctgtgcgtggtggccatgttaacaaggtagtggacatgatggtcacgcctcgcgtaattgccgaggtgcgcgcccactttaactgcaataagttggagggcgccgagctggaggatcagggtggcgaaggtaccgccctgacccactgggaaaagcgcatcctggagaatgaggccatgactggcacgcacacacagtcgccggtcttctcgcgcatcacccttgcattgatggaggattccggctggtatcgggccaactactccatggcaacgccgctgacttggggcaagggactgggatgtgcgtttgctatgcgtagttgcaaggattggatacagtacaaccatgctaggggtcgctctatacatcccttctgctcgaaggtcaagcaggatcccctccaaaccgaatgcacagatgatcgcaactctgtggcgctttgcaatcttatccgccatgagtttgagctgcccaaaggctatcagaacttcgacagcctaaatcatgtgaaggacggcgaggaggggttctacggcggctcggtttcgctggccgatcactgtccctacattcaggagtttacctggcgcagcaagaacgtgatagtgcgcggatctcattgtcgatttacagagaataatcccaggcctgaaaagaacttcgccttggagagctatggcgagggagcaaagtgctttgatcacagcgaatcgatgtgggaggagcgatcctgtcaccagacgcgtgagtggcagcattggggcagcggatgctacaagtacgattgcttcgacgggcgactgcacatcctggtgggcaactatagctacaagtgctcctttcccgggcagaagctttctattcgaattgcggccaatggatggctgcacaagggcgcgatcatgtgcccgccgtgccacgagctgtgcggagcacaatttgctgctcagggcaagcagtgtcgtccgggcgaggagcccgatccgctcaataagtacccgcgcgacaacctcgcctgtggagcgggcagtgagaaatcacgttccgtggccataatcaccgctgtactgctgcttttcggcctgcgatggggattcagttag

SEQ ID NO: 7683 - protein, 595 aa, DROSOPHILA
MTCNTEYLAFNPHQDTVLPEAVQFWEQALMVRETKGVIRLNRKCDSTQVYVKNGHTHCIDHCKATTMCGEVQVPDAHLDVCRVCNATGQNCRIDSNTQPGEGIENADFVFYVSARQTQRCFKGLTVAYAAHCQQEAALDRPIAGHANLCPESISTKPQELQTLISTVKHEILHALGFSVSLYAFFRDDDGKPRTPRKLDTGKPYLNEKLQIHQWSNETIRKVVRENWSVRGGHVNKVVDMMVTPRVIAEVRAHFNCNKLEGAELEDQGGEGTALTHWEKRILENEAMTGTHTQSPVFSRITLALMEDSGWYRANYSMATPLTWGKGLGCAFAMRSCKDWIQYNHARGRSIHPFCSKVKQDPLQTECTDDRNSVALCNLIRHEFELPKGYQNFDSLNHVKDGEEGFYGGSVSLADHCPYIQEFTWRSKNVIVRGSHCRFTENNPRPEKNFALESYGEGAKCFDHSESMWEERSCHQTREWQHWGSGCYKYDCFDGRLHILVGNYSYKCSFPGQKLSIRIAANGWLHKGAIMCPPCHELCGAQFAAQGKQCRPGEEPDPLNKYPRDNLACGAGSEKSRSVAIITAVLLLFGLRWGFS

SEQ ID NO: 7684 - DNA, 3459 bp, DROSOPHILA
tgcccatcggatagtgcgacgacttgccgtgcccgggcagatcgatggccaggatggaggtgtccgccggtagcagggggcacagcctgtcgaagctgccgcagttgtcctgccagccgtgcagggcgatgatgggctgcctctccttcgagccccaccacttggctgcaagcgggaaaatcgattagtacatatgtatgtaacttggtttcagcacgtgtatgttaatcgttcaggggaatcgcgtgatgtttccaaaaaatattactcaaaaaacaagcaaagagatagcgttattgggctcagttagtagaacacttgtagtgcgtcgaaactaacaaaatattttagccgcgtcacatcgaaaatcacgtcggattgccatgaatggtcgatgctgttgattaggaaacggctggcaggtgactcaccctcaacggttccccagggcaccgcgatagagaactcctcccagctgtcctcgcccagcagctgcaggggctcctccgtctggccatctgaaagcagggggaatccacataagtaattcaactaaaaccaaagcaagctgtgacgaaatggtctgcgtctggtgaaatcgcccgcgggccaggtgaagcgcaaccagcggaaacttcggactcaggtgcgcagagcgtgcgagtcggtgacctgaccacgacctcctcctccggtttactcacttgtctctggcgaaagttccgccgcgggagattgcgccgctgttgttgctgccacgcgtgtctggcccatggctaattgctgctcgcaaatggtgctccgtaatgctggacgcggatcgggcgagctcctgcctcggggaatctcaaaaagcgactaactaaagtcgcaaagttttgccgatcaacggaattcgattgtcaatagctattgacagatatgtcggtttggcggtggaatggctagaaagtcagatacggagctattgtgcagctccattcgcgactgggtggcaactcccgcacattgttttcatttgcgattgcaaacaaaatttaatattacttgtattcgaaacaattaagctgagaaatcatcatgtaagtctgcgttattatcctccggctttgccatagctaactctcgattccaacaggacggagtactggaaatcaaacgagcgcaagttctgcgacttctgcaaatgctggctgagcgacaacaaggcggtgagtccatagaataaactcgcttttcggcactctaatgacccctaatcccgcagagcgtcgccttccacgagagtggcaagcggcacaagatgaatgtggccaagcggatcacggacatcagtcgcaacagcgagaaatcggagcgggagcgccagaaaatggacgcggagatccgcaagatggaggaggcggccatgaagtcgtacgcacaggatgtccattcgcgcggtgacatgaccgccaggtccattaacacggtaatgagggccaccgccactgctgccgcctcaggcggagctcactccttcgccggaagatcacgccaagtggaccccatgcgcctggaaggattgtccgacgaagaagaagaccagaggcgggtggctcccggcaaggtaacaagcgacgcagccgtgcccgaggcatccctctgggtggagggcaagtcggacgagggacacacctactattggaacgtgaagaccaatgaatccgtgtggaagccgccgaaagagggctatctgtcctacgaggagtacgagcgcatcaaccagctggccatcgaccagcagcagatctcccaggccgaggaatcgctgaaattccgcgccaatgtcgacgaggaagtggcgagggtgaaccgagagaagatgaaagccttccgcaggacggacaatcccaaggaaaagaagcagaaggaggagaggcgtcagacattcaaaacggaggaagaggcggccaccaaagagattggacagtggcaaactgtggaagtgaagtagggccttcctactaggttcaaatgcatttactgataaatttatggatttttgtagagcacctgagcagcccatcgactggcagctacccaaaacggattactacagtgctgcgcccgtggtttccgcctcgagtgaaccagaacctccagtcaagaagttcaaggaaaagacgattggcggtctggatgaggagatagccgccactgcgcccgccacgttcaagcggaaattcatcaggaagggaaacagccgccagcgcgccgaggattaagaagtactccatgtgcttatgtgcatatttcacctactagttaggtttaggcataggaaatgtttaggtttttaagtgtttgcttataccaattaaaaagtgagatgcgtttaactaatattagattaaacatagctattgtagaattattattatctttagtcgacttgcattcaataaatatttcccaacattttaaatagtaatatgttttttaaaaagttttaaatttcgataacagttatcgaattaggttcaatcggtgtgtgtctgtgctttagttgcggcatatttaggtcttagagctccgtccaattttagtgcatttccagcggcaacacgaggtatgtttctcccgtccgccaacggtcactctgctgctgttgttgtaggcgagcggtcggaatttgcgtcggaattgtgttgagtcgagtcgcgctattttgtttcgagtgcgctgtgctgtttggtttcgttccgtttcgtttcgctgttcgttttccactcgtcttcgaatccgcactgcaaacaaacaaggagaaggggaagcagcaaaagtggcgagtgcattcgcagcgtcgaaatttcaattgaaatctgaaatctgtgtggcaattgcagcggcactcggtgtaaatagattgaattgaagcgaaattctgcgagtcgaagaagtgaaaagtaaacaataacacgggcaatcggaaaagtggttttcgataaatcgcaccgcacacacacacctgtcagtgtgagtgtcaaagtgagtgtgtgagtgtgcgtcgaaggagaggaaaggtcaagccaaaaattgcgtaaagaaaaggaaaggaaagcttagaagaggggaaggggaattacgtcagtttcgcattcccgataaaaatttttgattccctaaacgatcctgatagccagccattacgataggcaaaaaacgataacagcggaaatttacgtcaatttggagcagaaagtaaacgataccaattcccgaaagaattcaaaaaatcaggcaagattcagttcgtgtacgcttacaacagctccgcgccccacgccgcctcctcctaccgcaccgccgtcgccccctttgcgccctacgcggccgagcggtccacccaccaccacccactcccgccccccgaggagcggctgccctcggacaccgagcagctagctggatccgacg

SEQ ID NO: 7685 - DNA, 1289 bp, DROSOPHILA
cccgcacattgttttcatttgcgattgcaaacaaaatttaatattacttgtattcgaaacaattaagctgagaaatcatcatgacggagtactggaaatcaaacgagcgcaagttctgcgacttctgcaaatgctggctgagcgacaacaaggcgagcgtcgccttccacgagagtggcaagcggcacaagatgaatgtggccaagcggatcacggacatcagtcgcaacagcgagaaatcggagcgggagcgccagaaaatggacgcggagatccgcaagatggaggaggcggccatgaagtcgtacgcacaggatgtccattcgcgcggtgacatgaccgccaggtccattaacacggtaatgagggccaccgccactgctgccgcctcaggcggagctcactccttcgccggaagatcacgccaagtggaccccatgcgcctggaaggattgtccgacgaagaagaagaccagaggcgggtggctcccggcaaggtaacaagcgacgcagccgtgcccgaggcatccctctgggtggagggcaagtcggacgagggacacacctactattggaacgtgaagaccaatgaatccgtgtggaagccgccgaaagagggctatctgtcctacgaggagtacgagcgcatcaaccagctggccatcgaccagcagcagatctcccaggccgaggaatcgctgaaattccgcgccaatgtcgacgaggaagtggcgagggtgaaccgagagaagatgaaagccttccgcaggacggacaatcccaaggaaaagaagcagaaggaggagaggcgtcagacattcaaaacggaggaagaggcggccaccaaagagattggacagtggcaaactgtggaagtgaaagcacctgagcagcccatcgactggcagctacccaaaacggattactacagtgctgcgcccgtggtttccgcctcgagtgaaccagaacctccagtcaagaagttcaaggaaaagacgattggcggtctggatgaggagatagccgccactgcgcccgccacgttcaagcggaaattcatcaggaagggaaacagccgccagcgcgccgaggattaagaagtactccatgtgcttatgtgcatatttcacctactagttaggtttaggcataggaaatgtttaggtttttaagtgtttgcttataccaattaaaaagtgagatgcgtttaactaatattagattaaacatagctattgtagaattattattatctttagtcgacttgcattcaataaatatttcccaac

SEQ ID NO: 7686 - protein, 338 aa, DROSOPHILA
MTEYWKSNERKFCDFCKCWLSDNKASVAFHESGKRHKMNVAKRITDISRNSEKSERERQKMDAEIRKMEEAAMKSYAQDVHSRGDMTARSINTVMRATATAAASGGAHSFAGRSRQVDPMRLEGLSDEEEDQRRVAPGKVTSDAAVPEASLWVEGKSDEGHTYYWNVKTNESVWKPPKEGYLSYEEYERINQLAIDQQQISQAEESLKFRANVDEEVARVNREKMKAFRRTDNPKEKKQKEERRQTFKTEEEAATKEIGQWQTVEVKAPEQPIDWQLPKTDYYSAAPVVSASSEPEPPVKKFKEKTIGGLDEEIAATAPATFKRKFIRKGNSRQRAED

SEQ ID NO: 7687 - DNA, 7358 bp, DROSOPHILA
ctcgggctggctggccagttatcttccattatcgcgataaggcctgagttctgatcggaccagttgaattgagctggactggtatgggttgttgtgctacccgtttgaattgtgttactgggggccctgtattttaattacatgttctttcgagtgccctgttttcgagtgcagatagttgcaaaacaattcttcttccagtatgcaaacaaacggtctacccccgtaatcctcccctgcgatcaagtgtaatttctgttggtgctgaagagggacaagtggcattccaaaactgtaaggcttgtgctcaatttggagtagaaatatttctaatatagagggttgtcgatatgggtttttcaaagtattgacgtttttcatagttggttattacccgaaatctatataaacgggaaaaagattagttgcttatatcttacattcccagaaatctagttagcataaacaaattggtaaatttgatatttatcagagcactttagcgtagatcatgattactaattcttgaaacacaactcaaactatttctcgctgtgcttgtagtgttgtaaatgaattctggcaaattcagatactcttacgattaaatcgatgatttgacaatttggtgcgcttaagagctgagtgaaaccgttaactataactctccggttaaataactctcttccacaccggacattgttctatatgctgtgagctaccctcggcctgatatcttatcactgatattgtacattcttactttgaacacccgtacaagcaattaacaaacgattcgtggctatgattctcccgttcgtccccaaagccaacaccaccacccatccgcccactcgatggagctctctctctctctcttgcccgctctttctttcgctctttctctttttgggggaccttatctgggaattgaatggaaacgaactgatatttaagaattcaacccattcgctggtactttcagtgctgtgtgatcataaaacggtgttagacgtattccggcaggaaaaaaaaaacaacagggaaccctgaatcacaggcaagagctgaaagttcagtgatacagacaaatggatattattatagcagtgacaagaactcaagtgctcgataaacacattcccggccaaagaaaacagaaactcagtggaatccaaagtatttaataacaaattgtgtgtgtgtgtgtgccagtgaacagagctagcagcaagtgtataaacaagacgtcagaagtttccacttaaccaaggcataatcgatcggccacaattggtacaacattcagaaccatgaaattaaggtgggttttggttttgtagttcctacgaaattgggtcttggtataaatgattaacaatatgtctcctatctgccgacacttccacctgaaattcgaatggccacgaaaatcacagttttttgccccgaaattggaacctttatgcagcagcttgataagaaatgtgggaagtgaattttgggtatatacaggttttctcatataattcgtatcagtgggcgaatgatatcattgcggaatatccaatatttttccattctatatttggctgtgctaatcacacacttatttgggcaacccaaatcagactgcacgtcggctagataatgcaaattaactttatggcaaaggaccacaaattgattgacctttcaagggctattccaattagatatatcacaataatacagcaagaacggctcacattgttcatatatgatgaaagaaatatatacatagattttccagtttaattcgaaattttagtcatattgtcaccctaaggctgatgcaatcccttctctgcgcttctcataactcccacgtaagctgagttaattacaaaaaaattatctgtgaataaattatacaattttatgaccgtttgttaagattagccacacgttccatttggcagctgtcaggccgagtaatgttatttgttttttttttaccaatcagccgaaatgcgatatagttttctgttgctatccgctcgtttttgtaaggaggtcaatggacattggttgggttccattcctttgttgtaagctgtcataaatacttcggcccagtttatagggcccgttaaaatcaagtaagaaattaccgacggcggcataaagatagacacactcatcaaaagttccccaattcgttcctcattcgattgccaccgaaattgcgggaaatattcatgattaactgttatacgaggatcgtaaacttggtggctaggttatggtttaccaccgcgaagaagacatcatttaaattagccagctaaagcgtttcatcatacttactggaaaatgagaaggcaatatgcccaatgcgctctcaaggttcgataacgaagcgtttcgtatctggagtggcgggcgccaattgataaggctgaaaaatcgaaaatcagccagagccaatggtcttgagcaggttttggcaatcgcccaattagaattgccggccataaaattgcaggcgcccagccccatttcccgattccccccttgggtcgatctctcgaagtgaatgattttcacatgactcgatggtggtatataaagcagatatactttacgtccagctggagcaaagtgcgtccattgggggaattgaatttttccacagttccaattagttcaattagtcagttaatttgattgtctggaatgcggagtgatgtctggcgatatctaaacgtgatccaatcaaagtcccaataacccaaattcattgataactcttttaactgctccgactttgagttcaaacttggcaacttcagattgaattggcgaaatgcttgccactttttacgatctggaaacatcatgaacttggtgcaatagcacttgtaatgtcgagtagtgatcgtgtctctaagtattcaacatcctggtcatttaaagtcatttgtaggaatgccagatgcacttgaagtgcattcgactcgctcttaaatatttattattcccatactataagacgataattgcaattttatgtcttgcgatattggttgtgactcagtaatgatcttaagtatttacactgtgatatagaccccaagtgaacaatttctatatcgtcggcatgaattggcaaataactttgcttagtagcattttagcttattgtatttgacgaactaacattaaacacgcaccgtactctgcacctaattaaagtttgtactactctttttaattactgccaataatcgcttgaacacgtaagattcggtttccagccagacagaatccccccccccccacatctcccattccctttgggggttcaatgcggttttatctattgcgtattttccgtagtagttgaaatagaccacgtacccgtatcttccgctgtctccggcttctgtgtgcttttaattaaacatacatatgtacatcaggtctggctgggtgacggtctttggggtgtatgtaaatatttagaatctctatatatagcaatgcctttgatcggcgtgttttttttccttagaagtcgccaaacaatgtgctaagcaaatttgctttctcttcttttcccccaatgcagacttttgcggtgtttgcgccaacagccggcgaaaccagcggcggttatgacccacaaggaggatcagtacccggtatcacttgaccaccacgtgctcaaggacatggccaagggcgtgagggacaccaccgttaagatcctgctactaggcaccgccgagtcgggcaagacgaccatcatcaagcaaatgcggatactgcacatcaacggatttacagacgagtaagtttggcattccaataaccattgtactatactatattatattaagttttaaatcagtccaaaaacaaactgaatatttcaagtattttttttttaaatatttttttctggaatatatctttttcaaagcacatactcaaggtcttaattttcttttttctttacagtgaacggcgagagaagatacccgagatatatcagaacatccacgagtccatcctgcaattggtgggtcagatgggagtgctgggcattgatttcggcagctgtaccagcgaaagatcggcggactatatcctctctctgcccggatcggcacccgaatatatgaacgaggtgagtttcggagtggcacctggagtggtgcccccactatctgtatcttatccctcgctgcacttcaaagtctgttgtcgtggtgtcgcagtttgaaatacatgctcgttgtggctgtcgaaaatccgagcaaacgactttgaagtcaatcgccggacttgcgtcaaatctccaacggctttcgatcgaattcgtgttatcagtagcggcgatttgattgatagcgtgtccattgggcggcgtggaatgtctaaaaactttccaaaacaagtgttttgtaaatcggacttcctggcccgggccttattgtattattttgctctttccttttttttatttcaagtttgccgcagctgcaacgctgcctctgaatgtgattcatgtggcgcaatctgctttatctttccgaaatttatctatgtacctctaaccagtggtcattatatggcttacgattagattaccaaggctgttcaggtctccaagtgggcggggcctttcccagatctagatgccagtcattcatggttttatgttttgccagtgagtaatgccaagcataaacaaaagaagtaccgaagttcggattccccttgctttatgactgactgtttgaataggtgactcgaatacgttcagagttttaagttaactgaggaaataaataatcatatcagaccaaaatagagtatgttttttggaggttcttatattttatttttaagtttaaagttgactttgtgctgttactttgatgttgatgttgatcattcgtatgacagttgcaaagtgacacaatcttggcgtttatgatccttatcatatattcagcaaatagaatttttttagacggttagctagacaattttactaccggattagcttttcgtacttgtctgtccaagcggcttttgcaatcttccggtgaagagttgatgttattttccatcactgacttgaaaacaatacttaattttgggttactttttttgtatttttaggagtactgcgaccacgtcactactttgtggaacgatgtgggtattcgcgcctgctatgatcgctcaaatgagtttcccctgctggatagtgcgaaatagtaagtatctaattggattgattcaaaatcagatttctttcccatttattcaaaaaaaaaccttactaaagtttgaatttttttttaccccagcttcctggacaactttgtgcggatcagcgatgctgaatacatacccagcaccgaggacattctgcacagccgtaagatcaccaccggcatctcgcaaatcaccttccgcgtacccattcccaagagcatgggtggtggcgaacagcagttccaaatgtacgatgtgggtggccaaagggatcagcggaataagtggattcaggtattcgaaggcatacaggccgtattgttcctgatctcgtgcagcgagttcgatcagaatctgcgcgaggatcccagccagaatcgtttgcaggaggctctgaagttgttcagagccgtgtggcagaatcgtttcctcgcctccgccggattgatcgtgttcctcaacaagtacgacatcatggagcgaaagattcgggccggcaagcacattgtggactactttcccgaatacgaggacttctgcaagaggccgcagcaggacaattgctttggcgagagtgactggacgaagatgttcatcaaacagaagctggtggatatcacacaggagccgttcaagcgacactcacggaatcaggtggatctgggtacctcggaaagggagtgctactaccacttcaccgtcgccacggatacgcgatgcatccgtgatgtcttctgcgatgtccagaagatgatcctctcggagaacgtgtccagcatgggcctattctagtccagatcccgttgcggatcggagagcttctcaataaagttaagggagggctgtcctcaggcccccaccaactgtgatctagtaggatatgacttacataagtagccatgtaagaccgtagatcgtagtggcaaccgtatgttgcacaatggctggtacaacgctttaatatatttaactgcattgggtgtagaggaagaatcctcataccgaatgctctcactactccttcaaccaatgtctaaactctaatagaatatagcatctacaataaaccaaaacacacccagacaatttgagaatgagttttaaatatttttgcacccaaagtttgggtatttgggtcccatgcaacacaaagtgtagcatacttcaaagggcacacacgctttgagcgatctgatgttgccataggaaaggaaaagaaaccatagttgttttacttttgatcaaaatagtttcccattcggaatacaccattctactctttatacaagaatatataagcttcgtattaaaacattttaaaatataaaaaacatattgaaaggcaaaaagtcatagtgatcttttacaaaatatgcgcttcttattcaaattaaaaaaaaagcttattccacttaaatgccgtttatcgatcagagcgttatattttgtacggtcggtcttaaatttaaatgatggaatccacatagttctttaccatcgcttaactaatagccaagttacacaccaatgagctgtggtccttacctaatacccattactcgtaaagtgatatggtatttaagttttgtgtctacgtatgcaacacgaacaaagaatcgttactttcaaccaaatcaaaaagttaaataaagatcgatcatcgttttaacttttaccagcttacgttctccccaaacattttaacgattcatgtcggtataaccataaaacaaaaatattcctgtataactcgcgatactgtttaataatttgggcatacaaatgcatcttgctacgcttaaccaaagacactagtggcttaactgttccttgcaacataagtaagtttgactagtacccaataggagtggaaccagtgtgcatagagctccacccgcacgcagctagatgtgaccgcacgcgagccgcagaaaaataccgcgatggcaaaagtaccagcgccatgattggtactaaaatatctcctatatataagtatagcgataaagcagccgaaccgccagctaaacgttcagttcgctttgcgccggcaaattcgatagttttttgagtttgctgaaccg

SEQ ID NO: 7688 - DNA, 1805 bp, DROSOPHILA
aaacggtgttagacgtattccggcaggaaaaaaaaaacaacagggaaccctgaatcacaggcaagagctgaaagttcagtgatacagacaaatggatattattatagcagtgacaagaactcaagtgctcgataaacacattcccggccaaagaaaacagaaactcagtggaatccaaagtatttaataacaaattgtgtgtgtgtgtgtgccagtgaacagagctagcagcaagtgtataaacaagacgtcagaagtttccacttaaccaaggcataatcgatcggccacaattggtacaacattcagaaccatgaaattaagacttttgcggtgtttgcgccaacagccggcgaaaccagcggcggttatgacccacaaggaggatcagtacccggtatcacttgaccaccacgtgctcaaggacatggccaagggcgtgagggacaccaccgttaagatcctgctactaggcaccgccgagtcgggcaagacgaccatcatcaagcaaatgcggatactgcacatcaacggatttacagacgatgaacggcgagagaagatacccgagatatatcagaacatccacgagtccatcctgcaattggtgggtcagatgggagtgctgggcattgatttcggcagctgtaccagcgaaagatcggcggactatatcctctctctgcccggatcggcacccgaatatatgaacgaggagtactgcgaccacgtcactactttgtggaacgatgtgggtattcgcgcctgctatgatcgctcaaatgagtttcccctgctggatagtgcgaaatacttcctggacaactttgtgcggatcagcgatgctgaatacatacccagcaccgaggacattctgcacagccgtaagatcaccaccggcatctcgcaaatcaccttccgcgtacccattcccaagagcatgggtggtggcgaacagcagttccaaatgtacgatgtgggtggccaaagggatcagcggaataagtggattcaggtattcgaaggcatacaggccgtattgttcctgatctcgtgcagcgagttcgatcagaatctgcgcgaggatcccagccagaatcgtttgcaggaggctctgaagttgttcagagccgtgtggcagaatcgtttcctcgcctccgccggattgatcgtgttcctcaacaagtacgacatcatggagcgaaagattcgggccggcaagcacattgtggactactttcccgaatacgaggacttctgcaagaggccgcagcaggacaattgctttggcgagagtgactggacgaagatgttcatcaaacagaagctggtggatatcacacaggagccgttcaagcgacactcacggaatcaggtggatctgggtacctcggaaagggagtgctactaccacttcaccgtcgccacggatacgcgatgcatccgtgatgtcttctgcgatgtccagaagatgatcctctcggagaacgtgtccagcatgggcctattctagtccagatcccgttgcggatcggagagcttctcaataaagttaagggagggctgtcctcaggcccccaccaactgtgatctagtaggatatgacttacataagtagccatgtaagaccgtagatcgtagtggcaaccgtatgttgcacaatggctggtacaacgctttaatatatttaactgcattgggtgtagaggaagaatcctcataccgaatgctctcactactccttcaaccaatgtctaaactctaatagaatatagcatctacaataaaccaaaacacacccagac

SEQ ID NO: 7689 - protein, 399 aa, DROSOPHILA
MKLRLLRCLRQQPAKPAAVMTHKEDQYPVSLDHHVLKDMAKGVRDTTVKILLLGTAESGKTTIIKQMRILHINGFTDDERREKIPEIYQNIHESILQLVGQMGVLGIDFGSCTSERSADYILSLPGSAPEYMNEEYCDHVTTLWNDVGIRACYDRSNEFPLLDSAKYFLDNFVRISDAEYIPSTEDILHSRKITTGISQITFRVPIPKSMGGGEQQFQMYDVGGQRDQRNKWIQVFEGIQAVLFLISCSEFDQNLREDPSQNRLQEALKLFRAVWQNRFLASAGLIVFLNKYDIMERKIRAGKHIVDYFPEYEDFCKRPQQDNCFGESDWTKMFIKQKLVDITQEPFKRHSRNQVDLGTSERECYYHFTVATDTRCIRDVFCDVQKMILSENVSSMGLF

SEQ ID NO: 7690 - DNA, 3481 bp, DROSOPHILA
attgaaactgcttcgctgtaatctatattatattcatattcgtggttacagtaagttcattgacagcagcgctcactgtggttttccatcacaaatctcattgggcaaccagttctttttctatgaaatccattaagcttgcaaatattaaacttttaaatgcctgagtttgaccttttgctccaagcattgttggtctgacatgtgtcaaatatgtgttaccaaatcaagctgcaggtcgcatgtgctcggctttgtttcacacgactagctctcgtttgaatgttggctaaccaagctggcccaaaccacatccccttcatccttccgaccctttgacccattctattagcaggaaaaggttgcgagcgcagtcagctgaaaggaggtatgcaaacgtgttttccttggctcctgcagttggctgacaggatgctggaccatctgcagcagctcggctgacaattttattgacagctcgacatttagattgattgcagttgcagttgcgcaattccaaacgataacaatacgtggtgcaatttgctgtttggctcccttttctattttctttaattaaaagtttagccaaatattgtttgctttggcagggaaaaaacattcgggaatgttaaggatatttcggtatgcaattttcttcacttttttgcttactttctacgtactgttctgcacctttttggtttgcttatttccattctgacaggcaatcgtgtaaaactatttcaatttggcaaaacaccgaaggtaagagtttactcttgccaaagttttgcaagaatgaaattatacacgaaaaaatcttaaaaaccattagatacttagaaatatttgtagaacggtactccatgtggtgcgcagctttttgaacataatggaaaaccgatacttaagcaattactatagcattgaaaaagttgacaacctcagaacttcatacgttttggggcagctccgccaacattttagttcactgtctaccgtagttcagcctacatcaattttaattgtgatttttcgctaaagattgttatggaaaaaatggaaaacccaagcgagattactgaggaacagccaactaccacacacgagtaccagccgcgtctgaacgagatagcccaaaagtttctcgccgatttggacgaggagcgccagcgtttgtccgcggagtttccactttgcgcactgctaatcgacgagggtaaaatcaattcgtccctttacagggtatattttattggtactaatcccaaattgcagctagggaccgtgtctacgccactggtcgtattcccggcaaggaactctacgcagacgtgtaccggcagaagccgatgaagattattcaaaaggtcttcgtgcccgttaaccagtatcccaaggtgggttttatacaattaactgtcccctatgtccgcaaaataaatccgtacccttgcgcagttcaacttcgctggcaagatcctggggcccaaggggaactcgctgcgtcgccttcaggaggagacccagtgcaagattgccctcaagggtcgcagttcgatgcgcgatcgtaacaaagaggaagagctgcgcagcgacccaagatatgcccatcttcagaagaatctctttctggaggtcagcacggtggccataccggcggagtgccattcccgcatagcctacgccctggccgagattcgtaagtatctgattccagacaataacgacgaggtttcgcacgagcagctgcgcgagctgatggaaatagatcccgagtcggccaagaactttaagggactcaatctggaggcgtacaggtaataccgatctgatatccttcgcttgccattagtacaattttaagtctagattaattaattaaaaatctattattttgcagatctgtcagggacagcaatggggcttctaagtacatcaatctgattaagcgggttgcggaaaatccgtccaagtaagttacttgtataattatgtatcatttaatgacaccaataggtatccccgcgtccaagtagttccttgaatcctagtcagcaactaacattttcatctttatagagtcgccgatatggagcaggtggactatgattatgatgaacatcatatgccccccattcatctgcccacgggctatgagtacagcatacgtaagtgtgtttggtagtgcttgggggtctattacaaataaattacaaataataatcaagtaattttatagaacgtccatcaaaaatagttgcgaaatttaaacgtccatatccgtatccgactgacatgaaacctgtgcgcgaaccgcccataaagttctataagcccaatcctggtataggcacctacgttatgaaatctatgcttggagcacagtaagaaagctgcattcaaaatgatgctatcaatgaagaaacattaacatttatataaaagcgcacattaccgcaaacaatattattataatgtacctttccttacttcgtaaaaaacgttaataaaatgatacgtatacccaaaataataactaatatataacatttttcaaaagtgttggcgtggcagttctggacggtttgggtgccttggagtgggcgtggcaacatgaattaaaaaaatttgcgcttcgtctatagttaaacgcttccttctgcctgttacatacttcccaacgaacgggtataactattattactcatatttaactattaggtctttacctaaacacttaatgcaagtggcgttaagtgtttaagctttaattaatcaatacgtctcggtcttttgattagaaattcccacttgtcagcgacttacttaggcatcaactcatcaattctcagacagactcacaaatacattttccggctcacacacaagcctgttgacaatggaaaatggcccctctccgctttcaattttccgcccacgccaggacacatatgtgtgtatgtccttccactcgaactcggcgtggctgtaaattatgcatacaaattagaaactaccgtcggatgggatgacgtaaacacagaaatgttgaataataacattaatgaaaacaatgcaaggacagacaaagccaaagtgggtggtgggctggaaaaggatggcatggaagaggacaaacaactgcaggaagcaaaagcaagcagaaaattaaacagaacaaagcagtagcaaagcagatggcgacaagataaacacatacacttcatccatctagtcatacattccccaatacttatagatacactgcaaaaaaaaactaaagttcttgattgatacttgcacggaatatttaaatcaaaatattaatggttaaacaccttaaggaactgtttagattacaatttactaattattgtttctagcttaatggcttttgtattggttgcctttcttccagtgcacttgcaactttcacaacaatcacagtcagtgctaaaacgaaacagacagtaca

SEQ ID NO: 7691 - DNA, 1100 bp, DROSOPHILA
accgtagttcagcctacatcaattttaattgtgatttttcgctaaagattgttatggaaaaaatggaaaacccaagcgagattactgaggaacagccaactaccacacacgagtaccagccgcgtctgaacgagatagcccaaaagtttctcgccgatttggacgaggagcgccagcgtttgtccgcggagtttccactttgcgcactgctaatcgacgaggctagggaccgtgtctacgccactggtcgtattcccggcaaggaactctacgcagacgtgtaccggcagaagccgatgaagattattcaaaaggtcttcgtgcccgttaaccagtatcccaagttcaacttcgctggcaagatcctggggcccaaggggaactcgctgcgtcgccttcaggaggagacccagtgcaagattgccctcaagggtcgcagttcgatgcgcgatcgtaacaaagaggaagagctgcgcagcgacccaagatatgcccatcttcagaagaatctctttctggaggtcagcacggtggccataccggcggagtgccattcccgcatagcctacgccctggccgagattcgtaagtatctgattccagacaataacgacgaggtttcgcacgagcagctgcgcgagctgatggaaatagatcccgagtcggccaagaactttaagggactcaatctggaggcgtacagatctgtcagggacagcaatggggcttctaagtacatcaatctgattaagcgggttgcggaaaatccgtccaaagtcgccgatatggagcaggtggactatgattatgatgaacatcatatgccccccattcatctgcccacgggctatgagtacagcatacaacgtccatcaaaaatagttgcgaaatttaaacgtccatatccgtatccgactgacatgaaacctgtgcgcgaaccgcccataaagttctataagcccaatcctggtataggcacctacgttatgaaatctatgcttggagcacagtaagaaagctgcattcaaaatgatgctatcaatgaagaaacattaacatttatataaaagcgcacattaccgcaaacaatattattataa

SEQ ID NO: 7692 - protein, 316 aa, DROSOPHILA
MENPSEITEEQPTTTHEYQPRLNEIAQKFLADLDEERQRLSAEFPLCALLIDEARDRVYATGRIPGKELYADVYRQKPMKIIQKVFVPVNQYPKFNFAGKILGPKGNSLRRLQEETQCKIALKGRSSMRDRNKEEELRSDPRYAHLQKNLFLEVSTVAIPAECHSRIAYALAEIRKYLIPDNNDEVSHEQLRELMEIDPESAKNFKGLNLEAYRSVRDSNGASKYINLIKRVAENPSKVADMEQVDYDYDEHHMPPIHLPTGYEYSIQRPSKIVAKFKRPYPYPTDMKPVREPPIKFYKPNPGIGTYVMKSMLGAQ

SEQ ID NO: 7693 - DNA, 3670 bp, DROSOPHILA
ggcaaatcttacaactactgaattgtatcagtgaacatttctgaactaatatctattagaacatggctattaacaaattgaatccaaatacccactcaccttgccttgataaccatacgtgcctaagctaaaatatccacccatatcttggatttattcctcatacctgttcaaactaaagtattatcaccgcgcgggtctaatcaaatagtcagataaacctcgacgggttctcggtttagagcatgcttcggtggtaatccaatccaatcaggacctgaactaccgtctgccagtcaatcaggaaggactcgataagcagccgtcgctacgtttatcacctgcactccacggtcctctggtgtcctttggtatcctttagggactcaggacgcatgcgccgccatcagttcggcaaaatgctggaaaaggattgcagaaatgtaaacgtgaagcgatgtcggtgtcagctaattaaatatttgcattggcaaaaggtgcaaaacgccgagcgatatggattgaaattgatggaatgctattaatgggggcgggttagaaggaagtccccgaaaaggaaagtgtatgacaaatcggttccctgtttgcacatgccaaaggtgttttctccgagaattcgatattgctattgttgtgatttctgtttttcgagagggttggcggaaattgtcacaaaatatgaacaggggcagaccccaaaatgcggatgtttggtttcctgttaattattgtacattttgaaggcacatagaaactgtagaaggaaagattacatttttttaatgcgtttcgatgaatgctgttactacctaaaatgttttctataacttttggttacaaatttttaaatttttttattcacatctgtctgtatttgagcccaaatattagtgatagaatttaaattgaatatttctatacagtttccttctgtgagaatttctttcaaaattgttaaaaataataaagaccatataaatttcttttcgtgagttttattttataaaaatatttaattcttctctttaagctaggaataatcttaacaacagttggcttaacagtactgagaatacataaataagggtatattataattaaatgaatagatttggtaaaatgctgcgtgtgacaatgaggcaatatacatgaacttaaacttagaatactatagctgaaataaatatagtaatagtagcaccaaaaccgaatcgacttagtacaaacttataataggtattgtctgtttgtttggtcttcgccagcggaatgtgagtttgcttaggtaattgtgtcctgctaagggattcatatgtcgagaatcctacgcaatagtgatggtgcagttggagctggagtgcttgttcaggagcgacatcctggagaaagatttgtggcacacctggcaggcgtacttcttgacgtccacgtgggtctgctgatgagctcgcaggttcgagcggtcggcaaaggatcgtgggcagtcggggcactggaaaggcttctctccagtgtgggtgcggatgtgtccctggagcagccagggtcgagagaaggccttgccgcaaatggggcacttgcagggcagagtgtgggtgcggatgtgcatcttcagggctccaatggtggtgtacagctttccacactcctcgcaggagtgggtcttcttctcctgattacactcggctgccgggcagtggaactgacggtgcttggacaggcccatcgaggtggagtacatcttctggcactcgtcgcacttgaagcggtagtttttggcatgattggcggcaacactcgccgacgaggcactcatggccggagtgtaggagtatcccgatgagctgcttacactggcaccgctgctgctggacttggcctcatcgaaaaggtggaacagagccggcagtgggatgtcatttcgcactgaaagatcctctggctcggaaccggtttccagatcggatccggggctggagggcggcgtcatctgctggtagctgtagaccgactggggcgaggccatcgagctggctggcgaggggaaggcggccagatggggctgatagctgctccacagggcagagatcggattgcaaccggcggccatcacaaaggcggactggaagggattaatcgtggtgggggtggcggtggtatatcccgttgttcctgccgttagtccacgcatatggatttcggtgggcaggtaatcctgggcctccactggcggcgacagcaggcaggagttggagctagagctggagttcctttccggtgtttttgaaaggttcagcacatagtcacgtttcggttccggctgctgataatcctgggtctcctcgtcgcgaccccgtttcagggatagatcctgcggctgatcctgggcaaactgtgagtccttggtcagggccaaggcctccgtttgtggcagacgctcctccacgaagacaatggggcgcttctttagcgggcagcttttgtagttggcggccatttttgatgtgtgtgtgattaagttttagtttccggtactgatcgagatgggtaaatcgggagatcggcgatcgagaggcgagttatatagttcgggatcgagtatagagcggtggttgcgttctcaacgagagctgaggtggctgtgacaggtcaacagtcgagcacgctcttttatacccggaactctgcgcctctgccgacgccgctgtcgccatttggtggtggttcttcttcaaaacagaaaaacactcgcacgtgtgcgtcgctacctagcaacaacaacagcacttttcccatacccttattgcgtatttccctcacttccctctacctgctctctcactctctctctctctctcttcctccatttcccacctctctctcggaagagcagacgcaggcgcaccctcccaggaataaggatcccccgtataagttatgacagatctggtggctctccaatttcccgatacgctcacaacccacccgtaataactcgtgcaggtccgggtccgaaatgcaagttacaatatcgcctccctacctatggatcaccctaagtaattttctatttttaagcacgagtcaaataggactcctagtactcttcgttcatggggtggtttcctcacttagattgagtgcttcaagtacatctgccgatgctctaaattcggtttttggtggggagttgaacctgagcgatacgcactgacaaaaatgacaccttcgcagagaggtgttccaaaaatagcactgataatgagccgaattccgagacaccaagtgtcaactctggggtgcactctacgctgacttatggatcatctccagtggctcattggcagcgatcgatgagagctaggaaaacatagctcagggcataggagatgtcattaaaaacttgacaaggaatagacgaagagtgtcaagtctcctgtgagcttggatcgaagagatctcctgttcccacgattggtccgtgaaagaatgacgattcgaatacgagttacacattttaactaatcccatggtcatcttattagtatgtgaagttctgctgtcttaaaatcaattcgattgataacgtaaaaaaaatcatactgcccctcagcatccagctgagtcctggacgattcccacaattctc

SEQ ID NO: 7694 - DNA, 1670 bp, DROSOPHILA
cctgtcacagccacctcagctctcgttgagaacgcaaccaccgctctatactcgatcccgaactatataactcgcctctcgatcgccgatctcccgatttacccatctcgatcagtaccggaaactaaaacttaatcacacacacatcaaaaatggccgccaactacaaaagctgcccgctaaagaagcgccccattgtcttcgtggaggagcgtctgccacaaacggaggccttggccctgaccaaggactcacagtttgcccaggatcagccgcaggatctatccctgaaacggggtcgcgacgaggagacccaggattatcagcagccggaaccgaaacgtgactatgtgctgaacctttcaaaaacaccggaaaggaactccagctctagctccaactcctgcctgctgtcgccgccagtggaggcccaggattacctgcccaccgaaatccatatgcgtggactaacggcaggaacaacgggatataccaccgccacccccaccacgattaatcccttccagtccgcctttgtgatggccgccggttgcaatccgatctctgccctgtggagcagctatcagccccatctggccgccttcccctcgccagccagctcgatggcctcgccccagtcggtctacagctaccagcagatgacgccgccctccagccccggatccgatctggaaaccggttccgagccagaggatctttcagtgcgaaatgacatcccactgccggctctgttccaccttttcgatgaggccaagtccagcagcagcggtgccagtgtaagcagctcatcgggatactcctacactccggccatgagtgcctcgtcggcgagtgttgccgccaatcatgccaaaaactaccgcttcaagtgcgacgagtgccagaagatgtactccacctcgatgggcctgtccaagcaccgtcagttccactgcccggcagccgagtgtaatcaggagaagaagacccactcctgcgaggagtgtggaaagctgtacaccaccattggagccctgaagatgcacatccgcacccacactctgccctgcaagtgccccatttgcggcaaggccttctctcgaccctggctgctccagggacacatccgcacccacactggagagaagcctttccagtgccccgactgcccacgatcctttgccgaccgctcgaacctgcgagctcatcagcagacccacgtggacgtcaagaagtacgcctgccaggtgtgccacaaatctttctccaggatgtcgctcctgaacaagcactccagctccaactgcaccatcactattgcgtaggattctcgacatatgaatcccttagcaggacacaattacctaagcaaactcacattccgctggcgaagaccaaacaaacagacaatacctattataagtttgtactaagtcgattcggttttggtgctactattactatatttatttcagctatagtattctaagtttaagttcatgtatattgcctcattgtcacacgcagcattttaccaaatctattcatttaattataatatacccttatttatgtattctcagtactgttaagccaactgttgttaagattattcctagcttaaagagaagaattaaatatttttataaaataaaactcacgaaaagaaa

SEQ ID NO: 7695 - protein, 390 aa, DROSOPHILA
MAANYKSCPLKKRPIVFVEERLPQTEALALTKDSQFAQDQPQDLSLKRGRDEETQDYQQPEPKRDYVLNLSKTPERNSSSSSNSCLLSPPVEAQDYLPTEIHMRGLTAGTTGYTTATPTTINPFQSAFVMAAGCNPISALWSSYQPHLAAFPSPASSMASPQSVYSYQQMTPPSSPGSDLETGSEPEDLSVRNDIPLPALFHLFDEAKSSSSGASVSSSSGYSYTPAMSASSASVAANHAKNYRFKCDECQKMYSTSMGLSKHRQFHCPAAECNQEKKTHSCEECGKLYTTIGALKMHIRTHTLPCKCPICGKAFSRPWLLQGHIRTHTGEKPFQCPDCPRSFADRSNLRAHQQTHVDVKKYACQVCHKSFSRMSLLNKHSSSNCTITIA

SEQ ID NO: 7696 - DNA, 3848 bp, DROSOPHILA
aaccgcggtacaggcttcgggtaatctgcaatggcaatatgcataagttcaacagacccattagtgaaccccctttatctaaatgcgtagaacccaacgtattgcttactgtattgatgtgccaaattggcggatagcatgtccatgcgctccacatccttgttgttctcctccagctggtggatccgagcgcgcaacttgaactcgtcatcctcggacgaaatgatcagctcgaattcgtctacaatctcgccctcctcacgatcctcctcgacgactccctcctcagcagtttcgtcgggatcacaaggtttagagttcgcagggttttccagcagctccgagtgctctttttttatcgcgggcacttgcaatatttccgggggcattgtggctgtgccaacaaccatttttgtctcacggaattaagcactttatgctctttttctgatattttctgacactaatgaactacaattactctttttttcattactttatacttgagatagtagtctatcgatagattgcgataacctaaaaaaaataccacattgcagtattttgaagcttagacaaggaaaatgtttcgctttcttctaacaaattactacaattgtgaggtcaaattcacgcagatcccagttctgcacttcaaatcgcgaagtatagttttttatatttatttttttttgccagtaacgggaaacacttcagactctattattttgcttctttttttttgtaatttaagtaaacgcttacttttatatgtatatatattcgtcgatttaaactactatgcttgtttctattctttgttgcaagttaattaatacttaaaacttaaacagacttttccgatagtccttcgttttgcagcactgtccggcaggtgtccctttctggtattttcccactgacagctgcgcgaatgccgaaatgcggtcaccctaactgtcaacgcgacttccgctcttttcctacccaactcgcggagcaaaatgcagcagaaggtatttgtgcccgtgaaaaaacagagaattcgtgtctaactaatgcctaaaatgttgcgaatatttgtattttgcagcgcagagaacccgtgcaggctgtccaggtcttcggacgcaaggtgtgtgtaaattgaaccgctgaaatccactaaaataatcgtgcgacacgtgcaggcgaaaaactcgcgtcaatcggcggcggcaaaaaattcgtagctgccgccgcctcaacgcagaggttatgtttgtgtgtgtgcgctaggattttagcctggaatttggattttaactcaatccagtgtcttactaagcgattaataaccggtgtttttattgtagaaaaccgccaccgccgtcgcttactgcaagcgtggcaacggcctcctgaaggtgaacggtcgtcctctggagcagattgaacccaaggtcctgcaatacaaactgcaggagccccttctgttgctcggcaaggtgagtacgacgaacggagcagcttagaaagccaaagcttccgtttcaaaatctgttttggatgcacaaaatagggcatattttaaatatgctacatgcaatcaaagccgccgttttgtgcagtgaaaattgaaacgaaagtctggcttgtagtaccaatatgatgataacctttatcccgaatttgaagccaaatgagactaattttttatactgatcgacctaaacacaaatgtttatgcacaacctcttgtaagcctctattaatccaaatacaattctgtatcttgcaggagaaattcgccggcgtcgacatccgcgtgcgcgttagcggtggtggtcatgtagcccagatctacgccatccgccaggccatttccaaggctctcgttgccttctaccagaaatgtaagtaaagcttcggatcgaaagcagtagcacaacgcctttttccagatttttgttggaattgttgtcccttttccttcgaatcattattgaaaggcagattaaatgatgagcatataccaaccaagctacgctatagatgtgtagattgggtgatgcttcagaaacaccttgaatttaagacccttttttcagatgtttgttggaattgttaacccttttccttcgaatcattattaaaaggcagactaaactttattatgagcatataccaaccaagttgtaagtttattgtgcaaattgggtgatgcttcaggaacactaggaaacgcagtcccctttttccagatttttgttggaattgttatcccttttcctccgaatcattattgaaaggcagattaatttatgagcatataccaaccaagttgtaatgttattgtgcaaattgggtgatgcttcaggcacatttatacgattattagaactcctagcaccttctcccagatttttgttggaacttatagccgtttccaggaaaagactcgagcagggagattaagtgcatgtcgcaatcgaagagaacgttggcagatttgaccattgttatttgaggcttcatcgacactttgattaactttagttattttctatgaactgtatctgtgttgtgggttgctaattgtttgaaacttctttcttgcagacgtcgatgaggcctccaagaaggagatcaaggacattctggtgcagtacgacagaaccctgctggtcggcgatccgcgtcgctgcgagcccaagaagttcggcggtccaggtgcccgtgctcgctaccagaagtcgtaccgttaaactactctgtctggttttcaatttggattagagctattttttacaatttgaaaatggtttgcacgcacgtgcgaataaaacggaataattaactgtacaaacgagtagttttgttctataaagtgggtgaaatatgtataacaaaaccttttttggaactaagtgacggtttccagaagaattgagttttcgaaaaattaatttttgaagcagatgatattcagtttgagaacataattttataaagaggtgtttatatcttggaaggagtaatatttgaaaattcttgaacaatgttcggtaggtttgcgcctctgctaagaacaatcactgagtatggtatctttttggtatttaattagatggacttatttctgaactccgccaacggccactctataatgcagccatcgtttgtttttcaaaacgtatagctaaatttcgggttaataatatctatcaaatgtttatttgaaaatttaaaattctacaagtaattttttcccctataagcacttatatatatatttatttttatattcatattttattcctttgcaaattttttcgacttaagatttcctcgaatttcccactgcagctacaaagtagctaagttgcctacacagccacgtagttagtcatgggagctttgtttggaaaaaccagcaaaaagacggctcctagtcggatcaccgaccaggacaaggcggttctggtaagttggtggtaactgagtagccagaaagtttgcccaaacacttagccacttccccattgcagcaattgaagcaacagagggatcgtctgaagcagtaccaaaaacgcatcgagacgcagttggagaatgatcgcctcctggcaaggaagtgcctacagcaaggtcgcaaggagtatgtgtcatacccatatgtgatctaaacatgttcaactaaaccgattgctttcattttagccgggccaagctgctgctgcgcaagaagaagtaccaggagagtctgctgaccaatgccgacaaacagctggaaaacctggagaagctggctgcggacattgagttcgcccaggtggagatgaaggtgctggacggcctcaaagcgg

SEQ ID NO: 7697 - DNA, 552 bp, DROSOPHILA
caaaatgcagcagaagcgcagagaacccgtgcaggctgtccaggtcttcggacgcaagaaaaccgccaccgccgtcgcttactgcaagcgtggcaacggcctcctgaaggtgaacggtcgtcctctggagcagattgaacccaaggtcctgcaatacaaactgcaggagccccttctgttgctcggcaaggagaaattcgccggcgtcgacatccgcgtgcgcgttagcggtggtggtcatgtagcccagatctacgccatccgccaggccatttccaaggctctcgttgccttctaccagaaatacgtcgatgaggcctccaagaaggagatcaaggacattctggtgcagtacgacagaaccctgctggtcggcgatccgcgtcgctgcgagcccaagaagttcggcggtccaggtgcccgtgctcgctaccagaagtcgtaccgttaaactactctgtctggttttcaatttggattagagctattttttacaatttgaaaatggtttgcacgcacgtgcgaataaaacggaataattaactgtacaaa

SEQ ID NO: 7698 - protein, 148 aa, DROSOPHILA
MQQKRREPVQAVQVFGRKKTATAVAYCKRGNGLLKVNGRPLEQIEPKVLQYKLQEPLLLLGKEKFAGVDIRVRVSGGGHVAQIYAIRQAISKALVAFYQKYVDEASKKEIKDILVQYDRTLLVGDPRRCEPKKFGGPGARARYQKSYR

SEQ ID NO: 7699 - DNA, 10069 bp, DROSOPHILA
ctgcgaacggttttctaacgctaacgcacgtgtttgaaagcgatttcaattgttctgcaattgccctcagtgaagcagcaagcggagaggttgcattttaaagcacttttttccagtaaaagtatacaataaacaagccaatatggtgagtgcatccacgttagcatcgagagatgtaaatttcaacaagtatcccaatctttgcagactgaggaagttaatcccaaggcattcccgctggccgatgcccagcttaccgccaagatcatgaacttgctgcagcaagcattgaactacaatcaactgcgcaagggagccaacgaggccaccaagaccctcaatcgcggactggccgatattgtggtgctggccggtgatgcggagcccatcgagattctgctccatttgccgctcctgtgcgaggacaagaacgtgccctacgtcttcgttcgttccaagcaggccttggggcgtgcgtgcggagtttcccggccaatagtcgcctgctctgtgaccaccaacgagggcagccagctcaagtcgcagatcacctccattcagcaggagatcgagcgactgctagtctagtaaccctttagatttaagtgaacattcgtacaaagtggtaatttcaaattgaaattttgaataaacatgtgtattctttaatgcaattgttgtttccaacgcacatggttggcttggagtgcccaatttttggacaccggataccaatgccgaaaaataccagaaaatactaaaccaaaggggtcagctggtatagccggcaaagtgctggcaaataaataagctagtttaatataagcttatttcatataaattattgaaccagaccaaaatgtacatgtgcatgtagaatatttatttataactataagttatttattcatagaaatagaaaaaaatctgaatggtagcttatgcaaactactttaagaaagccaatcctggcggcaaaatagccagtcgcacatcaccgttcgcccctggtgaatgtcacttggccgccgattctactgaccaccaccattgccacaccatcctgccgattcgatcagcggtgtgaacttagcaactgcgtgaacccaatgacaacgatgcaccgccgcctttgtgaacggagggaattactggaatctgggtgcaagtgacaagcggctagaggaatcaaagcactcggtataaaggcagtgcctgccgacgaaacaaataccaaatcctgaccagcaacgagacgggatgaagctgctgggcaaatacgtggacaagggcatgcaggggtgagtgaatatccccagagtcttaaactattttcgttatgcctcgaaaattcttttagaaatgtgaccctggtgccggaggagtccgaggatatgtggcacgcctacaatttgattgcgaaaggcgacagcgtgcgcagcaccactattcgcaaggtgcagaatgaaacggctactggctcctccaccagcagccgggtgcgcaccacactaaccatcgcagtggagagcatagattttgatacgcaggcttgtgtgctccgccttaaaggcagaaacatcgaggagaaccagtatgtcaagatgggcgcctatcacaccctcgacctggagctgaatcgcaagttcgagctgcgtaagccggaatgggacacaattgccttagagcgcatcgaaatggcctgcgatcccacacagtctgcggatgtagccgccgttgtgatgcaggagggattagcacacgtctgcctgatcaccgccagtatgaccctggtgcggagcaagattgaggtctccataccgcgcaagcgcaagggcagtgtccagcaacacgagaagggactggccaagttctacgagcaggttatgcagagcatcctgcggcacgtcaacttcgatgtggtcaagtgtgtgttgattgcgtcgccgggattcgtgcgcgatcagttctatgactacatgttccagcaggcggtcaaaatggattacaagctgctgctggacaacaagagcaagtttatgctggtgcacgcatcctcgggatttaagcactccttaagaggtgagccatttacccttatgaagagatatgttctaagtcaaattcttgccttcagaaattctacaggatcccgccgtgctggccaagatgtctgacaccaaggcagctggcgaggtcaaggccctggaacaattctacatgatgctgcaatgtgagcccgccaaggccttctatggaaagaaacatgtcctccaagccgccgagtcgcaggccatcgaaacgctgctgatctcggacaacctctttaggtgagttacacttggttgagccaacgtatatatctatgtatattgaagtaattactagctgggcacacattaagcccaatcaagcgggagatcaagagcacgatcgcgagtataactagaaaccttcaacttggcaaaattgtgtgagagtgctatggcaattggtgtgcttgtgtcgccatatggaacgcatgtcaccagactgctttgggtgccggaaagaatacaaatattggggtaattcagaaaatctgaagaagagcaatcaatttaattactgtatcgattgtgctttaattgatttgctatgcctgcgactgtggttttcaatttatttatgtttgtgtatagaatttatgtgtagaatttagctgagaacgcgtttgttattctttattaagagagagtttttaacttattatactacaacctaatatatcgcagtgatttcactcgtatggcttagcacagtatctccacaagtgataaggtctagatttgctagatctgccactatggacttccataaccattagaagatcgcagattcttccgctgcgaatagagatctgctgcgatcgcacgcgtttagccatttaaagaaagcacgttcgagcattaatttgttggccccatagcgacgtgctcatgatcaaggttgccccaatgtctcctcaccatttttggctgccagcctgtttagttctgttctgttctattcactactcttctccgcaatttgtttacactttaatgggccgatgaaattccattcgaatatgtttttgtatgctaactgcgtggctggcaattaaatgaaaattaagtgctatagctttttctttacttaacatttaatgtacttaatgatctaggcaaaaggtgttttattttagcacttttagtcagtccgcttaggttgcttcccccataagtattcttcctccttctttttaatctcagaaattgtttaaatcgcagctcgccgctatcgttgtcgtcgtcgtcgtcgtcgttgttgctccggactgggctttatctcgacatttttgattgctgctgatagtttggccattgtgcaaatagaaacaagatggggaaatgttgttatgaaatgctttgtttaagttttccatttgccttaccgccttcgctgctgttcattgcactgattctttctcaatttctgctggtatacgggatcctcttcgaaatcttctctgctcctcatcgtcaagcgcttgaaacaatcgtccaacgtttccctcagtggcagcaggcgatgtggtgatggcggagaactgggcatctttgtgtagtccagcttcttgagggactcgcacgcggtcgaatccgaccactgatggatgggatggcccagctcggagatggtgtagtcgggttgtctggtgagcatcttggatccgcctgatttgactcgatttaattcgacggtgttaagtggcctgcacttaaataggaactggagtggaaagatatgtgcgttaagtagtacagtcaagtggagttgaggttcggacagataattcaacgattcgagtttctttgctttcgttttatgatcatcaaatcgataaatatataaaaatcgacatatatttgactggaatgtgatcaagttcctcaaaatgtactacacatatttcgaattaaagtcacgtaaatgtatttattttgaaatcattttatcataatatgtgaatatttatttaagtcacataaaatgaaatcatgcagttcaaattttgtgactactataagctggaattttgccggctacaacaaaagtattatcagcaaatgattgtggaaaatatgtagagcatttctatgaatgtttgtgataagccaagataactttatagttaacaatattgttaaaaatggtgtttagctttctgagactttgtttcgtccctcacccatttaatccgtatccgtaaatataaacgtaaatgctcatggacgaattccaagctgaatttgcgtgctctgtttcgggtcttattttatagagctgtttttgccagacgagtttcgattagcaaatgacggggactgaactaaactgtgatgtaaataagctgggtacagtataagctttatataaccgtgtggaaatgattccctcagtgagccaattcttgtgctaattattagaacccgctgtgggcgaaagaagattgcgattgagggagcaggaacggcagcgggagaatagcaataaacaagaaaataaagaattttaatttatttaatcactccgtttatggatcacttggctggcaactttttgaagcggacactctcgcttccacacagctccccctttggattttctgggaatggattccacatggcgtgcaacatgatccacttccagctaacttatcaagttcttttgctactcgaatgcacttagcattttcttatacgccccctcccccccccaccgatactccctgccatcttgtagattttctatttttttcgtacgtatattattcatgtgtccaaccagtttttctagtccctctttgttttgctttgcaacatgtcttgtgcatcaaaaacgtgccccctttaagcgattatttctggtgtttttttgtcgcagctggccacgcttgtaaatattgtctcgaaatgcaattgtttatatatttcgtacatatatttgcattgtgaaatattcgaaaaaaaagcgaatgaaagagagagaggaagagtttaaggctttttccattaaaacttaagtgaaagggcttgtctgactgagcgatattgataccctaaacgggtatccatgaatcacttttattggatctttgctttaaagggtgctcgggttgggttttgtttggtcaactgatggggtaagcaatgaattggctgtttttggaatgatcgtagtcataaaggctttgaaatcaaggcgttgcctttaaggttggtctcaaatgatctcacaaaattgggcaatgagggctaaccttgccggattcattagtcttgcactttttcaatatatttagtgcagtacaatgtttgtagattatacgttgagttgtcaagttcaaatagtgctgtctttgctcgcacatttaattacacatttgtactgatatctggggctgcccatgttcccactttccccgccaccatctttctttcccatttctccttaaaaacgagctctctctctctttttctggctgacaattcacggctgtgcccaacctcgtgcacgctaattccattataacaattgattccattgtgcaatcgttgtcacgcagcagcagcagcagcaacagctattgcagctacatcagcaacatgagtagcggctaaaattgcaggtacatcagcagcagcatctacaacacaatggctcgcagttcatcgcagattgcggttaacggatgagcgaaaaagtatctgaacacaggtagcagatacgtttgtatctgcattgccttctgctgagtcagcggggataaaacgttgaactaaactgtcagcgggactttttgagagtctatttgagatttcatctgcactgaggcagcatttttgttatatgtagatataaaacctttttgcaactttcactctgcggaggagaaaacacacctttgtattatctttttatgcgttgtgttttgtgcacttttcttttgcggtttcgatggcgctgtttggatcttttttttagcggggtcttagcaccaatttttcttttcgcgtggcaatcttctccggttcgtttcggatttcgattttccgtccctcgaatcgctcgatgttgcccgcaaaaaagccgctttgcaactaattcttcgatgcgaagacagccgctctcttctcagccacacgtgttgtggatcgcattcggaataaagtccacactccacatatttcgatccgttcgctcgcaatctctccaagcaaactgaaagcggtttgttgtcgtcaataaaaatgataattgaaatttcattttttgtatggttttcattcgaatttctgctgattcttattctaactttttttacctgcacaaataaatgctcattctgatggggtttttgaactgcacttactttttatggcagtcgcactttcattgctcgtctagtgacttcatgctctctgagaatcttaagtgcaaattatggggtccaagtataatgtgtgtgatgaccccctttggtggggttgagtgacgaggtgaacccactatttccagttaaacttgacaccttattcaatgcggattatgcccatcacgtgccatgatccagcactttgctatgcgccatttaaacgggccgtggaatgcgaaagtgcaatagatacgggcacctacatccgtaaatgggtgaaaaatgggtatattaatgagtggaatcgagttggatatgatgttaggggtttctgttctataaatgatacgacaatgatttaaacatcaacatttgttcattttacagatgccaagacgttagtctgagaaaggaatatgtcaatctggtcgaatccattcgcgatgctgggggagaagtcaaaatcttttcgagcatgcacatctcaggagaacgtaagtatcaaacaataaactattgatttaaacccttgaataagaaggattgtaagagaatgatccgatctagtgagtcactgtgtagtacaaagtgcatcttctttactccattaattaagttcacatatatgtaaggcaattacatgctaaacttaaatagaacaatcttgaaagccatctaactttaaccttgtgtcgatttgaaataactcaagaacttctggtacatagaaatgaatctgtcagtgactcatggagcgagaaggaactgccctttcaggccgagaatagatcatctccagcagaatcttctctttgcatcacacttgttccacctttggccatttctatgctcaatttggatggaatatttatgtgcaggctgccttcccccgtctaatgacctcgttaaagatgctatttttaagttcccgcgatgcaatattgaatacatgcgcgtgcatatgtgagaatatcttggaggggtctcccacattacaaagtccgctgcgagataagcaaaaaaaaaaaaaaacagcactattgaatggctgccaagtagttttcgctagctcattcgaaagggaactttcgatttcattttcgtatgcaattaagtattaattaaaattacatctcacatattggccatactttcggggtgtaaagtgcttaaatgctttaaataaccatttgcaggtgactcacgagatgagattccttccacgagtttcttttttcaattgtctgaggcctgcgtcttggcaagagtttcgttttcgactcgaaaatgggtcgctggtgttccgaaatagatcccccatgccctgtagattttgcaagaatttagttgtaacgatccctttcgtattctttcttttttttttatcgctaagtactgcccattcttatctcgttgcaagtatttattccgcaattctactcagccgagcagtttaatcagctttaaattatataagaatataaacaatgaggctacttgtgtaaacagaaccaaatttaacagataaaggggcctggtacttgagaacacgaattatatattctctggtacgtaacctgcattaattatgaatatgtaatgctcactctggccgtgttgaatgtgaagttcattggggtgagtcatggcctagaataagcggtggaccttgaagttggacggtaggaacgcccacaacctggggaaaaagtgaaaaacttgcattggctgctgcagttctgaggctctgcgatttcttgcaccgagtatggatgcttatggtctttgtagtttacttgatattcaggttttcagcatgcagatagcagtaattagctgcaacaacttataaagctaagtccattgaataaccccaatctttttgttcacagaacttgctcaactaactggaattgcagccctcctgcgcttcccgatgcccgaactggaggacagcgacgatgatgatgatgaggatggagcggcaggcggggtggcagatagcgatagcgactaggatcataaataggaatagcttcatggaatcttggcatttgataacggaaaattttgacttaggaacttaactagcgagcgatatacaagtagactaataggaaccacgacagacttggacgtcagggcatatacaatatacatacatagtgctaattcaatacaatatacacactgcttaagttcacccgtggctgggcctacaaattcaacattttatattctttgtgttcaattaaatggccacaatattgttaggtttcaattattgcttcatatgagttgcgttaactatattcggcaaactaaattcctttccggcgcacttaaattcattgttcattcatttgtaaaatggaaaacggaggtttacaaaatgattaaaaacggcatataatatagttatttatccagtttcgttgtttaaacccggattttatgcatcttcagaacgctcttaatgttgcttaactttataagatttgtaattatcattttatgctgtaaacataaccctttgttaaaccctactagttgatacagaatgtaagtaattaaccatgctgtaaaatatataaatgtaaaataaatcattttcaagaattcacctaactgaaattaccattgatttcttctgttcatctgtgcatatctcgaatacgaaataaaattatattccattcagtttcatttacattttcgttgtttattatttaaacctaaatcaagacacagatccccccgagcagactcttcgctcacttgcccagcttggaagccttggcagctgcagccgccgcttccttgcgtgcctcccgcttggccgtcttccgggcctccttctcgttggcctcgatggttcgtcgcttcttgcgcaacagccattcctccttttccttagtctgcttctcgcggatgagtttccggaacagattgcgatgacggggcttcaccatacgcgcttgcaggcggtgctcatcgacctcggccttgtgcacctgccgcttgttgaccttgtgcaccttgcccgactgcacggacatcttctgtttctcctcctgcagacgcttggtcttctcgtcgagctcttcctcctcttcatcgtcgtcttcattatcatcttcatcatccggatcctcctcgtcttcgttgacgccatcgggaccgccgtacttcttgtactcagccgtttcctgttgataggccagctgcagttgcgcatcgagcagctcttggtccacagtctcctcttcctcctgagcttcgtcctcggagtcgtcatcgctttgggctgcagaaaaagtaatagttaaatagctgttccaaaaaatatttaaagatcctgtaacttaccatgtgtttcgatcagggagggatccaggagggccttctcttccggcggtatgtacgagtccctcttggagtccacgaatggcgacaggtgcggtggcagtgtctcgccgatgaagtacttgttagtgggcagcagctggcgctgattgacgcagtcgaagacccactgtggctggatatagtcgcgcgagatgtattgcgtggtaatgctgggcctgtccacgatctggtgggtgatgg

SEQ ID NO: 7700 - DNA, 2040 bp, DROSOPHILA
ttcgcccctggtgaatgtcacttggccgccgattctactgaccaccaccattgccacaccatcctgccgattcgatcagcggtgtgaacttagcaactgcgtgaacccaatgacaacgatgcaccgccgcctttgtgaacggagggaattactggaatctgggtgcaagtgacaagcggctagaggaatcaaagcactcggtataaaggcagtgcctgccgacgaaacaaataccaaatcctgaccagcaacgagacgggatgaagctgctgggcaaatacgtggacaagggcatgcagggaaatgtgaccctggtgccggaggagtccgaggatatgtggcacgcctacaatttgattgcgaaaggcgacagcgtgcgcagcaccactattcgcaaggtgcagaatgaaacggctactggctcctccaccagcagccgggtgcgcaccacactaaccatcgcagtggagagcatagattttgatacgcaggcttgtgtgctccgccttaaaggcagaaacatcgaggagaaccagtatgtcaagatgggcgcctatcacaccctcgacctggagctgaatcgcaagttcgagctgcgtaagccggaatgggacacaattgccttagagcgcatcgaaatggcctgcgatcccacacagtctgcggatgtagccgccgttgtgatgcaggagggattagcacacgtctgcctgatcaccgccagtatgaccctggtgcggagcaagattgaggtctccataccgcgcaagcgcaagggcagtgtccagcaacacgagaagggactggccaagttctacgagcaggttatgcagagcatcctgcggcacgtcaacttcgatgtggtcaagtgtgtgttgattgcgtcgccgggattcgtgcgcgatcagttctatgactacatgttccagcaggcggtcaaaatggattacaagctgctgctggacaacaagagcaagtttatgctggtgcacgcatcctcgggatttaagcactccttaagagaaattctacaggatcccgccgtgctggccaagatgtctgacaccaaggcagctggcgaggtcaaggccctggaacaattctacatgatgctgcaatgtgagcccgccaaggccttctatggaaagaaacatgtcctccaagccgccgagtcgcaggccatcgaaacgctgctgatctcggacaacctctttagatgccaagacgttagtctgagaaaggaatatgtcaatctggtcgaatccattcgcgatgctgggggagaagtcaaaatcttttcgagcatgcacatctcaggagaacaacttgctcaactaactggaattgcagccctcctgcgcttcccgatgcccgaactggaggacagcgacgatgatgatgatgaggatggagcggcaggcggggtggcagatagcgatagcgactaggatcataaataggaatagcttcatggaatcttggcatttgataacggaaaattttgacttaggaacttaactagcgagcgatatacaagtagactaataggaaccacgacagacttggacgtcagggcatatacaatatacatacatagtgctaattcaatacaatatacacactgcttaagttcacccgtggctgggcctacaaattcaacattttatattctttgtgttcaattaaatggccacaatattgttaggtttcaattattgcttcatatgagttgcgttaactatattcggcaaactaaattcctttccggcgcacttaaattcattgttcattcatttgtaaaatggaaaacggaggtttacaaaatgattaaaaacggcatataatatagttatttatccagtttcgttgtttaaacccggattttatgcatcttcagaacgctcttaatgttgcttaactttataagatttgtaattatcattttatgctgtaaacataaccctttgttaaaccctactagttgatacagaatgtaagtaattaaccatgctgtaaaatatataaatgtaaaataaatca

SEQ ID NO: 7701 - protein, 395 aa, DROSOPHILA
MKLLGKYVDKGMQGNVTLVPEESEDMWHAYNLIAKGDSVRSTTIRKVQNETATGSSTSSRVRTTLTIAVESIDFDTQACVLRLKGRNIEENQYVKMGAYHTLDLELNRKFELRKPEWDTIALERIEMACDPTQSADVAAVVMQEGLAHVCLITASMTLVRSKIEVSIPRKRKGSVQQHEKGLAKFYEQVMQSILRHVNFDVVKCVLIASPGFVRDQFYDYMFQQAVKMDYKLLLDNKSKFMLVHASSGFKHSLREILQDPAVLAKMSDTKAAGEVKALEQFYMMLQCEPAKAFYGKKHVLQAAESQAIETLLISDNLFRCQDVSLRKEYVNLVESIRDAGGEVKIFSSMHISGEQLAQLTGIAALLRFPMPELEDSDDDDDEDGAAGGVADSDSD

SEQ ID NO: 7702 - DNA, 2850 bp, DROSOPHILA
agctgatcgcccaggcggtgaacgccgtgatgagcgagaatcttaagattctggacctgaactcaacggaggagtgctgccggaacacggtccgctgtcacctgcaagaactgcgccacgtgctgcacaccaacttcattccactgggcatggtgcgcagtggatgccagttcgagcgggcgattctcttcaagggcttggccgaccagatcggtcttccatgcaccttgcaacgcagtgtggacggtcgcatgctgtacaacgaattgccactgcccctggagccggagaaggatgtgcactgcgacaagaagacgctaaagtacatgccctggcggatgctgcgacccacacacgtggtggacctcctctacaacgtgggcgagctgtatcccatgcagagtcgccaggcgctgcagtacctgcgcctctactagttcccatgatctctaatgcgctcaccaaattatcctgtccaattgcttctcatatgctatatgcatgcttattaaaattgttttatcgggtattcctgctgttcgtcaagtcgtttattttgttataaatacacaatttaagtttaaatgtaataaaacaactgatatggcgggacctagcaagatctctggtgagatgtgatgggatctgttgggttgcctgcggtctctgggatctttatccggtgttttcattagaattttagggaatgcaatttaccagcaatacaactactttttaaagtagattaaaaaaagaaaacatcgtattcataattaaatacatattagttgttcacttacgtcaaatggtaaaaaagccgtttttaatcattttcgattgaccgtcggaaaattacatacaaatattaataatagcggtatcttatcgatagggaaaggtaataatgctgaaaatcctggtttgcatcccgactactcacggaagccactgcgcatgtccttcccctgttgcactgcgtctgacattcgtggtccaagtgtcagatggagagcagtggggttcacggaatgaggagcacgtaaacaagagaacctcgggccactttagattagccaagggattgggtggccagcagcaggatgatccggcccttcgtcacgttgctctacttcctgctgaccagttcgtccatcgtgttcacagcctgtgtgaataatggtgagtcctgcgacagggcgaccttggcgtagaaaaatcaataacatctcccatgtcatcttcgatgtccagtgacaggcaccagttcacccggacccggacccagtacctcgctgaccagcgggcacattcaccgcacggcggcagccatcgaaagggtgaacaaactgtggtgctttgcctgccacacgatggatgatggggaggcctgcgtggatgtggcggtccggaacgattccgcactgatgaaaaagtgccagggcgaggagttcatctgcatggtgagtggctctaaaagtggatctgatctttagtttttaaatcactaaccatatcctactcaatgccaggtcaagcggttctcgtacaccaccagcacggagaactccaccagttcgcccaagatgtggtccctggaccggcgatgtactgccaactgtgagcccggctgcatcatcattggcgagcggaccaagctctattcctgcacttcctgctgcgaggagtccttttgtaatacgggtcgaggagctgcatccgggatcttccatcgcgaggacacgggcatcggcacacggctgttttggctggccgccccctttctggtcaacatgtcgctggtcctgtacaaacggcacgccggccacgttctcctcaagctgcaataggccttcgggtcacctcacagaatttacggacactcagcgctctcaaagatgctccacactgaactcaactccactaaatgccaaatcctagctaactttagttcgatctcttctgcaatgtagataggccatcatgttgccgggtgataagaagagccacagcgagttcacacccaacaaaacggaaaatcctcaattggacccttgtttctgtaggctagtactaatattatattttaccatggattacttttaattaaaaatagatttcccagatatggttgggtttgggctttcatatggtttatacaatacctttcagttcgcagatatcttaagtattatcgtatgcatcgtttctccttagtggtttgttacatggagattagttgaggcatttatttagttaggtggttcggccctcaactaccacagaatcaataaattttttatttagaaatttcgatttttatcctggaacttaagtgcatttcaaaattgatacattagattacaagctataagcacattaattaattgcgatatatgtctgtttcccttgccgattgcttatccctatgcaaacggttaatagaataattgtaatctctaaattgggggccattgtcggacaaccccagccgtattgtatactccatactatggtaaacatcgaggcaatgaatacatgcattaagcccttcatttggccctgtgaattgcattacgtttccgtttccacatccacatgcccagcttcctctgtctgcatccgcattacgaatttttgaactgggtgcggatgggggattctgtggagcggcccttctgggcagacatgaattatttattggacaagcagtcgccgcatcgtaggagtgtttataggcagctcggggagggcggggcaggacctctcttccggccttgggtgggcggcagatcctgctcatctaatggagttgccattaaaaacagatactaacatgagacatgctgcatc

SEQ ID NO: 7703 - DNA, 709 bp, DROSOPHILA
tcagatggagagcagtggggttcacggaatgaggagcacgtaaacaagagaacctcgggccactttagattagccaagggattgggtggccagcagcaggatgatccggcccttcgtcacgttgctctacttcctgctgaccagttcgtccatcgtgttcacagcctgtgtgaataatgtgacaggcaccagttcacccggacccggacccagtacctcgctgaccagcgggcacattcaccgcacggcggcagccatcgaaagggtgaacaaactgtggtgctttgcctgccacacgatggatgatggggaggcctgcgtggatgtggcggtccggaacgattccgcactgatgaaaaagtgccagggcgaggagttcatctgcatggtcaagcggttctcgtacaccaccagcacggagaactccaccagttcgcccaagatgtggtccctggaccggcgatgtactgccaactgtgagcccggctgcatcatcattggcgagcggaccaagctctattcctgcacttcctgctgcgaggagtccttttgtaatacgggtcgaggagctgcatccgggatcttccatcgcgaggacacgggcatcggcacacggctgttttggctggccgccccctttctggtcaacatgtcgctggtcctgtacaaacggcacgccggccacgttctcctcaagctgcaataggcc

SEQ ID NO: 7704 - protein, 201 aa, DROSOPHILA
MIRPFVTLLYFLLTSSSIVFTACVNNVTGTSSPGPGPSTSLTSGHIHRTAAAIERVNKLWCFACHTMDDGEACVDVAVRNDSALMKKCQGEEFICMVKRFSYTTSTENSTSSPKMWSLDRRCTANCEPGCIIIGERTKLYSCTSCCEESFCNTGRGAASGIFHREDTGIGTRLFWLAAPFLVNMSLVLYKRHAGHVLLKLQ

SEQ ID NO: 7705 - DNA, 18467 bp, DROSOPHILA
cgaagggcagcggcctcggaaagaacgtgttgatgatgcgacatattgctcgggtacacagatgttgttgcgggtaagcaacggctattgtgtggtgcgcctgcactgcttgcaatgatattgacaactgcttggcggcggttggtggcgtttgtccacttgtgagcgttacaaaacaaattttgagaaaacaaatttttacaccgaatttctctgcaacatattacatacaacttgaacgttagacttttgcgatttgctgccaggaaacaaacagcatgctgtatagcatttttttttttttaatttcaaaaacctagaattatttgattcagccacatataaaacacacactttgcttgggtttcatttgtttgtttgttttttttttatttctttgcggccattttattttggcatcggttagtaaatgtttcgttctcgttacacgtacgtacatagaatatatgtgtattattacagtagttcatcaatgtgagcgacggcatcgggacgtatcttatatactaaatccattgtcgatgaccgccggacaggggttagtaactgctctgcatcttctttctccgcaattaaaattatgacaaaaaaaatatatataattcaacaattatttgcatagattctgcttcaagttcgataataacaaataataatgcgtaatcgtaatataatagtaaaaaaggggtaaaacaaacacaaaaaaacgtacaaagagtcggctgttcacgttcgacgagccatttgcgcttcagttgaagaatatacaatacatataatgccgattatacaattagatagatattcgcaggatgacggattcttgagtggcttccacataggcgtaggattattatagattattgtggattcaaatggtttatgctggattcatggggtgtgtctaaacacaaaatgccaaaggggatgtgtatataatgtgtatatggtgtgtgcttaaaatttaatgagtttctgctgttgccgttgagttgacttggatttggatctggatttggactgttctgctgctgctgctgctgctgcttccgctgccgctgatttcgatggttgctttaattctactcactgacaattccggaatcggcgatatatgctctgcacgtagacgaatacgcatttccagtcaggacgactcatctccaccatgtcctccacatccagcagtggtgcaatgccagccttctcactgcaaagtgtttagcaatattagcaaagaaactacacatatatatagcatacatttgggcgcattccacggtgcgtatacttactcagcaacgctgaaggccagctcaaagttgtgtcgtcgcgtctgcttggttagtgtggtgtaatcaaatgcatctggcaagaaatggtgtatcagcgcacaaaaggccaggccgtctgaccagctcgagctaaagttgtttatttggacgttctgcgaaacaacacacatacacattgtgtactcaacgataagatcgattggggtcggtaataagcgagcgcattctttttaagatggttgattgatattttgattgattttttttattggtttttttttattattatttattatggcccttgagcaaaagcaaaaagcatttagtttgagattccagcctccgttactaactaagactaactaagcagctggtaggtgggtaagactaggatcagctaaatcgaaacaataacaacaacagcggcgataactctagcgattaagcgaagtggccaaaaatgaaacggtaagcggtgatcgataaatatcggcagcaaaaagcgttagcacggaaacggaaatgacaatcgtccttctatttcctacatcattttcgtgcgttgtgttcgtgtgcgagtgtgagcgtgtgtatatgtatgtgtatgtatgtctgtgtgtatgagttttgaagaaagctttcaggctcagccaaagttaggcgctgttagatgtttttgtttttgtttattttgtttgttgcttggttttttgttcttggttttgtcgttagattgcttgttaaatatggcaaaactaaaataatatcatcaaaacgaacggcaaaacttaagaaaagatgctataaactaggatttctggctgttgaggtcaaaaaagatctaagcatgaaaatttcaataaatagctacgataaaaacgataacattaaaaatcgtttataaaaagaaattactatgtattttcttttattaatttctttctaatatttcgtcatgtttacagcacaattttgacctcagctgctataaataattaacaaggaatggcaagggcaacaaatatgggctgtggcttcggcatttcatttaaactttaagggcttgcttggtcttagctttttttttttttggattggtttaggttttggatacctcatattcctgcgttttatgcttacaccactgcagaagttgatccttgacagtggcggcgcgcgcatttaatgccggatcggtaaatttgaacaacggttgtgccgaaccgccgggggtcgtgggtgtgcttgttgttggagatgatctgaacaaatgagtcaaggttggaggattgcagacgttttagcgaaactcacacaaaatcggttcatcttcatattgttcttaatttctgatttgtttgcaatttatttgtttcgtgtgttcattgtttgattttttagttcggatgtgttaagtgtatattgttttttttttctttgtatctttgtgtacatgtgtatgtgtatatctatatatatatattctttgtgttagcaagaaacaacaacaacaattattggaataccaaaaatacttggcaatggaacaactaacgcgatggttttggttttctgacaacggatacttttggatttggttttggggcttttttttttgtgacattattcgattgccgaaacaaaaacgaaaaactaatagtaatagatatagtcgggagagcagtaaaagagggtagatcaagccaagtttccaaaggctaactaaaaaaaacaggaatacagttggttggtctatgtacaaaagcgaaataacttttttccttcctaaatcttttcttatcatttttatgttttttttttttgtgttctggtggggatagacaatactacgacacacttccatagagaaccaacaccagaaatcgtatatgtatatgtgtattaggaggcggtgaagattgtgcttgttttgtatcctttaattgtgtgagtgtgcgatgtcctccgataaccaattgaattatttgagtgagtacaagaaaattttggaaaagcaaactgatttgaatagatttcaataagacctataggactataggtgattacttattgaactgcttgcactgcttgcttctccaataactttctaatcgaatgcgtgacctgcacaaatgttgattcgtgtgtatagtattcatgccctcgctaccacatgtgtgtcgatatatgtatgtaaatatatatatatgtatgtatatatggaataatctgaataatcggtgggggggagctgggcgagtgacttacttttgcgcctgctgggcggctgcctgtttgtccagctgcttgaatttagccaagggtgagatgtttttggaggcagcacttccgctgacagtgcgtgtggtaactgcggaaatggaaggtatcctggtcaattcgtatcttagatgccgcatccattgaactcaccctttgttgtcgttgtggtcacagtggcaccgccatccttggacttggtttccgttcgctgttcgctggacgaggagctcttgtgctgggctgctgtgtgaatagagttttttagggatgcgttttttttatttattttttttttttgcagcgggtggaagaaaaaagagaagcaaacaaattacattgattagttttggggcatgcacaaaatcaattacacaaaaaaaaaaaaaaataataataaaatatcaatcagttttgggtaatcaacaattctattgggttattgaaaaactacatgtgttttgtatctctgggcaggcaacaaaattacacactacggcaacgtttcgaaaaacagcacaaaaaatatgtttgttttctttggttatatgatatcagctactacacaaaaaattcaaaaacaaattggcattattcaagctgccgcacacacacacacgggcagcaattatttttcccagtgttctgcggtttggtattcccaacgaaaggaaaacgcgctacgaaacaatcagaaatcgtcgctaatggtgtggacatgactgtggcggcggtggtggtggtggtattgcttctgctgaccatgggtgtattcatgtacttggtttttcaatacacagagaaaaatcaaatgtttcgaactcccattaagcaaatgcatacaaagtatttacaatttgaatgcaaatgcataagctcaattttatgttcatttgtatgcttaaaactgcgcacattttgcatctgtgtagttatgaatgtatgtataaaaacgcatgcacaaaaagtatttacacttagagataaaaatcaatgaacggcatgctttaaatcgaaggacagggaacaggagcagatcagcagatcgacaaaatatgtgtagacaaaaaaaaaaaaaagaactgatcattaaaatcaacgaaaaacacactgtttcctcatctcatctgtttactggggtgttaacaaaaaaaaaactaagtaagataaatacatatgtacaaaaggacgacagagagagaaacagtcgattaaaaaaggagggacaacatgggggtttctttttgccgcttccgttttctttttttttcaatttttgtttatgctttattcgaatccttgctggaccaaccaaccaaccaatcaaccagtcaatcaatcaaatcaatcaaatcaattagccaactaacgaacgagcaaaacgtaacagaacgtaacagaacgtaacgtaacgcaacgtaagggggagtaaattggggaataagcgctaaaaatcgacgcatttttacatttacacacttggctgaataaaaactttcaggcaaaacaaatatgtacaagaaaaacacacacacatacggcgtatacagttgtccgacaattaatagcattaaataactaaagaaatttgttaaaattctaaataagaagttggacatcagtaggtaaataaaaataccatgtataaacaaattttcactctttttgtaagtttttcttatttgaatttcgaagttatactaataataccattcattttcataagaactgtatgttttcgtatgatgtgtatggtttttatgctgttaggctgctgctgggcggtatagcaatattttataaacttattatctttttttttggtagtacaaggcggggcaggggcgctggcaaaaacaggataattgggggtctagcattctgtacatctgatatttctttcgttttcaactcacaaatctcggaatattgatcaagttgttgcttttgttgctattgttgcttattgttgttgttgttgttgttgtttggggcttcattgggacgcagtgcagcaaacattttcatttaaatttttatttaatctctttattgtcgcgattgaagcgtgtttgtgagttaagtgttttgaaaattgaattggaaaaaaaaaaacgaagtaagaaaccgcctgtggtccctcaattttcaatagctggctctttttatatagttaactgcgattttctaactgcttcgtcactagctcgattcgaacatgggaaaagtgggtgggggttctgggtggtgggtttgactaaaacaaagctaatcctaggctcaacagtagcgcttgagtaaatcagtaaacattaatcagtacagttgccgttacaagttacagttatcattccgtttcgatgtcgattcaatttcgatttcgtatatcttcatatttcatttatttcttgttttttatagattattgagattattcttatcatgttctcatccagtttcgaactggaatgcctcaatgcgtttgttctttcatatattttcttttgggtgggttaaattgttggcttgagtggttgagtggttggctggactgttttgttatttcttgattatttatatggtatttttaggcacccatcattagctgctcgaaggcatcctccacattgctctcgtccagcagattgagattcgcgatgtgcggcatggtggcactgcgactgagtgcagcaccaccaccaatgccaccaacaccaccaccacgcaccaccatgcccaaaccggcggtggaaacgttaccattcgatgtggtggtcaacgaactcaatgattttcgagctgccgccgaaagtttttcactcgttttcgtgcgattaatggccgattttcgacttgaggtcgttgtcgtcatcgatgttcgtaactcctccacttggccgccagttggtgacttctggccggagaagtaggcagccaccgtacgctgtttctcgctgacctgggccttatcaatgcccgcttcgtagagtttgggcacggcgagtgagtgtcccgatttggtgcgtctcagttcgcctggagaaccgggctggttgtatttggccggacttggacccgcagtctgttgcagctggcaaatttggttccacgaatcgcacttgctcaatcgattcaccctggaacccgattgcgtaccctggtgagaatcctcctcgtgatttcgcctgctcatcgatgtaaaggcgctcacattgttgaacactatgttgtggggtatctcgtcttcgggcggaacttgtggctgtggtgtcgccggggtttccacaatacttggcttgatttgctgatgttgttgctggtgatgttgctgttgcaccactgtggtgctccttactgaggtactgctggtggtggtgctattgctattgccctgcttgttcagctgcggactctggtacgaattgggcatgtagtgatgacgctgtggtggcccaaatttctttagtagtggtgcatcctccttgggcagcgatgatttcactatatccggcgtatctggtggtgctgaagacttgtactcctgttcgaagtacgtgctcctttgactgctctccagcacattgcccaaactcttgcggcgcagctcgttgatgtgctgctccttttgctgtttctgaacggtggtgtggttgttgctagtaataatgctggagttaagggtttgctgggacattacgcgattctgcagaggacgattctcgtagccggagtctccctggatggtatgactacgcgaactcaacttgggtgcatgtctgggcagattgttgggcagttgttgaggtaactctggctgcgggatctgttgaggtaattgcttgggcaattgtggagggatctgctgaggcaactgctttggcaactgttgcggcaattgttgaggtaactgttgtgggatttgttggggtaactgctttggcaactgttggggaatctgttgtggtaattgatttggtaactgctgaggaatctgcttctgagcaacatgctgcggcatctttggcccaactggctgactaacttgcggcttagtgctgcgatccactggaggacccatggcggaatccagcggtacactgggaactgtattatgcaccggattcgctgtccaactggtgctgcccaacgacagcgaggagctggcattcgagtgttccgaagtgcgacgcaatcgctggctcaccgatgtggccatcgattccggttcgggttcatcaccagaatcgtccaagggataggtgaccacataggaggtgttggtctcacccaaataggagttgctattctgattgcttctgggtggtgtgtacgtgggatttgcttgatagtttatcgatggcatgctaacagcaggcggtgttgacatgggcgaattcgcgaactgcggctgtcgtttgggctcaaaggtgctcagttgcgggaagagtggttccaccaacggcgcctgatacggccggccatcgggcgaaagacaacctgattttggcgaacttggagccgttagtggttgcctcctctggccgctattgccaactgaggcattgccaggaccacctcctagctgcttcatcgtgtagagcaaggacttggctgcccttgagttctttccatagacctcatcgtcactcatgtgagcgtttcttctgtccgccacccttactgccgtttggctgcgtggctttcgcatcacctttgtttcggcccggtactccagcatattgttatccgaatccaaatcgagatcatcgtccgtattgtccgtcatcaaagtgggattgggcatggtcatgaagctcgtgggactattaggtggactatccgcatccacatcgactggactgctgatgtagtcgaatcttctgcttccaggtggcggcagataagtgggatttgagcttgtgagcactagaggtgcacccaggggattggtcaatgcctcgacctgatccacagcacttgttaggcaaggttgactcctgtagttgtgagcactagcaccttgtggacgtcgaactggcgggaaatcggcgtacgtaaatgagatattcgtgggtggcggtggagcttgatacacctgtcgcggtggtgcagctgttcccgggtccatggcattcggcaaggatggcctcttcttaaactcactcaatgctggtgctttcgagcgcagggaattgtgacgctgcaaataaccattgttgccattgggatacgttggctgttgctgttgttcgatgttatccctcaaggacctctcttcaaagtggtgcgctttgcgtcgaaaatcgctattgtccaccttcggttttgccacccagggcaatccgatgggtgaggtggccgttgaggatggcgagggggtattgctatatgtagtagccgatctcggttgcaaatgttgctgcgattgctgcggtggttgtgattgctgcgttggtggtttccaaacggctggattgggttgagatttatgagctatgggcttgtaaatacccggttgcggttgcgtttcattttcaatgggtcgaaagacagactggggagcgtgtataaagttattgacttgggcagcctgctctcgctgttgctggagacgtagttccatctcctgccgcctctgtcgctccatctgctcctgttgttggcgttgcctgtccaattgctgctgcctttcgacctgttgtcgctgcaattgctgttcgtagtattcgcgctccagacgagtgcgttcctcacgttcgaagcgtgcctcctgctcgagccgcaactgtctttccaattcctggcgacgttggcgttcaatttgaacggcggccgcagcttgctgttgctgttggagctgcaattgatcgcgctgcagttgctctcgctggagttgttctcgttgcagctgctctctctgaagctgctctctttgaagttgttctcgctggagttgctctcgttggagttgttcgcgctgcagtttctctcgttgcagctgctcgcgttggagttgctctcgttgtagctgctcgcgctggaattgttctcgcttggaaagctcccgttggttctgatctcgctggctctgctcccgctggtattgttccctttgaagttgctctcgcaactccctctgctctcgctgcctttgctccctttgatactgctctcgttgcatctgctcacgctgcatttgctctcgctgcaattgctgatgatgcagctgctcttgcttggcccatcccggcacatgaccaggcactggtggtggcttacccttggtcaccgtggccgcagctcctgtctcaaaggtgtgcttgatgttgccaaacttgtgcgtccaattcgatacacttctgccaccaccaccgctccaacccaaaccagtctgatgactctgcttgttgataaacgccaggaacttgtgatcgttctcagtttttggctcaaacggtggcactgcattgtgaacgcgtcgcttgacactcacctgcaccgctctctttagtcccaaatgtggaccgtgatcatcttccagatccgaatcggaatcacagtccgccatgtacttggcctttgccttcggtatatcgatagtgttggctcgcttcattaagtgcttcttcccgccaccaaatcgactggaattcgaactggagttcgaattggattgcgaattgctggccgagtttccattgccctcaggactagagttctgtgaattctgattcgcctcgtaactggcaaagctgacggcataatcaccggaaaggggccgtctattgctggtattcggtcttagttgcgattgattctgggtgggaagtgcctgcgtcgcattgggctgattattgacggactgcggttgctgtgattgtgccacaaactgattgggacggtagagttgaactggcactgcactcgagcttggtgttttgctcagcgcaaagtccttgccctccaggatcaacatgtcctccatgtaccgtcgggcatcggcaagttcctctcgactgacaccaactgtgtgcctactgttacgctgtcgacgttttgcgaatcgagattgccgactatcgccatccggttctggactaccggtttcgacttccttttgacattcgtcagtctttcgatcctcggccaacttttcgggcgcactgagtccactctggaggcgggccaccaggccgagcagagcctgccgttgacccccatcaacggctagctccttgccttgtttaaggctgctctccaggcggctgagggcatcggtcacttcttcgaccaggctgcgattcgcttcgctagcatcgctaccactctgctgttgcaaggtgtcacgcaatcctgcggccagcaaacgcaaatcctcgccgctttccgtgcccgaatcctctttcgagggcacgctcaagcggctgcctgtgttgggtgctccagaacccggtacagactcggatcccgagcccgttcctgcgactggcatcatttccggcttggctttatccctggccctaaccactgtgctaacctggctactgctaagactactggatttcctactacctatgctactgctgctgactggtcctgctgctcctgtggctcctgttttcgtggcttttgctggcagggactcaccctgaacctgaacaccgtctgtggtcgaggagctgctgctactggccagctcaactttggccaactttttgctaacactttcggtggcttggctagtcttggtctccgtcttttccacctttttcaccgctttctgttggatttcctcttgttgtttggtggtgacctcttttttggtcacctcctttttggtgacctcctctttcttgggctcctcctttttgggcggaacttcctcctcctcgtcactgtaatcggtcacctcctcgatgatctcctcatactcgctggcgctgctttcctcctcttccttttcctccttcggagcctgctttaaattcttttgctctgctcgccgcagcgaagaaagttaagagataaagtagagatagatagaaagatagaaaaagtggtggaaatgcttaagattcgcaacgagaacgcaatcaagcaataaaaataactggagtgggaaacaaaacctgctcagttgatcgaatatttcataatggtggacaggtatacatatatatatattcaagggaatctaaagcagttggaccacaaaagttgcaactgttttaggatactatactccattcaccattcgtccgtattcaattttccaagcatcgataaaaatcgatcaaataaacgattacagaattggtgtatcggtgacttgtttttgacgtacaatggatcgattccaattttatgtgggtcttcgacgtgagactttcactgaacgacgacaacattgaacgatagatagtacaacaaagtaacgatagcactttaacgataacgatgtgtgcaacgcgacgaggaaacgataaatgttcatcgactggggaggagcaatggacatggccaacatcataacgctgggtgtttcaatacctgaagactaatgataaccgaggaatattcggataaacggcttaactttgatcctaccgacttcaaattttcctgcctagctagttgctgtgcgcattatctataagatacagatacagaacacaatatatagagacgggtctgcctcgatatcactgcgtttccatgtggagatcttggtcgtctccgctgttgatgagttgttgagctaatccgctggctttttatttcggttgggtaactttaaggagttgtggaaattatagaggcactcaccttcgcgttccgccataagttcgcgtagacgtgcacggatcttgcgacgctcctcgtaggtggacgcctgttccagctgcaagcgttcgaggataaattttcgttgatcgttggataactgatttcgggaaatatttcggtgtactactacttaccaattgcttgagcacttgctcgtcccaaatctcctcaatgtcacaagttgtacgtgtaactggtgctgaggagctgctgaccttgttggtggtgttgctggtgttattggtggtgctggtgctattgccggacttgctgtaggtgttggttatccgcgtggtcttcacctaaaagcgaaagcagaagatttggtcgagtttagcaagcgttcaattcttttcccgtttcttgttgtttttctttttgtttatcaaccggaaaatttcatttgatttttgtgtgtgggtgagaaacaaacgccagctgtttggacctggctaaataaagcacgatgagcacattcgccggccacagaatccacgccagccagcgcaattattcacttgccaagagttgccaacagaatttggtgttggtggcatctccgtcgatcgatggccgtgataaggcagaaaaccacaagatcaatttgtcagtacaatgtgtccttagccgtgatttcgagtgcatttgcttgccgccatacccccggcagcttccgccagcagttgatcaatgtcattgcatacctgtcgtatgcgtaatatgcccaagtatataatatacaaagtgcgcatacgacacgttgaccaaaggtaaagcaacaacaaaggggaaatttagcttctttgttttcaaaaagtactcagttgacgaataacttattgaattatgaatacttttaaatttatttgtttttttttcattttatttttactttaagaggtttgctcatatatggaaatggattttcgacttctttattctgaaaagcgcttaaaatctcggccacaattaagccgttcccctcaagagttcattgatattgaacgacatcaaaataaaaatgttatcagcgaatttatggcgaaaattcattttaattgcccccaaaaagaaaatctggcaatataaatttctctttgtgctgacgaacagcacacatcagataaatcagctaaaagcgtttatagacccctgaaattgatggcaaatattgatgcacacacatatgtacatatgtgtagtaaatgcctttatagatatattgagtgcaattaagtatacgccgcgttggcctgcctgcaatttttaatgatgaaaaagcacagcaaagatgaaaaacaacgcaaatagccaaataataaaaattttgctctctgttttctatactggtttctctcactctctggctgaatgaaatatgtagttgtttatatcaatttgaccaaatttggtcagcagcatgggaaattttcgttttcaaaaactgacttccaacatgttcgaaaaacgcccccgctcttcctcttgcaacacgcgttgctatttataattataaattatttaagcacacacacatttctaacgggcgagccgactattttcaggaaaagttcctcatattttcgtctcccatattcattcccccttcccactcccctcttcccactgatcccatgcgcccagctcttttggtttaaactttatataatatttgtgttgttttataaacaaagtgtacgagaagaacaacgacaacaacaacaacaacaatcaaaccaagaattaattgccaaacatttttacaattcccgtctcccctcccctccgcgccttcgttgttgcttttcttgttgttgttgtcaaaatgtgggccaaaatctacaacgcttttcatctaatttgacttggtttaatttgaattttattcttttcactctgcgtttatttttaataattcttctttttgctatatgtttttttttgttgtttgattttttttttgcactttcagggggactgaaaaggcttgccaactatttggcgcaattccgccaaagcgtaacaaaaatagaggggtagcaaaccaagcatggaaatcaaaatggaaattgcaagaagaaaacaattaaaacagattgaatgggcgggggaaatggggagtggggcagtgcagctgaccaaagcgatcattgccagttagctgatttttcaactgcacttggccattgactgaccattttgttgtgctgctggccggccaacagtcgtttttctctcagccttcggtttttcggctatgacactgcctgaaatgttggaaaggggcaggagacggccatttgattgatggccaccaatttgtagcggcacccagacactgccgaaaaaatggagcacttaaatatagaataatcacctttttcaaaaccatttcaaaactactttcgatcgttggtgcagcaaagcaaaccgcttggatttttcatttaaatattaaaatctaaacaatgaacgtatttctttcagtggactttcgtgcttaataacaatctgatcaatattgacctcctaccaaaaaaaatgaaaactttgccaatcacacacgacgaaaagtgtaccccatttccaatgcgaaagaataatgattttcattttgcgtttccaaattgactttctttcgttttcgattttttttttcttctcttggatttagtcttgttgttgttgctggctgtgttgttatttgtatttttagctcgggcaaaatgagaaattatttgacatgcaaaatgcgaagcaaagacaaaggcgaaacagccaacacgcacacacagtgattatgaaacggcaaaaagcaggaagaagcagccgacaaaaaatgattggaacgatgggagtcgcagttaagacggtttgacaaagcccgttgtgcggcatacacaccacaccactcagctcaactgcagcacaaaaattgatgcataatgaactttaaacaatacacacacttatattatacctttttggattggcagaattatgttttctcgaaatttgggtgtgtgggcttagtttcaatgtttcagctgtttgttcgtcgtcggagcttattttaatatcccttgtgttttcgaaacctcgagagatattggaacaatattttttattttccaaagtcagctatactcttatataaacagcttgtcatgtttgttatttccaacaacgtttatgtaagcatcttacccgtactaatagaacattttgaactttttctcttttcttttttttttttgcaaaattttcttgcctcaactcaagctcacttcttgagtcagtgtgataggggcataatggaaaccggcttcccaactcgaagcacttgcagcaacagccgatgcttaatcaccgaacgcagagccgctgagctgaatgggggcagtttggggcagttggggcagttggggggatttggggggactcggaaggctgaagcggcgtttgaggatttgccgatctgcatgttacgctcagctaagtacaggggcagcacacctgaaaatggcaaaaacagaaacggcatttctctacgttccagttcgatcggctggaatcgtggatccgtggagcttgccatggagtctgcctcgtggagtggacgctctggagaacctagcattaagtggcaaatacatgacaaagtaccacacttagctatatgttcatatagcatttcgatcaagcgaaaacttggaaatatatgcataacttcttgtaactctttatactacattccccaaagatctttaagtttatactcccagcttttttaatctgtttgggtaaacataagctatttgcaattctaaaaattctttgaagttaaatataatttcacaaaaataggacattttctgcggctgtagtgctaaaagtgaagaatctgctttttgatcccaagaaattgcattcgaagctgatcaactgaaaccactgtgttgggattggattttcaaggaatacataggcaattcaaggagagatgatataaatgccatttttctttgaatctgacttgtgtgtatatcggatatatctaggagaattcctatagcatcggctgtcgggaatttatcagtgagattcggtatttagttcacacaagtggaggaaacgggaacattagatgccagagtccgttgcacatgcaccatcccaatgcctaatgcttgctgcaccaacgcacccccgcccccccacctccacctcctcctccactagttctggtccctcctaccatattgtgttgcccaaaaatgctccaacatagtccgaatagtccgtatagtccgtaaaaatagtgcccgtcgttggagctatttttgtcgaaattttccgtacgcttgacgctctcattcatgcatcctcctgctctccgctctgtttttaaatgtgtatttatttatttatttgctctatagctgggaagatgagcgtgtctgtatctcggcagacttttatacatatatatgcacgtataaatagatatatgtatcggtggatatagatctttcaaaatatatatctatacatacgaataggtgtgtgtgtttgtgtaaagatcggtggcggtgtcgtcgcctttcaggtgcattttgaggtgtcgtgacaggaatgcttcgttttgccagcaaattatgcgcactaaaaataattgacaaaagcatttgccctctcccccctcccggccagcaaacgcccgcacttccctcacttttgccccatcattaccatcaccataaccatcataatcattatcatcatcgtcatcatcttgccccataaagtgacatgaaacttacgccgtggtctggtcttttgttgccccttttattttgatgttgctcgtgattctcgggatgttgcagagttaaaccaaatatggacactcgcgttcgttcaccatataacgatataacgatagtataataacagaactgcacagtaaaaaaaactacaaaacttgtcttttgttatgcgcttctattgcttattataactcctcttttcttctcgtttctatatttcttgattttttttttttttttttttgttaacacaagtggttcgcttggcactcttttattctttttgctgcttagcttttttgcccgtggttcttcgcacaagtgatcgatgccgcctctgagtttctactgacaatttcgatctcgatgccgagatgcgcttctgcctctgcagacgtcgacgtcgctgccgcagccactgctaatgcccgttagtacagctacagcaaaggccgcaaacttagcactccgcttattttaataaatgtataataatttttaattttaatttgaatatcgcctatgttcaccacttatattaagttcataccaccatttcaactttttttttattatggttgtatatctgcgtagaaaataattcttttctattgcagtgactttaggtaactattaagttagtgcactagaatttgattggttattcatcgttcagttttaatggctattcagttgtccgtcactgtacttgttgccttctgaccagccaggcattgcgcatctatcgcatctcttcgcacatcgcatcacgcacacggcacacacatgccgcaaagtgccccagtcccacaagtgcgagcgggacgggtgaaaggtggggaaagagcaacggttgttgcacaccaaatctcaccaaaggcgagagagagcgaacgagacggttggggacagtgagagcacgcgctcagttaacggttaatcgagcacgtgcacgtgcttgcgcgagttaccaccccaccccctaaacccccacgcctctaaacaaatcatcggacactcaacccgggaagacggcaactggaacaccgcatccggccgaatgctgacattccggccgaatgctgacattacacaaaagtcgcactggaacattgtccccagctagccagccacatgccgagtcggcatgttcattatgcttacaattaagaacctatgtacttatgtataagac

SEQ ID NO: 7706 - DNA, 1490 bp, DROSOPHILA
cagaggcggcatcgatcacttgtgcgaagaaccacgggcaaaaaagctaagcagcaaaaagaataaaagagtgccaagcgaaccacttgtgttaacaaaaaaaaaaaaaaaaaaaatcaagaaatatagaaacgagaagaaaagaggagttataataagcaatagaagcgcataacaaaagacaagttttgtagttttttttactgtgcagttctgttattatactatcgttatatcgttatatggtgaacgaacgcgagtgtccatatttggtttaactctgcaacatcccgagaatcacgagcaacatcaaaataaaaggggcaacaaaagaccagaccacggcgtgtgctgcccctgtacttagctgagcgtaacatgcagatcggcaaatcctcaaacgccgcttcagccttccgagtccccccaaatccccccaactgccccaactgccccaaactgcccccattcagctcagcggctctgcgttcggtgattaagcatcggctgttgctgcaagtgaagaccacgcggataaccaacacctacagcaagtccggcaatagcaccagcaccaccaataacaccagcaacaccaccaacaaggtcagcagctcctcagcaccagttacacgtacaacttgtgacattgaggagatttgggacgagcaagtgctcaagcaattgctggaacaggcgtccacctacgaggagcgtcgcaagatccgtgcacgtctacgcgaacttatggcggaacgcgaagcagcccagcacaagagctcctcgtccagcgaacagcgaacggaaaccaagtccaaggatggcggtgccactgtgaccacaacgacaacaaaggttaccacacgcactgtcagcggaagtgctgcctccaaaaacatctcacccttggctaaattcaagcagctggacaaacaggcagccgcccagcaggcgcaaaaatcatctccaacaacaagcacacccacgacccccggcggttcggcacaaccgttgttcaaatttaccgatccggcattaaatgcgcgcgccgccactgtcaaggatcaacttctgcagtggtgtaagcataaaacgcaggaatatgagaacgtccaaataaacaactttagctcgagctggtcagacggcctggccttttgtgcgctgatacaccatttcttgccagatgcatttgattacaccacactaaccaagcagacgcgacgacacaactttgagctggccttcagcgttgctgatgagaaggctggcattgcaccactgctggatgtggaggacatggtggagatgagtcgtcctgactggaaatgcgtattcgtctacgtgcagagcatatatcgccgattccggaattgtcagtgagtagaattaaagcaaccatcgaaatcagcggcagcggaagcagcagcagcagcagcagcagaacagtccaaatccagatccaaatccaagtcaactcaacggcaaca

SEQ ID NO: 7707 - protein, 334 aa, DROSOPHILA
MQIGKSSNAASAFRVPPNPPNCPNCPKLPPFSSAALRSVIKHRLLLQVKTTRITNTYSKSGNSTSTTNNTSNTTNKVSSSSAPVTRTTCDIEEIWDEQVLKQLLEQASTYEERRKIRARLRELMAEREAAQHKSSSSSEQRTETKSKDGGATVTTTTTKVTTRTVSGSAASKNISPLAKFKQLDKQAAAQQAQKSSPTTSTPTTPGGSAQPLFKFTDPALNARAATVKDQLLQWCKHKTQEYENVQINNFSSSWSDGLAFCALIHHFLPDAFDYTTLTKQTRRHNFELAFSVADEKAGIAPLLDVEDMVEMSRPDWKCVFVYVQSIYRRFRNCQ

SEQ ID NO: 7708 - DNA, 4891 bp, DROSOPHILA
gcacgccaaacacaataactttaatttcgctgaccatgtgtgacgttgcaacagtgcagaagatagcaaactgcctgggcgttaatcccggcaaggtgcagctgaacgaggagcaggtacgcacagctgaccctgaaaattgaactattctcaccgccccaccaactcattttctgttgtgaaggtcgtaacgcgcacgagtgggcaaaagaagagcgtggccggattcgcctcgatcctggagagcctggccagcgagtccaagtcggagaccgcccagaacagcagggcgtcgcgggaggtggaagcccaggtgtaccagtggatcgagttctccgtgctctacgtggcgcccggctccaaggacaagtacgtgtccaagcagcttctggcggacttcaacaaactgtttgccagcaaatcctacctggtgggccacttcatcactctagccgacctggccgtctactatgccatctacgatcttgtggtgagcatagttccagttgcttcttttccaaacagaacaccctgaaatctaatccgtgtgaacccgtccagaaatccctttcgccggtggacaaggaggtatatttgaatctctcccgctggttcgatcacctccagaatcgcgcggatgtgcaccagggcgagccactgctgaacttcaccaccatctacctgcacggctgggccacaggcacccacatctaagccccgggcgggcacccttgcatccattcacatccagtcacgaatgcgacacttaagttatttatttctattgcatttcacaatgtagttttgtgtgttgtgattatcatttaatgccaatgagagagttcagcgttggaatatgaagaatcgttattgtagcccgcactacgagttgttcttgttctgataatcggatctcagccgtagctccgaatcacatgccctttcgttgcgtcgccggtgcagcgtgggctgtgtaacagcgactcctgctgcgccaacatcagtttgcctgcacctcgcgcggcgagctgatggaattgcccaggtccgcgggctccgtgcacttccacaagccgtaggtcttgcccacggtggtctgccacagccggagagtgccgtcctcggagccgctggcatagagttcgccatccgggctgaacttcacgctgtgcacgggcccgaaatgtcccttgaaagattctgtgggggaacagaacacagtgccttggaattaaagacgacgcatgtgagaaggtacataccaatttcgtttcctgtgatgtagtcgaatttgtacatcttaaagtcctcgccgccacaaacaaacacatgcttatccggatgcaaactggccgacgccacgttcgtcggcactttcacctccttcagcttcttcagcgtgtcgatctcccagaagctaatcgaggagccgtgcgatatggtcagtatgtggttgtcgctggagatctctaggctgttcggattgctgttgaactgcaggcgctgcacctcgatgcccgtcatgcggtcccagaggcgcaccgtcttgtcctcggccgccgagatgatgcacttgtcgccgcggcagaagagcgcccgcttgatggcccccgtatgtccggcgtactcctccggctgcgcctcgggctgctccaggttgaagacccgcaccagcttctcgttgctgccagtcactatgttctcggaatccctgtcgaaggccacgctcttcacgatgtgcttgtgctggaagctgtgtatctcggccccggtcaccgcattccacaccttgccggtgaagtcggccgctccggaggcggccagggtggcatttcggttcagcgtggcgttccacacggcgcccttgtgtccctcgaaggtgcccacccagtcgccggtgtcgccgtgccgcagcatcgggctgccatctgcaagattcacaatacacgattctcggtcagttgcattcgctttcgcccgccgccgagcgtgcgtgcataaattagcgcacggaagccaccttgactcaatgcctgccgccaaggccaacgacctggccgcctgccgctcgcaatcatgcaagcgagctcccaagttcacgtcactatcaccgcaccgcaccgcactgcactgtcgcgctcaacgggatcgggatgcagggtgctgcattgcagtgcagtgcagtgcagggacgcggcttgttagttcgttcagagctacatcatcaatgcattctatgtgtgtgataaatgatcacccacaactctcgccatttcaaggacttctactaatgtttgcctgctacttcacttttgtataggaactctattagtttaactttgcagagaaaggttttctaacaagagcacttaataatgtaatatatactatgtaatttcccattctaatttatacaattactgtggccttaaacttggaatgattcatcgcagtgagaaccgcacgaattaagcccacattagatgctgtatccgaataaattgcagcggatcgggatcgggagagtgtatccagcaagcagaatcttccaggcggcagacaaacggcagctgcatatacacacagcatataaatatagaagttccaaggtgcttcctgaacgagcagtttcgaaaagttgctaaacaaggggaagcgagtacgttaaaaggcgataacgaagtcaacttgaacttgcagtgggaacgagcgctctttccgcataaaagcaacatttgcgaaagccacgaatgcaaagtgcctgtaaaaaacaggcaatagctaacgaattgcgaattgcaactgccatggcaattgcaatcgcatcgactggctgacacctcaaggcaaagaatgcgagttttgtagcatgcgagtggcggcaggcaaaagggtttcgcactcgcagaaaacaggtttcgctcgcgatgagtgactttgcatttgggtcaaggtttcccacaggctagacatgatgctacaccgtgctggcccgcctgtagttcatgtgattccatgccgctctgttgcagcacctttcccacgaacataacgatccgtcaaagaacacggacaacataacttgtttttcgacatggccttctgggtaaaacattatttgcccttcctacaaaactatactacaaatttgaccaataagcaaaagtaactgcctgtttttaccaggaaacttgctgtatagacattaaactattgcaaatgaacactgtctatatagaaacactagttaaatccaattcttacggaatctgcgttgtgtcccagttcgtcagtgactgacacttccgattttaaccccatcgtatgattatgacaaccactgtgcgacgacggaaagtggtgtataaatagcgcgcaaggacggctaatcgcatgcgactggctgcccgatcccgcggaccttacctttgcaggccgagatgagaaagtagccggcgtcgcagatgtcgctgaagtccaggtggaccacgggtcgcgtgtggccactgcaggtcagcgggatttgtcgcaagttgttggcggccatggcagtgggctgctagtggattggtggactgtgtggtccttaatacttgtggttttctccgagtgtagcgaccgttatgtccgctggcgaactgtgcacttagtgaataactgacgttttgtggctactttgtacttggattggttgttgctcctggttaactgcgcttcactgcccgtacgataatgattttcccgttcgttgcttaggttcgagatgctgcggtggctttgcagggtgtgcagtgtatttacaatctgatgcactgaattttataaacaagaggggaaaataattacgcgacacgttgttgttgtggatggacgattggtagccgactccagcctcgatagtccgcacacacagtacctacctatcgtcagcggtgggcgcgtgaggcgataacttctcgattagctagagctgtgtcacggcagccaggggaggatacaaaggaaaaatgtcaaattacttatttacaatttggcatagaattgttttattttgttttttatttatattaagccaattaacagctttgttgtacgtaatttagaaatcacggccaaccactatcgatataatttagcgaacgagtcacgacattatggatgtagcccatccctatttacttgtcaaaacagcaaattttcattcgggccaagaatcgactgaaaatatgtccgctattctaaaccacgcaattcgccgccaattcggcgcttctgccgcccggaatatgtccggcaccgccgccgtggccggcgagcactctggtaagtgaccgtccagcgtcccaattgccaaattcatccccttttgtaaggttaaggttatgtaatttaccattgggcaagatcgattggtggagaaggattcgctcttataacacatcctttcatgctcatctcatctctcatccttcaggtggctacaaggtgtggaagcgcctgtccttcttcgtggccgtgcccgccgtgggactgtgcatgctgaacgcctacctgaagcaccaggaggagcacgacaagccccgccaggagttcgtcaagtacgactacctgcgccgccgcgagaagcgcttcccctggggtgagggccagaagagcctgttccacaacccccacgttaacgccctgcccgacggctacgagcactaggtggccaccgtctccggttccctctgcgggatgtattcgttgtttggtagtgatagacgttaatgtaaactgaactttacgcggaaatacacagaaaacacatatacccaaactccagttggcgcttcaataaagatcaaattagagcgaggagagatcccataaagaccatttcaatgagcga

SEQ ID NO: 7709 - DNA, 1331 bp, DROSOPHILA
ctggagtcggctaccaatcgtccatccacaacaacaacgtgtcgcgtaattattttcccctcttgtttataaaattcagtgcatcagattgtaaatacactgcacaccctgcaaagccaccgcagcatctcgaacctaagcaacgaacgggaaaatcattatcgtacgggcagtgaagcgcagttaaccaggagcaacaaccaatccaagtacaaagtagccacaaaacgtcagttattcactaagtgcacagttcgccagcggacataacggtcgctacactcggagaaaaccacaagtattaaggaccacacagtccaccaatccactagcagcccactgccatggccgccaacaacttgcgacaaatcccgctgacctgcagtggccacacgcgacccgtggtccacctggacttcagcgacatctgcgacgccggctactttctcatctcggcctgcaaagatggcagcccgatgctgcggcacggcgacaccggcgactgggtgggcaccttcgagggacacaagggcgccgtgtggaacgccacgctgaaccgaaatgccaccctggccgcctccggagcggccgacttcaccggcaaggtgtggaatgcggtgaccggggccgagatacacagcttccagcacaagcacatcgtgaagagcgtggccttcgacagggattccgagaacatagtgactggcagcaacgagaagctggtgcgggtcttcaacctggagcagcccgaggcgcagccggaggagtacgccggacatacgggggccatcaagcgggcgctcttctgccgcggcgacaagtgcatcatctcggcggccgaggacaagacggtgcgcctctgggaccgcatgacgggcatcgaggtgcagcgcctgcagttcaacagcaatccgaacagcctagagatctccagcgacaaccacatactgaccatatcgcacggctcctcgattagcttctgggagatcgacacgctgaagaagctgaaggaggtgaaagtgccgacgaacgtggcgtcggccagtttgcatccggataagcatgtgtttgtttgtggcggcgaggactttaagatgtacaaattcgactacatcacaggaaacgaaattgaatctttcaagggacatttcgggcccgtgcacagcgtgaagttcagcccggatggcgaactctatgccagcggctccgaggacggcactctccggctgtggcagaccaccgtgggcaagacctacggcttgtggaagtgcacggagcccgcggacctgggcaattccatcagctcgccgcgcgaggtgcaggcaaactga

SEQ ID NO: 7710 - protein, 328 aa, DROSOPHILA
MAANNLRQIPLTCSGHTRPVVHLDFSDICDAGYFLISACKDGSPMLRHGDTGDWVGTFEGHKGAVWNATLNRNATLAASGAADFTGKVWNAVTGAEIHSFQHKHIVKSVAFDRDSENIVTGSNEKLVRVFNLEQPEAQPEEYAGHTGAIKRALFCRGDKCIISAAEDKTVRLWDRMTGIEVQRLQFNSNPNSLEISSDNHILTISHGSSISFWEIDTLKKLKEVKVPTNVASASLHPDKHVFVCGGEDFKMYKFDYITGNEIESFKGHFGPVHSVKFSPDGELYASGSEDGTLRLWQTTVGKTYGLWKCTEPADLGNSISSPREVQAN

SEQ ID NO: 7711 - DNA, 4556 bp, DROSOPHILA
atgcactcgcccatgcaatatgagacccacatctccgacatgcccaaccacaagggatacccctgccgcccagaaggttggttttttttaaagttctggatttgaccttgggtctacagttcaattcgcaacaagtttgccagatattttcgctacgcgtgcttttggtaaaaaaaaaagaaaccactgatcatgacggtgcgcattgcgaatcaagttctctgaaacagcccacaatgattggcgaaaacgattccagattgtgctacagtgaagtcacttgtagttgaatgtgagatgataaaaattaatggagtgaaacggcacttatccaggttgcattgctcgatttggacgtttgaataattagagacatttgaaatattatcgcgaaagaaactggtttgtgttgacaatgcaaattccggttggcaatgtagtatccattcgaaagagtgttcttgaaataaacagataatttaccttaatcttatcttagttttctaatcgagagcttataaatctttaagcccaatttaccaaattaccaactcataaacttaccaacttattcgcattcaaaaacaaaataaatgaccgctttaatttctagaacgtattaaaggtcggtcgtatctaacctttcggttatcttggatatccataatatagtacgtcatttcacacttggaggatttctttaaagtgccatttttaatttttttgcaaattcataacagattagataataaaatagaataaatagcccgcgctgattgtcgatctatttgcgatggatgaggtacgaggtacaagggttacagggctcaactgtagggcgtgtattggttttaagattaataataattaataataattaattactatttaatataattattaattattattaaattaattgttaaataattaaaattaattgaatattttctgaaatatgtcctggaattacaatatgatctattcctcgattttccagaggctgagatgagcaacacttcggaaagttgttccatctcatgcggtggtcgattcggatcggcgcactcgaccctagatgatcacgatgctacggatgatgacatgaccttctgcatgtccaattacgccaaggaggccctgaagatgatgtacatgatgcgttcgcacggcatgctcacggacgtggtactcgaggtgaagaaggagctctttcccgcccacaaagtggtgctgtcggcggcatcgccctacttcaaggccatgttcacggggggactcaaggagtcggagatgtcgcgcgtccagctccaaggggtaagttgagctcaagcgcggcccttaattggttggtttaatggatgaacagttcgtccgtttcggtgttacaggtgtgtcccacggccatgtcacgcatcctctacttcatgtacaccggccaaatacgtgtgaccgaggtaacggtgtgccaactcctgcccgcggccaccatgttccaagtgccaaacgtaatcgatgcctgctgtgcctttctggagcgccaattggatcccacgaatgccattggcatcgcccactttgctgagcaacacggctgtgttgagctgcaaaagaaggccaatgtgtttattgagcgaaatttcactcaggtaacctatttacgatatgaaaagagtacacaaaactatagctactgagttcccctaaggtgtgccaagaggaggaattcctgcagctttcggcatatcagttgattgccctgatacgaagggatgaactgaatgtgcaggaggagcgagaggtttacaacgctgtgctaaagtgggtgaaatacgacgaggacaatcgacactgtaaaatggagcacattttgggcgctgtccgttgtcagttccttacgcccaacttcctcaaggagcagatgaaaaactgcgatgttctgcgaaaggtgcccgcctgtcgggagtatttggccaagatctttaaggacttaacgctgcacaagtgtccaggagtcaaggaacgaacccccaacaccacaaggatgatatttgtcgccggtggcttttttcgtcactcactggacattctggaggcctacaatgtagacgacatgacgtggacgacactggcaaatctacgcattccaagatctggtttgggtgccgcctttctcaagggcaagttctatgcggttggaggcagaaataacaacattggatcttcctacgactcggattgggtggatcgctatagtgcagtcaccgaaacatggcgtccgtgcgctcccatgtccgtgccacgccatcgagtgggcgtggccgtgatggacgagctgatgtacgccgtaggcgggtccgccggcatggagtaccacaacacggtggaatagtaagtagtgttcatcatttcaatagataatagtttaattaatttgacaaagcctttctggttgtttattctatcgacatagtttagcaaaccctatttatttaaatctcttgcagctatgaccccgatttggatcgctggactcttgtacagccgatgcatgccaagcgcttgggagtgggtgttgtggtggtcaaccgtctgctttatgccatcggaggtttcgatggaaacgagcgcttggccagcgtggagtgctaccatccggagaacaatgagtggagttttttgccaccactacaaacgggtcgcagtggagcgggtaagaatgactggcgcatcctgttatctaatttccaactaagttccgatttaattgctatcaggtgttgctgcaattaaccagtacatctacgttgttggtggcttcgatggcacccgtcaactagccaccgtggagcgttatgataccgaaaacgatacctgggacatggttgcgccaattcaaatcgcacgcagtgctctctcgctgactccgctggacgaaaaactgtacgccattggtggattcgatggcaacaactttctgtccatagtcgaggtctacgatccacgaacaaatacgtggacaacaggaacaccactaaaatcgggaagatcgggtcatgcgtcggcggttatttatcagccggcgtgttccaccacgtttatggactacgaagatagtgacgccccacacccggatggaagtaacaacggggaaaggaatgctcatacaccacaaaacacgtacggcagtgggagtccacattatcctgggacggcgtccaatatgcagtttcatacttcatacggaatgagcggctgcaacaattgtgactcggaaatggatataaaaccatatattcctgcagaacaccatagttttcaaattcccgccattagatccgaggagctagtcaatccaaactgtccttggtccagaatgcaggaaagatttcgaagaactccaccagcgtctttcacagatgatgagagaaatgctaatgatatgcggcataaattaaaaaaagcacaaaaagaatgtttatttagcacagcagcgaaagtttttcaccatcacatcgaaggtcgcctgcgaaaactcacgagcgcagccacatgacaatacgaatccgagcctcacgcttagcctcaaccaaaaacatcattcattgtacaaagcctgatcgtatcccctagaattccatgttgagaagcagcattccattgtaatattacttactagtgtgttcgctaggtgataattagtcaaaccgtttttatggcatccataacataactggcgctcgtcagcccattttaaaaagattgattagggttaatagttgattagtgggaggaaagttcgtattttacgtattttgtaggtatccaaactgatagattgcgtattgtactttttttaacgtaggataagaagaggaattatgcgcatccaaaataggttttaagaaaagaaagcaaataatttaagaaaaataaaacaaacatattttacaaagttatttaatctttttgctattaatcttgtgcaaacctttggccgtggcaacaaaaaggccatattcaaatatcttcctaataaaactcaccgtgacagtgctatttattccattagaaagataaactgttgttttcgtatttgtttgtaaacgactatttgtgtattttgcttttaaacaagttgtcttaacaagttgcacattaaagacttctctgctttcggggtcttggaggattgaaggaaacatgtgtgttgtcggtaatggaaacgatgttcagcccacccatttgcagtcctttgatggccgactgaatcaaaacatttaattatttttaagtgacatgagagacaaaaagtattgaacataccattcttccagggccaagaccacgaacctttactcgcactgtcttccagcccaattcaatggctttctgaaatacaatttaagttttttgttttaaatgattctatgcccatattatactattcaaatgcatatatggtatacaactataatggagattatctcgatgttctatgtagtttttgaccatcctactttggtaaaacctgtttcttgtggaaatgacttact

SEQ ID NO: 7712 - DNA, 2243 bp, DROSOPHILA
aggctgagatgagcaacacttcggaaagttgttccatctcatgcggtggtcgattcggatcggcgcactcgaccctagatgatcacgatgctacggatgatgacatgaccttctgcatgtccaattacgccaaggaggccctgaagatgatgtacatgatgcgttcgcacggcatgctcacggacgtggtactcgaggtgaagaaggagctctttcccgcccacaaagtggtgctgtcggcggcatcgccctacttcaaggccatgttcacggggggactcaaggagtcggagatgtcgcgcgtccagctccaaggggtgtgtcccacggccatgtcacgcatcctctacttcatgtacaccggccaaatacgtgtgaccgaggtaacggtgtgccaactcctgcccgcggccaccatgttccaagtgccaaacgtaatcgatgcctgctgtgcctttctggagcgccaattggatcccacgaatgccattggcatcgcccactttgctgagcaacacggctgtgttgagctgcaaaagaaggccaatgtgtttattgagcgaaatttcactcaggtgtgccaagaggaggaattcctgcagctttcggcatatcagttgattgccctgatacgaagggatgaactgaatgtgcaggaggagcgagaggtttacaacgctgtgctaaagtgggtgaaatacgacgaggacaatcgacactgtaaaatggagcacattttgggcgctgtccgttgtcagttccttacgcccaacttcctcaaggagcagatgaaaaactgcgatgttctgcgaaaggtgcccgcctgtcgggagtatttggccaagatctttaaggacttaacgctgcacaagtgtccaggagtcaaggaacgaacccccaacaccacaaggatgatatttgtcgccggtggcttttttcgtcactcactggacattctggaggcctacaatgtagacgacatgacgtggacgacactggcaaatctacgcattccaagatctggtttgggtgccgcctttctcaagggcaagttctatgcggttggaggcagaaataacaacattggatcttcctacgactcggattgggtggatcgctatagtgcagtcaccgaaacatggcgtccgtgcgctcccatgtccgtgccacgccatcgagtgggcgtggccgtgatggacgagctgatgtacgccgtaggcgggtccgccggcatggagtaccacaacacggtggaatactatgaccccgatttggatcgctggactcttgtacagccgatgcatgccaagcgcttgggagtgggtgttgtggtggtcaaccgtctgctttatgccatcggaggtttcgatggaaacgagcgcttggccagcgtggagtgctaccatccggagaacaatgagtggagttttttgccaccactacaaacgggtcgcagtggagcgggtgttgctgcaattaaccagtacatctacgttgttggtggcttcgatggcacccgtcaactagccaccgtggagcgttatgataccgaaaacgatacctgggacatggttgcgccaattcaaatcgcacgcagtgctctctcgctgactccgctggacgaaaaactgtacgccattggtggattcgatggcaacaactttctgtccatagtcgaggtctacgatccacgaacaaatacgtggacaacaggaacaccactaaaatcgggaagatcgggtcatgcgtcggcggttatttatcagccggcgtgttccaccacgtttatggactacgaagatagtgacgccccacacccggatggaagtaacaacggggaaaggaatgctcatacaccacaaaacacgtacggcagtgggagtccacattatcctgggacggcgtccaatatgcagtttcatacttcatacggaatgagcggctgcaacaattgtgactcggaaatggatataaaaccatatattcctgcagaacaccatagttttcaaattcccgccattagatccgaggagctagtcaatccaaactgtccttggtccagaatgcaggaaagatttcgaagaactccaccagcgtctttcacagatgatgagagaaatgctaatgatatgcggcataaattaaaaaaagcacaaaaagaatgtttatttagcacagcagcgaaagtttttcaccatcacatcgaaggtcgcctgcgaaaactcacgagcgcagccacatga

SEQ ID NO: 7713 - protein, 744 aa, DROSOPHILA
MSNTSESCSISCGGRFGSAHSTLDDHDATDDDMTFCMSNYAKEALKMMYMMRSHGMLTDVVLEVKKELFPAHKVVLSAASPYFKAMFTGGLKESEMSRVQLQGVCPTAMSRILYFMYTGQIRVTEVTVCQLLPAATMFQVPNVIDACCAFLERQLDPTNAIGIAHFAEQHGCVELQKKANVFIERNFTQVCQEEEFLQLSAYQLIALIRRDELNVQEEREVYNAVLKWVKYDEDNRHCKMEHILGAVRCQFLTPNFLKEQMKNCDVLRKVPACREYLAKIFKDLTLHKCPGVKERTPNTTRMIFVAGGFFRHSLDILEAYNVDDMTWTTLANLRIPRSGLGAAFLKGKFYAVGGRNNNIGSSYDSDWVDRYSAVTETWRPCAPMSVPRHRVGVAVMDELMYAVGGSAGMEYHNTVEYYDPDLDRWTLVQPMHAKRLGVGVVVVNRLLYAIGGFDGNERLASVECYHPENNEWSFLPPLQTGRSGAGVAAINQYIYVVGGFDGTRQLATVERYDTENDTWDMVAPIQIARSALSLTPLDEKLYAIGGFDGNNFLSIVEVYDPRTNTWTTGTPLKSGRSGHASAVIYQPACSTTFMDYEDSDAPHPDGSNNGERNAHTPQNTYGSGSPHYPGTASNMQFHTSYGMSGCNNCDSEMDIKPYIPAEHHSFQIPAIRSEELVNPNCPWSRMQERFRRTPPASFTDDERNANDMRHKLKKAQKECLFSTAAKVFHHHIEGRLRKLTSAAT

SEQ ID NO: 7714 - DNA, 3734 bp, DROSOPHILA
gcaattaataaagaaaaacaaattataataatcttttttataatacttgagagcctttttgatagttaaagcctctcacaattccgttcaaccttaaactttttcagtaatagttttgtcgtcataggggccatagtgttgatgtgatatttccgaatattcaattctgagcttaaaattgtggaaagcggatgtgtctataatttaggttaatgtcttagacaataattatttgtgtaagtgtacaaattataatagcatttatcttatctccaaatatcgactgatgattataaattaaatgataagattagattaccctacgtgcttcagcagagcttagctcttttcttgaaagctccaatactcttacattagggcggggataagcaatatgtaagtgctctagttaactcctcccttactgtttaataagagtgtcctgattgactcagagttaatagatggctcattgtttagaagtttattagctgcattattgctggtactatgtcggttatcgttctagaacctatggttgtacgactgcgaattttgaaaatttatctatacagctatctattctggaacaatgttttgtagagcgataaaagctcttttgagtttcacagcttaaagaaaattttttttttcagattaccgtaacaatattggaaaaaagtggcaccagtatatcagagaataagtcattcatcagggtctgtttatgttttggggatgcgtagccttcactggcttgggagatttggttcctgttgatggattttcctgtaagtaaatgagttaaaaacaaatatattgaatatattacttgtcttaatacttatgcccactagtgtatttaacctctgatttccaaattgagtgaaagcttcgctagtaatcaattctttgatagtgttatctaaccttatcttcgaaggtaggttccaggtgccgtgatgatgatggtgccatagcctccactcaaccactgcagttcacactgcactttacgcatagccggtcgtcccagaaatttgaagagccaaacagttgataatggcacattcaatggtgagttaccgggatcaggaaagtcctggaattcgcagcgcttttaagccccaataaaacaaaatttctgcaagtattgttaatatttttccaccaaaaatcagcaaaaaaaaagtttgtactttaatctaatcatgtgtacagaaaaatgtcaaagaaattgataatggttttcatcagcgatgagtaatttcttcgacctattagctcaattaaagaataggggaaaaacacaaatgcaaaaaaattaattgagtttttaactattttcgcagctgaaactggggatgatgtgtggaatactccacctgctgacctttggagtcattgccgaggatcagctgaaaaacaacacaatagtggtacatactcctctccagaactacgatcaacccaatctccaggactacgaggaatgccaggtgaacagggacaattgcatcaatgtttgcgctggcaaacagtcgtgcgaggacgagtgtcctgtgtgcccggacctgtacgtcaagcccctgatggttcagggcattaacgatacgaatatagtggcaccaccccaggtacctattaatacgaccaacattattcggctgaccaacgatatcaacaatataatcgaacatcaaatccaaaatcgcaatgaggtcaatgtccaggtgaatcagaatgtctcgaaggtgggaggacgttttggactgggctacactgacaagggatcgtgctgttatgtggtgcgtttggatcgcgagtgtaagaatgaagatggacgcgactgcagagaaagaagccgtcagcggatctgtggcgaaaagtgtcaggccagagtgatgttggccaaaatagtggtgcagtgtgaagccgaggactccgacaggtgtcacgaaaccatcgaatatgtgccacggaggaggagaaccctccagcggaggacacccaaggctacacggtgtcattacactggcaacagttggccctacttcaattgcggacagaatccaggccaaaatagtgattttgcccagccgacgaggcctaagacctctatctgcgagcactgcctcaattatccctacggatacattctgcaaaatggtctgcccgcccagtgtgccggttgtttccagggatacggagctcccctcatgtataatcctccttggatgtacaatccatattatgtggcatatccagcctttaacaatataccggccatacagaacaataataatggcaacagcggtgacaccagtgtagataaaaccattgcagatgatgatgacgatggatggactctatgtgacgacatcgaaaaatgcctagacgcggaatacaaaggctcgcagaacagcgggtcacctgaacatctggtcgacgacgacgactacaacgtttcagttcagcgaaggagacgccgtccaagccgtcaccactttgtgagatcagcctacagcaaacgcaatcgcaagcacaactgatcaattccagatgaaaccacaaactctttagattttctgcaaaccttttgcttcagaaagaaatagtctagaaatattgtatttctgattaaccaaaactaaggtgtcttcatataactactacatttctctacatattttactgaataaaagtgtttttgctaaccaaatgaataaatacaaatgctatcgaattcaaagtgtcgacggaaagttatacataaatgtatgtataaattgctgcctgaaagctttgaatataatttcatttcctttacaatgtacataggtccgataaatgagtgtactttaaataacgatttatttgatacgcagggtatgaagctgggtgacagggcggggagacctcgttctccttatggactaaacaacgtttaataaaatctggactcgtcctgctcgaatgcttacgcttgcgatctgggcatacataatattaataatttgattagatgtgaaaacatttgttctggcatttcaattgcaggtagatagtttcgaaggcatccgggcaagagtttagcccgtatctcgatgaacattggtggaacaagacaactggaacttatggtaatattgcgcgtgtgttgattttaattggtttgttcgctacaaatataagggccttccatttggcagagaactctacttaatccccaattccttgagttcggtctcctcatccacggagtcctcgtcatccgaaccgtgaaccgatggagctggagtggtgtgccctggtgataaacattttattagacaatgcattgcatttatcgtttctatagtatcagcaatatcgctcattagttaaatatttacattttcgccttgaaggtatatgcattctaattcggttgctaaagacattagttgtctattacgatttatcagtaaaaaataatagaattacactcaagatcaaatcttaagttgcagcttgcttttggacctagttatttatttaacatgatttatttaaacgtttattactacttgttgagaatcgtgaaagtaaaatgtccagcagctgttttattcgagactaaaatcttttggatccaaagtacatcaaaagtatttaaaaatgcattcacattgaaatgtgttgagtagatatgaactaaatatttatctttctagcgatctgcgtcttcttcc

SEQ ID NO: 7715 - DNA, 1459 bp, DROSOPHILA
ttcacactgcactttacgcatagccggtcgtcccagaaatttgaagagccaaacagttgataatggcacattcaatgctgaaactggggatgatgtgtggaatactccacctgctgacctttggagtcattgccgaggatcagctgaaaaacaacacaatagtggtacatactcctctccagaactacgatcaacccaatctccaggactacgaggaatgccaggtgaacagggacaattgcatcaatgtttgcgctggcaaacagtcgtgcgaggacgagtgtcctgtgtgcccggacctgtacgtcaagcccctgatggttcagggcattaacgatacgaatatagtggcaccaccccaggtacctattaatacgaccaacattattcggctgaccaacgatatcaacaatataatcgaacatcaaatccaaaatcgcaatgaggtcaatgtccaggtgaatcagaatgtctcgaaggtgggaggacgttttggactgggctacactgacaagggatcgtgctgttatgtggtgcgtttggatcgcgagtgtaagaatgaagatggacgcgactgcagagaaagaagccgtcagcggatctgtggcgaaaagtgtcaggccagagtgatgttggccaaaatagtggtgcagtgtgaagccgaggactccgacaggtgtcacgaaaccatcgaatatgtgccacggaggaggagaaccctccagcggaggacacccaaggctacacggtgtcattacactggcaacagttggccctacttcaattgcggacagaatccaggccaaaatagtgattttgcccagccgacgaggcctaagacctctatctgcgagcactgcctcaattatccctacggatacattctgcaaaatggtctgcccgcccagtgtgccggttgtttccagggatacggagctcccctcatgtataatcctccttggatgtacaatccatattatgtggcatatccagcctttaacaatataccggccatacagaacaataataatggcaacagcggtgacaccagtgtagataaaaccattgcagatgatgatgacgatggatggactctatgtgacgacatcgaaaaatgcctagacgcggaatacaaaggctcgcagaacagcgggtcacctgaacatctggtcgacgacgacgactacaacgtttcagttcagcgaaggagacgccgtccaagccgtcaccactttgtgagatcagcctacagcaaacgcaatcgcaagcacaactgatcaattccagatgaaaccacaaactctttagattttctgcaaaccttttgcttcagaaagaaatagtctagaaatattgtatttctgattaaccaaaactaaggtgtcttcatataactactacatttctctacatattttactgaataaaagtgtttttgctaaccaaatgaataaataca

SEQ ID NO: 7716 - protein, 400 aa, DROSOPHILA
MLKLGMMCGILHLLTFGVIAEDQLKNNTIVVHTPLQNYDQPNLQDYEECQVNRDNCINVCAGKQSCEDECPVCPDLYVKPLMVQGINDTNIVAPPQVPINTTNIIRLTNDINNIIEHQIQNRNEVNVQVNQNVSKVGGRFGLGYTDKGSCCYVVRLDRECKNEDGRDCRERSRQRICGEKCQARVMLAKIVVQCEAEDSDRCHETIEYVPRRRRTLQRRTPKATRCHYTGNSWPYFNCGQNPGQNSDFAQPTRPKTSICEHCLNYPYGYILQNGLPAQCAGCFQGYGAPLMYNPPWMYNPYYVAYPAFNNIPAIQNNNNGNSGDTSVDKTIADDDDDGWTLCDDIEKCLDAEYKGSQNSGSPEHLVDDDDYNVSVQRRRRRPSRHHFVRSAYSKRNRKHN

SEQ ID NO: 7717 - DNA, 4291 bp, DROSOPHILA
caatttatgcttacaagagctgctaaaacataaaacatgtaaactgacttgggtaatgagagatataacacatattcagcgaatcgcatctgattttgtaagtctccaagttcttgtaagagcagacagcttatgaacaaaaagtaaactggaagttgtggagcgttagaaactgcgtggacggcttttataataatgcgagtgagttgagcggcttgcctgagatccagatgaggatgcagggtgggtggggttcttttcgctatataaagtaaggtgcggctgggctgtagagcggaaaagcggcgcaactgaaaaacgcgtttaattgagcttacctgcctgcaacctggctgcccactagcgccatctagctgcgtgcggctgcaccaaaagccggctttgttgattttttcagtttgccacgaacagaagaaaaaaaaaaaccgaaaacaaaatcgatgattcatcgcttggtttgttgttttgagtggatttcgccaactgcagcaggcccacaaaaatactagactgttggcgcttgccgcctgctgctgttgttgatgttgctagttgcagtgttgctggttgacggtgacgcagtcgcagttgcagttgcaattgcagctgcgccaattctcctctggtttgccgtttgcatttcggcgctttacgttcaaaacaattattattctggcaattaattttgatttaagcagcgattttcaatacatttctatacatacatataaacggcttcatatgtatagactgctttcctagctctttgtaaccccccatcgagtctccctgacggttgaatgtctcgatttctgtggattttcatttcgagtgcagcgataaataaacgacacctacaatgcatatccgagatggcatcttttagattgcgatgcgattcgaaccgttcgtccgataggtaaagtaatagaatgagggaaattaatttgtttacctcaactcaaaaaaactaaatgtgttggtggtttctgttttcttgtgttttatttatttaaaaaaattaaaattaaatacatgcaagtaaatggctaccttcaccatatttacaaggcttaaatcataatgtttaaggtaaaataaattataagattaaattataagttggtaggtatgtcgtatgaattggggcttaattatctggcacctttttgatttgtacacgaatgagttttaacaacgaactataatacaaggaattgtcaacgaaaacaatctaatgctaagctctcaactgcgatatgagttttggaataatttagcgataactctaaataaatatttctgataaactagagaccctaagaggcaataaaattgccctgactaatttttggcactgacttttccctgaatctgacttctgactttggctaaactgactaagattaataaatggccggtggttgcatttggtattccccgccctcctcctcttcaccattactgctgcccacactgccggcgtagtagagttggtgtggattgtgtccctcctcgtagacctggaggtgctgctgtagctgctgctgatcaaagccccctcctgacccactgggacctccactctgctcagtctggcaaccgctttgcaggtgcttggccagcagggacatacgcgagaaggacttggtgcaggtggggcacgagtacttcttcacatccgaatgggtttgcatgtgcgcgcggagatttgacctatccgcgaaggcccgattgcagtgttggcaactgaagggcttctctcccgtgtgggtgcgtatgtgaccctggaggagccatggtcgcgaaaacgccttgccgcagatgggacacttgcagggcagggtatgcgtgcgaatgtgcatcttcagggcgcccaaggacacataggtcttgtcgcagttcttgcagctgaagaccttcttcacctgattgccctcggccgacggacaatggaactgctggtgcttagagagtcccgagtaggtggagtagctctttccgcaatcctggcaatggtatcgcggcactcccactggcttttgcatgctctgtgctgaggctacattagctgcctgaatcaaagccgaagcttgatccgtgcaaaactcggtttggtcgactatcgcacctgatcctccaggctggcttctaatgatcttgtactcggtgctttcgtaggcgtgcgtttgttgatgctttaccaatcctgcataggtggcatagcacttgttgcactgctggcactggtagtacagatcattgctgctcttgatcttcagctggttgatgtcctgattctcctgatcctcttccatgtctatcggaggcggcgcatgttgcggagccatgtgttgcatgctcagcaaagctctggccacattctgcagattcatgttttcgctcagcactctcctctgggttacggataggtcctccggttcggccagtggagtcgggggtggatagaacaactggggtgatggaatcggaggtatctcctctttgatgttctgcattttcatacagtcctcatactcggctatgcttttgagtaggttgttattgtagtttcgcaggggaaattgttcctcatcagagggttcagccttgatgatggttgggctagcatctcttgtatatcgaagaggcagatgctgttctggttccggctccggctccattacttcctcctcaggtggcaactcgaactcgccgtaacccaggcgagcaagactcttggcgatttcctcccgggtgaagacatccggaaaagcgcgggctatctcacgggtttcctcccaaatgcgacgggccaactgctccttggtctgattcatggctgcatcgaagcggcgcctcaattccgtgggcaccggctgaggttccggttcggatttagccatccaatggggctccataggcactgcagccgaggccacactcaagtccactggtccttcatctgttgaaatcagcataaagttaaaatatgcctgtaaatcacttccgtagccttaaacctaccatgacttaggtgatcctctgggctggactcctccaccattatcggacgcttcttgagcgggcagcggctgtacttgagtttatccatggttgctatgttattattccttatggttactgatcactgatcttcgattttgtatttaataccgatccttgaacttaaatcactgctcactcatttgctttcgccacacgcgtctcgatcgcttggagttccttgctcgaatgatgcaacccggcaaggatcagtccggttttatagactcccgatcaaccccctggcaggatgatcaaccccctgggcaaaaaggatcttggcgtctacctacttccgatgtcgcccgggattctgtaaatccaccccgaaccacgagccaaaagatccattcagcgatcgagccacagctgtgcgttcattgaacgcagatacagctgcagatcgggcagtccgggggtaccactgccatatagagaatcgttgagagagggagggacctggagacgagaggaacaaatctgtgtgtaaaaagcgagcacgtgccacagggactctctccgttccactcgccgatcgccaccagctgcctctctggttcagctcgtatttcccctgaatttcaatggtatgagtgagcggcagctggtggcgagcttgctattgctatatacccgatcaagtttatttataagcctctttcgggtccgcctcacacgatcgctttgtatataagcctaatggacgtttgctcttcgtgagcaggtgagcatgctctttggagccccaccaagagaagtttcgtaccccacaattttcaactctcttcgctctttggggcgctcttgttccaactgtcagtcgtcccacgaacttaagagatagctttctgtgctattcggaggataattcagctgtgttttcttaagcttcttattatgtttactattcaaatttttctgagctgagcttaaacgatcacatattcggctgactttgctgatcggagagtgtgaagatttttcaggggctcgacttaggaaattatgcccaaatatttaaataccataataattaaaacgttctcaattaaaatcattaagatagaagatattacaataaaggtacaggaaagttgttctattttctctttcaaagcttttcatttgttgtataaaatcgcacgctgttacagaagaaaagaagcacttaggattccaattgatccttatcggagcgatcctc

SEQ ID NO: 7718 - DNA, 2229 bp, DROSOPHILA
gccgggttgcatcattcgagcaaggaactccaagcgatcgagacgcgtgtggcgaaagcaaatgagtgagcagtgatttaagttcaaggatcggtattaaatacaaaatcgaagatcagtgatcagtaaccataaggaataataacatagcaaccatggataaactcaagtacagccgctgcccgctcaagaagcgtccgataatggtggaggagtccagcccagaggatcacctaagtcatgatgaaggaccagtggacttgagtgtggcctcggctgcagtgcctatggagccccattggatggctaaatccgaaccggaacctcagccggtgcccacggaattgaggcgccgcttcgatgcagccatgaatcagaccaaggagcagttggcccgtcgcatttgggaggaaacccgtgagatagcccgcgcttttccggatgtcttcacccgggaggaaatcgccaagagtcttgctcgcctgggttacggcgagttcgagttgccacctgaggaggaagtaatggagccggagccggaaccagaacagcatctgcctcttcgatatacaagagatgctagcccaaccatcatcaaggctgaaccctctgatgaggaacaatttcccctgcgaaactacaataacaacctactcaaaagcatagccgagtatgaggactgtatgaaaatgcagaacatcaaagaggagatacctccgattccatcaccccagttgttctatccacccccgactccactggccgaaccggaggacctatccgtaacccagaggagagtgctgagcgaaaacatgaatctgcagaatgtggccagagctttgctgagcatgcaacacatggctccgcaacatgcgccgcctccgatagacatggaagaggatcaggagaatcaggacatcaaccagctgaagatcaagagcagcaatgatctgtactaccagtgccagcagtgcaacaagtgctatgccacctatgcaggattggtaaagcatcaacaaacgcacgcctacgaaagcaccgagtacaagatcattagaagccagcctggaggatcaggtgcgatagtcgaccaaaccgagttttgcacggatcaagcttcggctttgattcaggcagctaatgtagcctcagcacagagcatgcaaaagccagtgggagtgccgcgataccattgccaggattgcggaaagagctactccacctactcgggactctctaagcaccagcagttccattgtccgtcggccgagggcaatcaggtgaagaaggtcttcagctgcaagaactgcgacaagacctatgtgtccttgggcgccctgaagatgcacattcgcacgcataccctgccctgcaagtgtcccatctgcggcaaggcgttttcgcgaccatggctcctccagggtcacatacgcacccacacgggagagaagcccttcagttgccaacactgcaatcgggccttcgcggataggtcaaatctccgcgcgcacatgcaaacccattcggatgtgaagaagtactcgtgccccacctgcaccaagtccttctcgcgtatgtccctgctggccaagcacctgcaaagcggttgccagactgagcagagtggaggtcccagtgggtcaggagggggctttgatcagcagcagctacagcagcacctccaggtctacgaggagggacacaatccacaccaactctactacgccggcagtgtgggcagcagtaatggtgaagaggaggagggcggggaataccaaatgcaaccaccggccatttattaatcttagtcagtttagccaaagtcagaagtcagattcagggaaaagtcagtgccaaaaattagtcagggcaattttattgcctcttagggtctctagtttatcagaaatatttatttagagttatcgctaaattattccaaaactcatatcgcagttgagagcttagcattagattgttttcgttgacaattccttgtattatagttcgttgttaaaactcattcgtgtacaaatcaaaaaggtgccagataattaagccccaattcatacgacatacctaccaacttataatttaatcttataatttattttaccttaaacattatgatttaagccttgtaaatatggtgaaggtagccatttacttgcatgtatttaattttaatttttttaaataaataaaacacaagaaaacagaaaccaccaa

SEQ ID NO: 7719 - protein, 548 aa, DROSOPHILA
MDKLKYSRCPLKKRPIMVEESSPEDHLSHDEGPVDLSVASAAVPMEPHWMAKSEPEPQPVPTELRRRFDAAMNQTKEQLARRIWEETREIARAFPDVFTREEIAKSLARLGYGEFELPPEEEVMEPEPEPEQHLPLRYTRDASPTIIKAEPSDEEQFPLRNYNNNLLKSIAEYEDCMKMQNIKEEIPPIPSPQLFYPPPTPLAEPEDLSVTQRRVLSENMNLQNVARALLSMQHMAPQHAPPPIDMEEDQENQDINQLKIKSSNDLYYQCQQCNKCYATYAGLVKHQQTHAYESTEYKIIRSQPGGSGAIVDQTEFCTDQASALIQAANVASAQSMQKPVGVPRYHCQDCGKSYSTYSGLSKHQQFHCPSAEGNQVKKVFSCKNCDKTYVSLGALKMHIRTHTLPCKCPICGKAFSRPWLLQGHIRTHTGEKPFSCQHCNRAFADRSNLRAHMQTHSDVKKYSCPTCTKSFSRMSLLAKHLQSGCQTEQSGGPSGSGGGFDQQQLQQHLQVYEEGHNPHQLYYAGSVGSSNGEEEEGGEYQMQPPAIY

SEQ ID NO: 7720 - DNA, 13793 bp, DROSOPHILA
tagcatctacaataaaccaaaacacacccagacaatttgagaatgagttttaaatatttttgcacccaaagtttgggtatttgggtcccatgcaacacaaagtgtagcatacttcaaagggcacacacgctttgagcgatctgatgttgccataggaaaggaaaagaaaccatagttgttttacttttgatcaaaatagtttcccattcggaatacaccattctactctttatacaagaatatataagcttcgtattaaaacattttaaaatataaaaaacatattgaaaggcaaaaagtcatagtgatcttttacaaaatatgcgcttcttattcaaattaaaaaaaaagcttattccacttaaatgccgtttatcgatcagagcgttatattttgtacggtcggtcttaaatttaaatgatggaatccacatagttctttaccatcgcttaactaatagccaagttacacaccaatgagctgtggtccttacctaatacccattactcgtaaagtgatatggtatttaagttttgtgtctacgtatgcaacacgaacaaagaatcgttactttcaaccaaatcaaaaagttaaataaagatcgatcatcgttttaacttttaccagcttacgttctccccaaacattttaacgattcatgtcggtataaccataaaacaaaaatattcctgtataactcgcgatactgtttaataatttgggcatacaaatgcatcttgctacgcttaaccaaagacactagtggcttaactgttccttgcaacataagtaagtttgactagtacccaataggagtggaaccagtgtgcatagagctccacccgcacgcagctagatgtgaccgcacgcgagccgcagaaaaataccgcgatggcaaaagtaccagcgccatgattggtactaaaatatctcctatatataagtatagcgataaagcagccgaaccgccagctaaacgttcagttcgctttgcgccggcaaattcgatagttttttgagtttgctgaaccgagtcgctggggcagaagtgtgtgacagccagccgtgtgtgttgtgatccagccaattgatactgcgataagaggcggcgagcaaatgtaattacctcatagacatcagcgttcgaaaatagtaaccgtgttttctgtgatatctgtgtgagtgcgtgttctcgttgatgttttgcggtggtttggtttcctccttattttgcgccccttttttctcatccgatgctgcgagagagaacgaaagagaggagaggcaaaaacatatttcccagacatttgctgatttaaccgagaactttatcgattcagcaggaaccagaatacgaatggaaaaaattcggcaaagatcgcgtgtttttgcgtgagagcaaagttagggcgaggaggggcagtttgtttttcggaaacataaaaaccgctaggagcatcgaaaaaatttcactagaaatttttgaaagcgctcgcgcaaaaaaccggatatgttactcaaaaagaaacaacagaaaaagcttccaaatcaaaccaaagcgaagcttatggcaaaacgaaatcacctgtgtgtgcgagagtgagtgagagtgcgtaaaagtgtgagcgcgtcgagtgtgtgtatgattagtcgcgtgtctggcatgcaattaggcattcaaactaatttccctcccaccggcaagttgccctgtctcatttgtattttgctgggtttcgctgtttgcttatgcattccttcaagttcttttaattcgcacgagactttcgtgggcagagaaaaagaggaagagagagcgcgccagactggcgctctctgtaaactaccacaattacactttccgttacagccaccccctcactcatgtgctcccagaacactgtgagaaaagtgatgtaataacggggtagcttacaggactcagagtgtccctggattcagctattagtattgtgatttcaagatataaaagtagaatgttaaaaaaaaccaaactcggagactccaaatgtatttaatttgtagttttagtgtagtttttcggctagagattttggggatcttaaaattctcacatttaaattaaatatttaaaataaaactcatgcacatttaactaaacttaattattaatgtcaagattttacctccgattgacgagcaatgtttctctttgtgtatcaagttgtttgtgtatccatttaagcttcagcacgaggtgtgaaaagtgtgaaaagcggaagaatgtagatgaagataaccacaaagcgtgcgccattcatgaaagcgttgcacatcccttgcagagtgagcaagagcgggaaggtgtttgaaggggtgtgagagggaagaaagattgagtaagagagagccatggaccaacggtgttttttttgttgcctggcaaaatcaatgaaatggatgaatgagaggaggagtggtgtgggacgaaggggaaaggaaggtcgccgagaaatttatgcgacaaaacgcgggctttttatgtgcctgattgtgtgtgtgtgtgtgtgagagagcgcgtgtgagttttgataagggggagtggtgcggaatttttactgaattaagctttaaacatcgtcgtgtaaaatccccattacttaggaaacagataagatactgcaatcagtaaaaaaaactaaaaacattcgactcgaagataaattgtagttttaataattaaagaatgttcccataagttaaaaaattatattcaaagtgttttcctttttgtgtgcctattttaaaagtacgtaatgtataaaaaaacaaagtcatacagagcaaaatgagaaaatttaaaccgtcctagttcattgggtactttcagtatattattttatttattcaaataaaacagctgtatagctcgatgtatatttaaattagtttttaatcagcagaagctaaaacctattgttaatattaaattaatattaatttaataaaatcgttctggtgtacgaatagctatttctaatacgaatagctatattccttaacaaagttgtacaagatctttgacaagatagttctgagtacattaactaatctatctctactttcttgtcaatccacagctgcatataacccaagtaacatagccaccaactcaaacacataaagcccaccaaaatgatcaacatggacattagcgttacgcccaattactcgtacatcttcgacttcgagaacgatttcatacaccagcggacgcgcaaatggatgctagagaactggacatgggtgttctactactgcggcatctacatgctggtcatcttcggtggtcagcactttatgcaaaatcggcctaggtgagtctgccacactgaactgaactatgtgaactaaagcagttttgcgattaaaaaacatgtgttctttggtggcttagatagacaattcagtgaaataacggttgggttaagaacttgcgccctttggccttggaaaattattagctggcggccggggagcggcgttaattacacccacaagtgcacacgccccttgcagtcggtagaaacaactttgctgtttatcgaaaccaatccctggaaacccctatattgactcagtcgcgctttgtttcggtttattctccggaaagactggagtccaagtgtacatttgttattagcccagacagctgttgagttccacgtgtaattatattaaattacggctaatcaaacactaatgttgtaggtgaatcctcaactcgggctcaaatagccaacaattcgcattcgcacctgagcacgcactattcaggtgtattttccgatggctaaagacctatttgattgggtattttaacaatttttccaacagtcagcgctgtttgtcccctccttgttacctgatttacctgtggtggatccaattggcggctattcgtgctggcaattgtctcgtttcgattcgcttcgtttttgcctatgatactgtgtttgccttcctgcttctaattgtcgtcatcgggctttgtggccaaattaagttgggctcgtgacatgccatttagacagtatttttgcaagatcataattcagttttgtcacctggtttggagctgtttatagccttgctaaggccactgtgaaattcggtagaaagttgctaccgtctaacagaaaagtttattattgtccaactggggaaaacgggctatataagttccttctgagtatctttcgaaacatacgtctttgtattctaaaaaatgttagctagataagtctatttgatgtggctttcctaaccctgaattccacatcatgattcaattgcttgcataatgtaatgtggagtagcgattcctgcccacactccgacccaaagccattgggtttttggatgagttatataggggcttggccctgggttgcttggcgattctctacgcggacactcgtcgggggatctgtcggttaatttttcactttattgttgttggctttgccttacacttggctttttcggaatgtcatttcaatatttgcccacatggaggagagtcggctaagcaaatggacgtatgtacttggtacagaaaggtgtgaatttagtgaaaatgcaggcgtttctttcgaactgttggggttaaaaaactgacaaggtaaggatgaattgggcaaattaaaacggattgatttccgcttgctcagcatggctacttaacttcttgaatactcaaacacatgcatgaatattcaatatttgacgttttccaaaccatgccatgtttaagaatctctaattagcaaccacggttctgaacagcgtgtcaaaattaatcgcaaactttgaaagaatgcaaatgcacctgaccgcatgccaccgactgtacatttacatatttagagagtggacttcccgcttgcattccacctcatctttcatgaatttaatttttgaatttctgttttgtttcactcgtttcggacagtgcgccattaaagtcattaaactgattaggtttataggtacacgccatgtcgtactcgtttcatttcaaatgcccaacggacaaagttttccacggcgaccatgtggcacgtatgtatgtacatatgtgcttgtgtgtcatgcaagaagtgggtgtgtccacgcagacggggttgtgggtagtagtcctggacggaactccaacaggacactttgacatgtagccgctctataggtccacttcaattggacactggtacactggaccacctgattgcgtttacaatatttaccagcactttaaagtgatttttgcttttttttatagttaaaaagtaaacaagaggtcgaagcctttggagaattttaatatttcagtttttagtatccataacgtattgcgtattacagttgacatctccttaaatggttaaagattaaatatgcctaataaaattagcttataagcactctacaaagaatctataaaatataagttgcaaagccttaatggtccataaagtaagatattcaaatgatgtaatatgcgtgaaaaacaagttcctgttggccagtgtagctttggcgtgcgcaaatgttttgtgaccatataaggaggagggttcataagggggcgatatgagatggggtgggcaacgtgtgtggggaccccagtggttaaaatagaaatctgaagcagcgaataatgtatgtatgtgtttgcagaggagcacgatgaccgataattgtaatcatttaaattttaaagcgattgagtcattcagttgctttggtttctcgctattattcatgttgttccgagcaaattgcattatttatatcacaacaactggaaatagtgtgtcgaggacaaatgagtacagagtacagaggacctaggatctaggtccaccctcgctcgaaataataatgtcctttaatgtggattctctcaccacgcacagtgtccttaaatggttggaaaaatgttgtttggcgtgtgtgttgctacggggaaatttttttttttgcaattgaagcgtggcaattgcataacatttacatttgcgaattaaacaataattgccgcccctccacgggcacctgcaattacaatcactgccgcaattaactattaccaccagccacagcatttagttaaaaaataattcacatgccgcagtagaccgatcgaaaataataagtaaaaaaatatgaaaaaaacacacaacgaacgtggagagacgagaaagggcagtgctgaaagtgaaacttaattcaattttggtcggcctatgagtgtgcatatatgtatgtacatacatatattaacatcgtattaacgacaaccgttaacgcaaacagttggtcaaaagtgggcagagctggcgagcaaatctccgcgtttctttaataggcattttgtgtatgttttgatatattttctacataagataccattttcgagatctcaatgttggagctttgggaaaagctccgcttgctcttttttctttctttctgtgtttttttggcggcggccctttcctctcaactcagcatcttcatatcacgccacttttccccacttttatttgctttaaaagtggatctcttttccccctccagaaataactcgtttttgtcggccaccggaattgttttgactggatggcttgttgcttttcgtctgagtattgacggcttatcggccacctgctgcagcaggtgtgtcatcccgcattgcccgaaaacttctagccatgaatcagcgcccattggcaaaaaaaaaaaacactttagtttccctttcgtcataaacaattaggttgataagattagtgctcctagcatctgaagtgctttcaggtggaaaacgccaaatattcagtacaatttttagggaaatgtaaaaaatggcaaataatgggtcattggacttacttaaatggaggaatttgaagttacacaaaacgtggctcattaacaattcaaagcacgttacggtgaaaataaagatcttataagatggaaattaaagcagccttacagcctacattttgtatcttttatataatttgttaattactcgcattcgaaacaaaacgcgtttatctccatagtaatatataattgcaaaatgttgtattagtcgcattgctattaattttacttttcaatctgccattaaattgggtttcccgtgcacagcttttgattaagttatcttgaaaaaaaatgacctaatcagcaaaaattgctccaacctttcacaataatttattcgttgcactttgaaagcggtcggaaataacttggtcaatgctgtgacatcaaatctggccagcatgtgaacaaccagcgcaaaaaaaaaaataatgaataataattaaaaaccgaactcaaagcaagacctaaattatctttaaaaataaaagcagacggccaaaggtcgccgaaaacaaaaaaagttttgcatcagtttggggacaatgttgcgaatttggtaccctatttccatgcatattgatatgagtacaaggtatatgggcatataaggtgtacaggtgtacaagcgtatggaagtgtgccaccgcttggaaaatgatgtgcatatatgtataatggtggggggtttatagaggtggctctgcatatatcaacccaaacaacctgagttttaacccaagccaaaactttgcgtaaaataatcaattgaccaacatttctgcggtttttttttgcaaccttttctcgcttgcttttccattgtcattttttttttttttttgtttacaaactttgcaaaatcaggtttactctctccatttaacagatttgctctctcctattcgccaaagtctttctctttgcttatgcaatttgctgccacaaagtggaaagcaaaagaaagttcatcaacttgccataatattagcaagaaatgcgccatcgccatgattatggcgatatttgttacgcagtctaattttcgatttcttatgtcatataactttgaactttaaactttggcttcatcatttttagatccaatggaattcgtaactaagctatttaacttgatatctaatttctatgtttactttacctttggatatatttaaagtttatttatatacgcgtttgcttctaatgacttaacccatttggttgctaatacacactcattgggcatattaacactttaaaattgcttagaactttgttttatacagttcaaagtataagtttgtttttacatgatgtgcatgacttcgttaatacgcatcttctgaattgaaaaaatgttagaatccaaaactaatacgtttgggttatatcaaatatttaaagtatatttaatgagcacacttgctcaatttcctataattcagtttgtagtttatagtttatagtatattctatagaaatcaaatcattggtcagatcctcactttttgtagtatttcaaaggacttttttcacttcataaacataaacatatctgaagaatacattttcaatcttcaaagtaataataatctggcagatttgtctaaagctttctcacgcatggattatcaatcgggcagatcgcaacacccagccgtgggatggcacccagagatcctcgctagccggacgcaaagtaggcgccggttcgctcggccgaacgccacccacgcggaggaggaggggacgacctgtgcccttgcaaaaatttgagcttcaaggggcgcgggacacgcccccctgcctagaagccaatactgccaagcgattagcaaggctgattggttttccttactcattagtttgaggcacgaattgccatcagcttgcaactggaaactcatggccatgcaaccagaaccggttgggaatcatagcgacgcctgtcgagtgaaaagagctttttcgtggagaattgaatacgcatattgcgggtggtttgtaaacggttcttaaatcctgaatcagttgttgtcttttgaatttaatcgaaatatgtttgaatatgttacaaaactagtattgtatcggaatttatataaattacaatagctaaagccattgtttataatgagcttttattttcaaggataattgttgcataatattaaaaagtgataataagttttttgcacatgcaattaaattgctaagtaattcaggcagaaataacaattgaaaccattgattttgtagggtatcatctaagcttagagttcaagacaattccttctgcgcgtaattgttattaatagaagtgattctttaagtttcccaactagagcacatgtgcaactaaatttcttagatgaacatttccgctcagtgttgccccctttcccctccccatcaagcttaattgtttagtacagtgggcattatctatgcaaatctcggctagatttttgagtgagctgtttttggtatgtgtttgctgacacaaatacgtattcaatttgggcattctgattgcgcccgataaaagtggcgtagactaaaccaaaatacgcaatctttatggctttgtttggctgggaaataaccgtctatcgattgtgtttttcataaacccgttgacgctctgacatgggggccaaacaaacatttcctttataaactttgcttctcgaatatttccgactttctgccaagagatttggcaagtaaactttgcttgtttgctcaaaaatattgaaatttctctccaggctaaaggtcaatgcaatcaatttctttggtttgcccaccaaccaactacacattgtgataactgatatcacacatttatgcgattccattggtgttgatttttatgagtaattgctgtggaatatacagtctagtaaacgggccaccgataaggttggccaactgatttgcagccaattgattgcgtaaactttgtttgctattactaattaagatttagaacgcatactcaaatcaattccgcattcgagcgaactcgttgagtggtgcgattataattagtatttgattcagctgttcccaaagtcataaagctctttaaactggctcattacttcaatataatttggccaaaagaacttcattagccagatttcgtctgactaagatgctaaaaccagtattttgatttgtgtgtgggcaactttttctttgttggaatcgaactgctgttttaatgggtgtctctttctatagaagaactcattgtttcccaaacacgtgtcgttcccgcgaccaaccacttttggtagattcctaaattgagctgagagatcacctgaggttttttgttttaacttgaccgcttgcgttatcaattttttgtgtgcgcgcccacagacaaagtaatcgactgtaatctattaggtcatgccgtgacagctaaatatgactattccatggcatcgaatgttcgcattaagtaagtttattcaaagtgccctggcaactaagtggcacaattgcgctaaggttacccgttttcaggagattaggttacgcgcaagtttctactactatttgactgaccccccgtgcggcatcttcaagttgggggttggttgatgtcattacatgcattactcgtacacaaaaattcgcacatattaagtgcctgctgcctgctgtggcaaataacaacttgatctttgactgtcacgctcgtctaggacggaggcatggaaaattgaatatcgttagagtttgttgatcttttgggattttttttccgctgcaatttcgcgattattggcaccgggtaaatatgcatcattcatttcaagggccaactagtaaaatattctagtatttgcttttggtaagtgtgggagtcggaataaaaataaaaattgttctgaagtcatcagccagcttgcgaagctaacttttattcgtaattgatttagaatatttaaatttattatataaattaaggcgcgcaaagtcagctgtctggaaaaaccccaaattcaagcgatcttggtacctttccactgtatttttcctgcatggctaaagtttcctttcctttttgttttttttttttttattgcagattccaattgcgcggcccgctgatcatatggaacaccttgctggccatgttcagcatcatgggtgctgcccgaacggcgccggagctgattcacgtgctgcgtcactacggactcttccactccgtctgcgtgcccaggttggtattgaactccccatcggccttgcatcgacaggttccagtgcctgtctgtccgcatgacctgcttgtgcggctggaaacttgattgccatatgcaaatcaacgatcactgaccgatattcccaaccttctcccacagctacatcgagcaagatcgcgtgtgcggcttctggacctggctcttcgtgctcagcaaactgccggagctgggcgacacgatattcattgtgctccgcaagcagccactcatctttttgcactggtaagtttagcgaaacactgactgggcatccaagatccactcttagagtagtcaaaaaagatggagtgataatataacatcctgcaatatgctccatctttggagaaaagctacttatgatgacaatttgcatcacatgtggcggcatctgctagaacttgtactcatgtaccataaggaatactgctgtctaagttcaatcaaagagaatttccttatattattattactaaaagataaaaatgccctttcactagacaagcaacaccagtaaaccagtaaaaatacgttttataggtgcagtgaagcaatacatatgagtcatagcgaattacttttaatgagattcactgacggttatttcggcatatgaaactagcgttaattatatgttaggcttagttaggaaataaaaggtgcgaattatttgtgatataagctgtttcgattgatcaaaatgatttgatttgaatatattgtagtttccctgagaacgctaacaattaactaaacttgaactttatattaattgaatagttttcgctcacaggtatcaccacatcaccgtgctgatctactcgtggttcagctatacggaatataccagctctgcccgctggttcatcgtgatgaactactgcgtgcactcggtgatgtacagctactatgctctgaaggcggcccgcttcaatccgcccaggttcatctcgatgatcatcacgtcgctgcagctggctcagatgatcatcggatgtgcgatcaacgtgtgggccaatggcttcctgaagacgcacggcacctcctcctgtcacatctcgcagcgcaacatcaatctgtcgatcgccatgtactccagctactttgtcctgttcgcgcgcttcttctacaaggcgtacctggcgcccggtggtcacaagagccggcgcatggccgcctccctggcagcccagaatgtggtcaagcagtcgagcagcccccagcaggccagcgagagctccaagttcatcggcgctggcgaggatcaggcagcctatctgcgcaaggccaaggcgcagtaaaacggagctcggcacaccagcacctaactcccatcatcaccactccccctgtttacggctaaggacctttatttatgtagcggtgtacaagttgttttttaattttaaacctgggtggcacacgaccggtcggatgagagtttaattttgtaagccaaaagttgtaccgtgtggacaggcgtacgaaccatatatctgaacatgtatataaaagaagaaaaaaacagacgaacctaagctaaccaaaactcagagtcgagtcagaataaactctatgtaattgaggggcaaagaagcgagcgcatgaaaagcttgaattgaaatctctagatctctctagggatatgtgaaaggaacgcaaggaatttagctgctcactagtttgcatgcgtttaattaatagtcactcctcttgatatctctcgatgtatttcccagctgcagttctagaagtgtcgttgatgtatagaatttatttatatttccggtgttattgacatgcgccaaatgaatgttttgttttccactagcccctgaatgtatttcgatatttgcgttgtcagctataatttacctctcgggtggaattttgtgttgcctcccaattttagttaaaattctcaagaaggatcagactcctgccttcagtttggatatcgcacagtttgcgatacttgaacgacaggcatttttggttgaaattgaatttgatttactggagaactgttttcctaaaatcacttgtagttggggtctgagaactttgtacttctaagtctatacgcatatatatttataaaaacctatattaacggaatattaaacacgtgaaaacggaataccaaccaataacaaaacactaagttagtctattgttccaagatccagagcgcaaattgttattgtaaagtaataaactgttttcaaatctgtaagaacaaacaatatttataacagtcgaaaagacgtctgataaaatgttgctgactgactggattaagtcgaagcattgtcatagtcaccaataaaatatttttgaaattttaacatatattccagtcagtcagtatagttttaaccagtgtgtcagtcatgctgcaatacaaaaagttcgattctgttaggggaaggcatttatttagttaacctgtgttaaatgcatttgaatattccttcaaatttcttgctgctttttggtaacttaacaaagccacagaaagtccttgaacgtaacaaaaaaaaaaaaaaaaaagaacgtaaaataataataaccagaga

SEQ ID NO: 7721 - DNA, 1468 bp, DROSOPHILA
caaattcgatagttttttgagtttgctgaaccgagtcgctggggcagaagtgtgtgacagccagccgtgtgtgttgtgatccagccaattgatactgcgataagaggcggcgagcaaatgtaattacctcatagacatcagcgttcgaaaatagtaaccgtgttttctgtgatatctgtcacagctgcatataacccaagtaacatagccaccaactcaaacacataaagcccaccaaaatgatcaacatggacattagcgttacgcccaattactcgtacatcttcgacttcgagaacgatttcatacaccagcggacgcgcaaatggatgctagagaactggacatgggtgttctactactgcggcatctacatgctggtcatcttcggtggtcagcactttatgcaaaatcggcctagattccaattgcgcggcccgctgatcatatggaacaccttgctggccatgttcagcatcatgggtgctgcccgaacggcgccggagctgattcacgtgctgcgtcactacggactcttccactccgtctgcgtgcccagctacatcgagcaagatcgcgtgtgcggcttctggacctggctcttcgtgctcagcaaactgccggagctgggcgacacgatattcattgtgctccgcaagcagccactcatctttttgcactggtatcaccacatcaccgtgctgatctactcgtggttcagctatacggaatataccagctctgcccgctggttcatcgtgatgaactactgcgtgcactcggtgatgtacagctactatgctctgaaggcggcccgcttcaatccgcccaggttcatctcgatgatcatcacgtcgctgcagctggctcagatgatcatcggatgtgcgatcaacgtgtgggccaatggcttcctgaagacgcacggcacctcctcctgtcacatctcgcagcgcaacatcaatctgtcgatcgccatgtactccagctactttgtcctgttcgcgcgcttcttctacaaggcgtacctggcgcccggtggtcacaagagccggcgcatggccgcctccctggcagcccagaatgtggtcaagcagtcgagcagcccccagcaggccagcgagagctccaagttcatcggcgctggcgaggatcaggcagcctatctgcgcaaggccaaggcgcagtaaaacggagctcggcacaccagcacctaactcccatcatcaccactccccctgtttacggctaaggacctttatttatgtagcggtgtacaagttgttttttaattttaaacctgggtggcacacgaccggtcggatgagagtttaattttgtaagccaaaagttgtaccgtgtggacaggcgtacgaaccatatatctgaacatgtatataaaagaagaaaaaaacagacgaacctaagctaaccaaaactcagagtcgagtcagaataaactctatgt

SEQ ID NO: 7722 - protein, 313 aa, DROSOPHILA
MDISVTPNYSYIFDFENDFIHQRTRKWMLENWTWVFYYCGIYMLVIFGGQHFMQNRPRFQLRGPLIIWNTLLAMFSIMGAARTAPELIHVLRHYGLFHSVCVPSYIEQDRVCGFWTWLFVLSKLPELGDTIFIVLRKQPLIFLHWYHHITVLIYSWFSYTEYTSSARWFIVMNYCVHSVMYSYYALKAARFNPPRFISMIITSLQLAQMIIGCAINVWANGFLKTHGTSSCHISQRNINLSIAMYSSYFVLFARFFYKAYLAPGGHKSRRMAASLAAQNVVKQSSSPQQASESSKFIGAGEDQAAYLRKAKAQ

SEQ ID NO: 7723 - DNA, 3991 bp, DROSOPHILA
ctatttgcctagcgcaaaaaggacaatgaccaaacagaattttggttttcgggacctgcttcatgcccctttttatgtctgccgaagatgctaaagaagggttcataattcaaatgcagcaaggcaggaaatacggaagaaaccgaaaggatttccgtttcggctcgttacgttttgtaaattgatattcggcaatcgattgcctaaaaaagggaaagccggcttctaacggcggaattcagctaatcacaagaagagaaggctaacgaatttccgatacacctccttttcattgaccgcgaaacccgcgataaactgctaccgattccgacacaatagcattcgcatttgtcagcatcgcaatctgcatccgattaatcgcattacaaatcgcccatcgaatgaggtgtcgacttaagatcagtataatgctaacaaatatgaacaggtacccaaaatgcgagcgaaataaagtaaaacagaaaataccttgccaaggacagcggcctgaatcaatattatgacattgccagcagtttgcaaaccgtcgattgcctcgcattagcgcattaacttgttgattggaaaaccgcagaatcataagccaagtcgacttgttcacttggtttgtctatctgcattcaaatttcttatagtttggcatgttagccaagttcgtagaaactacgaccgcccagaaggagaacattacaagatgtgcaattacaattgttttgcagctctatcggctacgtgcctcgcatacgtgtatttttcatattttttgggtttcgtttaaaccatttgacttaataaatactagaataaagaaaaaaaatcacactacatggctacgaaaaaaaagtatagatagtggtaaaagtaggagtactaaaaaggtgaagagcacaaacagttgcgttgaatagttggttaaaaggatatatagtatatacgtatacattatataggggcaccactcgctaaagaccaacaaacaaaaaggtattaatcaaatataaaagtaacgagttaaaaaacgaaagaaaaattaattgactctctggctggcttgtgcgttgggttcttattcggtgttttagatttataagttcgtcatcaagttttcggtttgggatattcatcggtattcatcatctatatacagggctggattccggtttcgggttcggggttgcgtgtgtgtagtcggggtcctagatttctggattctaggccaccgtggcgtactgacgcttctccaacgagacattgaatccattctcaagctttaggatgatgtcagcctgcagcttgaaatctgcctccgtgtcggtggagtggacaatatagttcctcacgatggtggatagcaggacctttagcttcagcatggcgtacttgcggcccacacagcttctgggtccagcgctaaagggaatgaaggagtagtaatgcctgttggccatcctctcgggtaggaagttgtccggatcgaatttggtgggattggggtagatgtctggacgtctgtgcacgcagtactgcagcacgatgaccgtagtgcccttgggaaccgtgtacggaccactggccaacttcaggtcgtagtccagacgcctggcgataagtggtactggtgggtacaacctcaaagtctctaaaattacgcgctccaaatatttcatctccatggtatcggcaaaggtgcaatccctcagcatattatccccgaagatggccttctgttcggcgaagactttagcctggatgtccttgtggattcccatcatgcagagggcgaaactagatcccgccgaggtggtatcgtggccctcaaacataattgtattcacctcatccatgatgtccttctcgttccactcgatatcggggttcttagccatttccaccatggcatctagaagagccaatcgcctcttggcgcccacatcattttcatcgatatcatccagatcatcgcgaagaccctccttcttggaagcgggagtgctggcaacaggtgtagaaatctcctcaacaatcgcacgtgactcctcttggaagttctccttacgatccttgaccaccttgctggtcatacccaagatgatgttcatcatgcgatcgcccttctcgcgaagcttagtaaacttgtagatggaatccaggcggtacagtaatttaacctgcctcttatgtatgatatcacacatgtcgacgacggcttgggcgtattcgaaactcttgttaccctccggaagcttcttcacacccatggcggtagacaacaggatgtcaaccgtggtctgcgacatatagtcatgaacatcaaaggatttgcccgcttctaagcccatcctggcaactaccgcctttgagtgatccacaaatgtaggcacgaagctcttcaagatgctctggtggaaggtgggggcaatcatcttacgatgatgacgccaatgatgtccattgctgatcagtagaccatcaccgaaccagggcttgaagtagcgatactcctccgccttggtcaagtgctggtgcccactcaggatcaactcgatgtcactgggattggttagaaacaccaacaggacgttgcccaaccaggccttcatggtttctccgtacttgttgaggtaacccaagccaacggccaggatctcggcattgctcaagccggcggccacatgagcctgtcccaaaataggcaactccggtggggatggtatattggcaaccatgcggtattcccggctattcctgcgccaatactcgtacaatgccatggccaccagggtgcccactaaggtggttaacataggactgaatcccaggaccgtcgtcgacgaactggacgccgcttgttgcagcgtctcctgaactacttccactgccatggttgctgttgcttctttgctcctgatccctggtcctctggtgcaaatcctttttgtcttctgaagatggcactgttgctatatcagccgccagtgctcaactgtgaatcgccattgaccacatgcaacattttatatggttccaagagttctggggccactggttgaagtcaagcatatgccactttgatttccagtcccactaattagcaaagcaaatcaaagtcacgtactcgcttgcggtgatacctttggaaccaatgcctgcactgcgtcattgtagatccgtataagcagacatgactgcatttcgaagtccgtggttgtctttgattttacgtttggtatagtatattaattaaaatcctttcgtggttccattttaaaaacataaacattgaatcctagtattaggaaacattatttgcactaaataataaaacatttataacactatttgagttcctccattggacgtcagttcgtttaaacacctcaacagcgtaaaattcttttaacgaactttttagttccgtagttctaaaaatagctattttttgcgaaatttgcgacacatttgaatgaaaagtgaatgtgtctactgtctctttcaccaaccctacttcttgcggatgtacgtttgatgccaggatctagaatatgcaaaccagccattggctgttcggctacctgtattttacggcatttacctgctggtgagcggaagtgggtgattcttgcctcgcttcctgacattttaatgatattcctttgttttgctttcgctttttattaaatttggtttcggcgcttttgtcctcgacacctgagcaaaagtatgcaaaaggaaatatcgagtgagtaaacaagagagtatgtaagccacagacaaagaaaaggaagctgtctcttttgtggacctcgtccgcaacatcctccagctcctccatcgttatccgattgtttttataagtgattcttattaccatttatttttatggcattttgattatttgagcgcgtgcgcaaggcatagtaattaaacatataacatttaacgttatactcataggtctatgtttatagga

SEQ ID NO: 7724 - DNA, 1991 bp, DROSOPHILA
gctgatatagcaacagtgccatcttcagaagacaaaaaggatttgcaccagaggaccagggatcaggagcaaagaagcaacagcaaccatggcagtggaagtagttcaggagacgctgcaacaagcggcgtccagttcgtcgacgacggtcctgggattcagtcctatgttaaccaccttagtgggcaccctggtggccatggcattgtacgagtattggcgcaggaatagccgggaataccgcatggttgccaatataccatccccaccggagttgcctattttgggacaggctcatgtggccgccggcttgagcaatgccgagatcctggccgttggcttgggttacctcaacaagtacggagaaaccatgaaggcctggttgggcaacgtcctgttggtgtttctaaccaatcccagtgacatcgagttgatcctgagtgggcaccagcacttgaccaaggcggaggagtatcgctacttcaagccctggttcggtgatggtctactgatcagcaatggacatcattggcgtcatcatcgtaagatgattgcccccaccttccaccagagcatcttgaagagcttcgtgcctacatttgtggatcactcaaaggcggtagttgccaggatgggcttagaagcgggcaaatcctttgatgttcatgactatatgtcgcagaccacggttgacatcctgttgtctaccgccatgggtgtgaagaagcttccggagggtaacaagagtttcgaatacgcccaagccgtcgtcgacatgtgtgatatcatacataagaggcaggttaaattactgtaccgcctggattccatctacaagtttactaagcttcgcgagaagggcgatcgcatgatgaacatcatcttgggtatgaccagcaaggtggtcaaggatcgtaaggagaacttccaagaggagtcacgtgcgattgttgaggagatttctacacctgttgccagcactcccgcttccaagaaggagggtcttcgcgatgatctggatgatatcgatgaaaatgatgtgggcgccaagaggcgattggctcttctagatgccatggtggaaatggctaagaaccccgatatcgagtggaacgagaaggacatcatggatgaggtgaatacaattatgtttgagggccacgataccacctcggcgggatctagtttcgccctctgcatgatgggaatccacaaggacatccaggctaaagtcttcgccgaacagaaggccatcttcggggataatatgctgagggattgcacctttgccgataccatggagatgaaatatttggagcgcgtaattttagagactttgaggttgtacccaccagtaccacttatcgccaggcgtctggactacgacctgaagttggccagtggtccgtacacggttcccaagggcactacggtcatcgtgctgcagtactgcgtgcacagacgtccagacatctaccccaatcccaccaaattcgatccggacaacttcctacccgagaggatggccaacaggcattactactccttcattccctttagcgctggacccagaagctgtgtgggccgcaagtacgccatgctgaagctaaaggtcctgctatccaccatcgtgaggaactatattgtccactccaccgacacggaggcagatttcaagctgcaggctgacatcatcctaaagcttgagaatggattcaatgtctcgttggagaagcgtcagtacgccacggtggcctagaatccagaaatctaggaccccgactacacacacgcaaccccgaacccgaaaccggaatccagccctgtatatagatgatgaataccgatgaatatcccaaaccgaaaacttgatgacgaacttataaatctaaaacaccgaataagaacccaacgcacaagccagccagagagtcaattaatttttctttcgttttttaactcgttacttttatatttgattaatacctttt

SEQ ID NO: 7725 - protein, 556 aa, DROSOPHILA
MAVEVVQETLQQAASSSSTTVLGFSPMLTTLVGTLVAMALYEYWRRNSREYRMVANIPSPPELPILGQAHVAAGLSNAEILAVGLGYLNKYGETMKAWLGNVLLVFLTNPSDIELILSGHQHLTKAEEYRYFKPWFGDGLLISNGHHWRHHRKMIAPTFHQSILKSFVPTFVDHSKAVVARMGLEAGKSFDVHDYMSQTTVDILLSTAMGVKKLPEGNKSFEYAQAVVDMCDIIHKRQVKLLYRLDSIYKFTKLREKGDRMMNIILGMTSKVVKDRKENFQEESRAIVEEISTPVASTPASKKEGLRDDLDDIDENDVGAKRRLALLDAMVEMAKNPDIEWNEKDIMDEVNTIMFEGHDTTSAGSSFALCMMGIHKDIQAKVFAEQKAIFGDNMLRDCTFADTMEMKYLERVILETLRLYPPVPLIARRLDYDLKLASGPYTVPKGTTVIVLQYCVHRRPDIYPNPTKFDPDNFLPERMANRHYYSFIPFSAGPRSCVGRKYAMLKLKVLLSTIVRNYIVHSTDTEADFKLQADIILKLENGFNVSLEKRQYATVA

SEQ ID NO: 7726 - DNA, 12155 bp, DROSOPHILA
catctttccagatcccacgatctccgccggttcctctgttcaagcgtacaaaaataaacgtattctctgcatcgctacaaatcgaatctgaagaattttgttggctttactttaaaaatttctagaaaactaggtatgcgtcctctatgtgtttgcgatcgtatgtgtgtgtgtgtgtgtgttttatttatgcatttaaatatattcgatattgcagtgtagatttaaaattcctgttctaggcctagacaaaaaattgatttaaaatttttactcgagtctcaaatttggattgtatatatggttgattcatttaccctagatcagcgcagatcgaagcttattggggggtatcctagaatacgtacgtaacgacgtttatacgctagctttaaatacaaatcaaatgcttacttttggttaagaaaatgctgttactctaaaacgtcgcagaaaaaaaaaacaaaataataactgccttacttcgaaatgcatataaagttgtaggaaactggaaattgcgtatttaacgtagtatattgattggttatagggaaagagagttgagagcttatataacgacgattacaggggttcaatacagttgtgaagaagtagaagtactgtttattaaggggaggatatgcttaggcgtatctggctgctagggattctgccctgtctgtccttgaggcagtttcagttttgctttctttctaactttactcgacatctaacgattctgattctgattttgggtatactattagctatggctttcccctggattacaatttggagtggggtcacctccgattctttgtcttttgtaatggtttcctttcctttatggttctccagcattcagaagctttcttcttcggggctcttcagcaattgtatggctaatctaaagattccacattttcatttttggtttaaatcgttttcaatggccgatcttcgtctttcccattccattttctgattctccgggatcctgtcttctgattcttcaactattcttcgctctccacgcacacacacacgccgtagcagcagcagacaattccagcttggctctaatcctatcttaactattcactacccacaaatacactcgtcatttgatttcacttcgatccgcctgctcctcagcgcacttggaggcttttcagaaaaccctcgacttggcttggaaacggacctggacgcttggcgtccgccggcgctgctagtaaagctctgtatgatgacgcactggcgccggaatcttggacatgcccctctctcgcctgggcgataccacgctggccgatccagcagctgctccggatccagctccagcatttgaattgttactttcgcaggaactggcggcggaactgcgcttggaacgcgccttggctggcggagaacagctctccgaacgctccagattgccattgctgtgcacccaggccgtagtgaagtcctcgtagaccggtgtctttttcccattgctgttgatcttattcgctgctgttgccgttgctccaactcctgcctttgtttgattaccagccgcatagcgtgagagtagtgacttcatcttctccaaaatttgggcatcgttcttggcactgctggccgcctccaggagttgttgggcaagtggcgaggaggcgtgattcttaacgggcgacgtggttagcgaactggtgcatcccggtgcaccgctcctcacccggcgtccgttgctgtcgtagagaatttgcgatgagcgtcctttgccattgcgctcgaaggatccagctggtcctgttccatttgtgggtgccacaaaggtatcggcggtgcagggaggtcttcgctttggtgctcccgtggttcggccgctccacgtattcgtgacatcacgcaccataggcaattgggtggcttgacgggatcggggaggtgccaccggcgttgtagtggctccggttgagttgcgagttcgaacggatcgataaaccggttgtttgcggctaaaagctggagccggtagaccagaccggctgctcaaatcctgtagacttccgccagcaccgccacacgtactattatcgatgcttcggcgacgacgctgcgccaatggagagcgtggaatcttgctgagattgggtgttggatttcccattgtgttagccaccgactgatcctcggtcttggctatgtccacggtgatttcgtcgtcggttataaagacaccggattgctcaaatttgtcgcttagcttatgggctccgctgagaattgccggcagcgattgtgggccatcgcacaccgagtagtcctcttggtcctcctctcgatcttggccatttagatcctcctcttctagaatgtccgtggtggccttctccgccggctcatcagagggcgagatttgcgagtcacttgaagtctgatccagacgcgctagaaaatgacaatggcattgggtgagattatcaaaaatcaaagcgaaatttagaaactcaccattgctttcagcgtcctcaatggaagcctgactatgcagggactctcgtttttgggctcccgattggatgactcccagactgcggtatccttcgtcactgatctcactgccattatcgctgatgttctcgaatttgttggcgccaccctgttcgcccgcgactcccgatccagcggatcctgagctgacacctccagccgccgatccgacaccagatccaccgtttgcctcctccatggagcaactgtagccgggcagcgatttcggaccactactgtacgaatccaaggagctctgtttcttgcgcatatcgattagtcgacgtggacttggtgacatggagcgtctggccaagctgggcgatccgagcagctgaccgctggaggtgtctgtggtgactgtctgactggatcccgtcgcggatgcaatgcctcctccgttggcctgctggttgaggaacttgcgctgtggtgttggactgcgactgcggtattttcccgaattcggcgacagactgtgaccgttctgtaaagttggaggcacggccacgcccacaactcccgttccacacgatgatcctgttccgggtccaccattgcaattgggactgttgaaaacacgtcgagctgctggcggtgacctagaaacaaagatatcgaaaaatattgataaatttaagacagtccggcgattttaccagaaaccaagaatacaaatatcatagaatctattaaaaagttataaaaagaaaaggactcacctctcgaatatcacctgcgccttgtggagctcgatgccgttgctcgggttgtgattcggcgactgacggggaatgaggcgagctgccacggagctgcgatgttgggcacggcagcggcacggatcgtgcttgtccagatagtgggatagtgtgtcccatccgccaccgacgcgcaccatcacgtgggaacgaaggatctaaaagtagaagttcatacgttgaacttagaacgacaagttttggcattcaatacttacccgcacaaagatgagaactttggtgtcgccaatacgatacttgccctccgacactctgaccatgggaaattgtgaggggcatgtgcacttctccacaagatctctgacctgtaaatgcaacgaaacgtgtgagaatataaacaagttcctttgaaaatatcagcgatcaccaataataactatacaacttattgaatatacgctttaaatgcaattgattacagagcttttcgtcataatagtccattgccagctaaatacgtttcaacaaatgaccatatatatgagtaatgatgacaggtattgtaattgaaattaattgagctaattagcatttatcatttatcactacgtatcaagtgaaatgagtgtgaaccaaatatgtaaagcaaccaaaaggcgagatgaaaatgttctcagtggcactgtaccaactgcccgagatcagcagacgaagaaaaactcttgaatccaagtgtccaatccgcggacccacctccccaccaccctcgtcgattgacccttagcattgcataagcctgacccgatcagttccccgacttcctaactccctgacttctgcagtggcagtttgctgcagttgcagtttgcccaaaaaaaaaagggaagagtggaggagatgcagaaggagcagagcgacgagcatcggggtcaccaaatagtttttcactgcataaattcacgcgctgccattgtccaacaaacaaatgatccgcaggggcggcgagtcgagagagtggcggggttacgagggattccaaagggggctacccttgccctagggagccatgggatccatggcaagacaagtcaacattggctccaccatcagcagtacacgtcccagcgggcggcggcagacaaacaaatgacgacttggcctggcctgtctttgggtctgattctccactggccgaaattcgagtataatttgcgattgaaaatatctagatggttgcttggatcttcgaagatcaaaaggtgggcccaatttgtaccatctaaacataattttttatggtaaatataggcaacacgcttatggtgaaaaattcttctgcaaatatttgtatgtttctcatggcttgcagtgtattttggtttcttgccctggctgcaaccccacctccatttccatccagacttctttgccagcagctcggtatgcccgaccgactgtgagtcgaacccattgctactgtagtttgtggccgcttggagctgagcagcaacgcattggcacctttgaacttttgcaactccttcttggatgggatgcgtgcttaggtggagctggagctggagatggagctgctactctaacttcaactccaacagcaactccatggtggctccaagctggaaccgacatgacaataaatctttctactggtggggcggtggaaggtgggccaaagcaatccagccagcgatccgccagcgatctgccagagatcggggatcggcgtgactctgacgcatacgagattagctggccatggattgcgatggggatagcgatgtgatcctggcctaaccataaatcgcatgccaccaactaaccaacagcaactggagaccaaaacagacagacagtggcgatgcggacgtgccagcagctccaaagctccacagctctacagctccacagctccagacttttggagtcgacaaatgatcgtggctttttcttttcttttcttttcatttctttttgtttcgtttctgctgttggtggcacatcatttgattttcgacaagttgttgaggctatttgctgatttggctgctgctgttgctgctgctgctgctgctgctgcacaaattgattggctgcctcggagtggattttagctggagatggaagacggtgcgatggcggaggagaggtccatgtccatgtccaggtccatgtcccatccatccagcgaccatccatcccccagctgtcgaacattgttgctgctgctgctgctgttgctcatgttgctgcttttgctcatgttgctgttgtcaatgttgctggcggcgtgaggaaatgtttgcatggctttcattagtttggccgtcaatgattttccattgcgcctgaccaatccgcatcctttgttggctggtgctcactgctgtcgtcgtcacacttgcaattacattgacaattgcaattgttgtaattgttgttggcacatcgtcttgtcaaattaatttgacatctcaacatggcagcaggcaaatcggggaaaccctcataacaccacatcaaacagaaaaaaggtggacaaaaatataaccaaagttccagttccaattgcttctgatttgttttggtattgttttcggcgtgtgtttttttttttgtattttttatttttcgtaactggaaacttagccatggctaaaaatggacatgagaaaactagcaacacaacaacagcgcagcctaagcaaaacaataacaaacaaaatcgtgagctgagcccgctcagtaaaaaaaagtaaatagaaaacaaaaaaaaaaaacaaccgaaatataaaagagaaacccaaaagtggacattgggagtgggactgggacaccaaaggaacgggaacggaaagccctgcgggaaaatggaaaaccaaaagcggaaagatctgatactgaacaccaaaaagttggctggccgaatgggtctcacttatttgcaagaattcagttcaattccaaccaacttaaatgaaaatatttaaaaatatcaatgggttaatcgtttcgcttcactcaccatttcgtcgaggctcttcagatcattggtgattatctggggctgtggtccgtacatcagcacgggattctggtcgccatcatcctcggtctccgaatcgtcgctgtcatcatatagatccgtttccactgtggtcgtcgttattgtcgtcattgtggcggcactactatttccggtctccagtgcatccgtttgggtgccattttccgagcagccagctccattggccttgatgtccgcggcgatctcccgatcgatttgtcgctccatttgcaccagcatgggagccaacattcctagtggcagagtaatcgaatagaatagttttaatattataataatatacatatatgtatatacatttaatagaggcattggctatggatacttaccaaacttggctccccgacgtgccacctccagaaggcacaggatcacatgcttctcgtttttgcgcatgatcagatcgtccgtttcgaacagcaggcactcgatgatctttaggctctttctgcaagcattgcgttagataagatataagattaccaagaattaagattaagatatggtttgaacccacctgcaccaggttataaagttggaaacattgtcgcgggcaaagaaggtgccactcttggctgccggaaggtagtggacattgcccatggccagaatgggacccgccaggcccgaggtcatcgagcgggtcatcgatttgttgcgggcctgtcgccgtgccagataatccacagccgcctgtctcacataatttgcgtgctgcaaaataaagaaaaacaaaaacgaacgaacgatgtagagacattagcatttgcaatgagatgatgcagaaattcccaatgagcacggcaaataattcgccgagtagtgcgtgtgcgagtgaaagtcaaaaatacaaaactagaaaacgttttatttttaagctccttaggaatttagcacggcatttttaggctgccacccctttccccccttcccccctttgaatttcccgagatcttggccaacacatttgctacctgcaatgggcgttgaacgatcaacgttgttgccgcgacaatgctatctatgtatctatttgcgttcttctgcggtaattcgcctgtttgtttacatcctggaacatccaactgcatcctaaaaccatgtgaaacttaatgtttcgaatacatttcgttgctcatgcgcgcccacatatttagtaattcccgctattatttgccattggcacatttgacgtttggggtgttatgtcatccgcaatccccgagttccctgggccaaaacgaaaaaaaaaaaacaaaaaaaaaacttaacaaaaattaagctccaatcccattcggggcgaaaacaacaactgcaatcgtgtctcgacgtgtcatgcatttccatttgcatcattccatattcatttatgcacactttgttgtaataatttaatatttaaacaatattattatgatatctgcttcttccaccgcctctctgcttttatggatatctgacaaatgctttatttggtgtttattgtttcaccttaccataataccctaacccaaataagggcaacagaaactgcaacgaatgcggtgacgatgatgacgctccgctgacgtttgcaagcaattagatacatacatatgtatataaaaacatatgtacataggtacgtgcatctcaaggaaagccagagaagattaaattgagatcgtaaactaattactaatatgcatatcaacagttgcaaatattctacgctttaagcctattgtataatcaagttaaggaaactcatttaatacaattgccagatctacttattaagtgttcttatcttatgcggaaagagcgttaaccaagtcggtctgattgccacgctgacttttcttttcggcatttgcctcttcggcttcttcttttcttctcctctttggctcttatcatgccgctcgcaaggtaaagctgcaacgcccacaacccatttcggcaacccagaggcgttaaatgcatctctcctcgtctcaccccgtctctttcccacatcgccatctcgctctctctctctctcgctctccttgaacagatgcgctacccacgaagtttgtttgggccttggtttcactttggccgccagcttagaaccgaggcttcaacacagatacagtcaggtgcaaaaaaatagtgtctcttgcattacataagaagttaacatggtaaacattaaatgctctgatcgtttagttcccatcttagttctagaaaatagaataacttctagaatatacataactttgtttaacttgatttgttaacttgattttggaccattgtttcggttatatattgtactttgaagaccttatatcttagtcaccactgttggtgtctatatgtgcaagtgagtgtttgctgcagcaccactccaatgtttgtttggcttcttcctcttctgaatccgaatctgaatctgaatccgtatctgctgaatctgaataatgcatgcagagtggcgcgcgacagagacggacgcacatgcatatttgataatcgcagcatcacattttcactttcgaaattcgacagttgactgaggtaggcattggaagacgggggtggaccgttgtgaaaaatggaaattgttattatgacatcaaaactttcttgcatcaacaacgacggagacgggcacgtgccacttgttgttggtattgtttcactttacaccgtcgatggagcaagtgcaagtgcagttcgctgttgataaatcgatattggggacaccggaaaaaataaatcaactgccagctatcttatctgatatatgggtagtaaaaaagaaaactaactaattcgattggtagctatctataacttgggtcaccaaatagaatcatttatgtatatgttttccacactggatttcctcttcaggcattaagttctataccatcaaaggctggggtcaccaaccgcagtattttcttaaatccttctcagtgtctttgtgtgtgtgtgtgggttttaattcaggcataaaaattaaaggtgtaaatgcatcaaactttgttttcttatatccatctaacccagtgaactactgtctgacaaacacatccgcagccacatccgcatccgcatccgcctccgcctcttgagagtcaagtgtcgaagcaattaacatgactcttcttctagttctacacttagtcttcttatccatatggttcccggttcttctcttgttttcatttttctattcccctccccacccccctgggaatagaactttgagtgcgaaagagatggaaagtgggtcgacctgtaccgtccaccgcctaccgcccacgacactcaatctggccacgcccccttcatattgcaaatacgtgacggtgatgcggtgcaagaacgagaagaagaagacagctaggagacagaagactaactacagtgaaccttccatttaacaaccatggactattattaattaattaaattaattaaccgttgagtgcattgtataatacattctgttcctctacaccttttgctcgccccctatagtggtttcacttaacgcgactttgaaatggggaagttcgttcaagttatggatgttcgactgtaaatggtgtgtgcgaaaaaaaaagagagggcgttattacaggtacgtaacgtcacgtaattagcttagatttttctctatttttcgctgtgcttttgcctgtgcacaaaatgtatgtcaatatggcgttaataacattacatgactactacttaaagctattgcaacaaaaaaaaaaagaaataaactgcaacaacagaaataaactctgtcgcattatttgtaccgtaacattcgacgacgtaagcgacggcagagcaacgcagccagtgcgaaaagcattttttgcttccgcaaaaggcaaattaaataaaacaaaattaaagcgcacaaaaaagcagcagcagcagcagcagcagccaaataataaataaaatgacatcgcaaaaaattcagttgaaaaaaaaaacagtggagccaataaggcactaaactcttaaaaaatcatcgaatgttgtgcattaatttgtatcaatcaaagatcagcgatgaattataacttcaattatatatatttatatttatattgatataattactgggatgttcaattggaatattagtaatatatatttttatacggctgggtggtatttataatacgatgctcactgtaccccaaacaatagttgattttttgtgcaattacacagacgcatttgtgattccttcggagtgccaaagtgcgggggaagtttgctaagcggatttgccgcgccgtttcaactgttattttgttatttgccagtttgttattaatattttgtatatattttttttcttgattttgtcgctgattgccgtcgattggccccacaaaaaaaaaaacaaaaaacacgcacacaataaaccgcaaactgggagctcaatcaaaatcacaaaactgtccgcgacccattcaaaatcatatttcaaacgccgttccatcggcggctttgttgtctctttgggttcaaggttctctcatggcgatgacttcctacccacaattcgtatatggcttatatggctttggcaatgatagatcgaatccatcggatcgatcgattcgcttgcaaatgatttctgcacaacggagcgtacaggtaaaacagctaacagctaacaatgatcgatcatctatcgatctcctcaccgagattcaaacactgactccagctcacctgctcggtggtcttttgatcttgctaacggtatttccataatgcccatagaaggcgttcttttctaccttttttgtttcgttttttttttttttttttttttgctttactgggcccaaagtttattgctctgtgtgtttgtgtgggaaaaactttaagtgaccctgacgattggcaatttcgatagagctatgcagaatcgatgagatcactgagaattggcgatttccgattacgattgcaagaagcatatcaaaataaaaaaaaaaccaaatttaaagcttcgacttccgcttgacttgaagccaaatggtactgttaactggaaatgacagtaatggatatttaatagcaacaagtgtgtgctctcgaaatttgagtagcttcaatccaattaaccgaataactgcgggtattgtttgcctttttgcaaccatatgttaagacaatcgtgtattagttttcaccgatttcacaggaaaaaaatatttcctcaggcttctgaatagcacacaataacatatctttcgcagtgcctttgtttttaattacagcaaaatgtacacggccgtcttttaattggttttaattatttgtgaaattttaaaaatcataaaactaagcaaaaacaaacgttaataacttgttatttcgttgtgaatatatatatatattttttttggtcagtccaattaccccaagtttggctaaatatcttcaaaattagctgagagatttccttaaatggaccccaaaacgatcgggttgttaatggccaagttaaattagggtaattcttaataaggtcagttaatgcttctgaatgaaatgaaaaatgtatttacgattctagggttcagagacattggaagaaacgaaacgaaacgaaatggggcaacaacacagctaactagatgggcatttggatacggcgaaaactggcagaattcgatgccaaaactcccctgaacagaaaacaaagaaaaaactaaaccaaaccgaactggtttacgttgctgttgccggtcaaagccaaaacg

SEQ ID NO: 7727 - DNA, 3496 bp, DROSOPHILA
atggaaataccgttagcaagatcaaaagaccaccgagcagctgtcttcttcttctcgttcttgcaccgcatcaccgtcacgtatttgcaatatgaagggggcgtggccagattgagtgtcgtgggcgaaagttttgatgtcataataacaatttccatttttcacaacggtccacccccgtcttccaatgcctacctcagtcaactgtcgaatttcgaaagtgaaaatgtgatgctgcgattatcaaatatgcatcacgcaaattatgtgagacaggcggctgtggattatctggcacggcgacaggcccgcaacaaatcgatgacccgctcgatgacctcgggcctggcgggtcccattctggccatgggcaatgtccactaccttccggcagccaagagtggcaccttctttgcccgcgacaatgtttccaactttataacctggtgcagaaagagcctaaagatcatcgagtgcctgctgttcgaaacggacgatctgatcatgcgcaaaaacgagaagcatgtgatcctgtgccttctggaggtggcacgtcggggagccaagtttggaatgttggctcccatgctggtgcaaatggagcgacaaatcgatcgggagatcgccgcggacatcaaggccaatggagctggctgctcggaaaatggcacccaaacggatgcactggagaccggaaatagtagtgccgccacaatgacgacaataacgacgaccacagtggaaacggatctatatgatgacagcgacgattcggagaccgaggatgatggcgaccagaatcccgtgctgatgtacggaccacagccccagataatcaccaatgatctgaagagcctcgacgaaatggtcagagatcttgtggagaagtgcacatgcccctcacaatttcccatggtcagagtgtcggagggcaagtatcgtattggcgacaccaaagttctcatctttgtgcggatccttcgttcccacgtgatggtgcgcgtcggtggcggatgggacacactatcccactatctggacaagcacgatccgtgccgctgccgtgcccaacatcgcagctccgtggcagctcgcctcattccccgtcagtcgccgaatcacaacccgagcaacggcatcgagctccacaaggcgcaggtgatattcgagaggtcaccgccagcagctcgacgtgttttcaacagtcccaattgcaatggtggacccggaacaggatcatcgtgtggaacgggagttgtgggcgtggccgtgcctccaactttacagaacggtcacagtctgtcgccgaattcgggaaaataccgcagtcgcagtccaacaccacagcgcaagttcctcaaccagcaggccaacggaggaggcattgcatccgcgacgggatccagtcagacagtcaccacagacacctccagcggtcagctgctcggatcgcccagcttggccagacgctccatgtcaccaagtccacgtcgactaatcgatatgcgcaagaaacagagctccttggattcgtacagtagtggtccgaaatcgctgcccggctacagttgctccatggaggaggcaaacggtggatctggtgtcggatcggcggctggaggtgtcagctcaggatccgctggatcgggagtcgcgggcgaacagggtggcgccaacaaattcgagaacatcagcgataatggcagtgagatcagtgacgaaggataccgcagtctgggagtcatccaatcgggagcccaaaaacgagagtccctgcatagtcaggcttccattgaggacgctgaaagcaatgcgcgtctggatcagacttcaagtgactcgcaaatctcgccctctgatgagccggcggagaaggccaccacggacattctagaagaggaggatctaaatggccaagatcgagaggaggaccaagaggactactcggtgtgcgatggcccacaatcgctgccggcaattctcagcggagcccataagctaagcgacaaatttgagcaatccggtgtctttataaccgacgacgaaatcaccgtggacatagccaagaccgaggatcagtcggtggctaacacaatgggaaatccaacacccaatctcagcaagattccacgctctccattggcgcagcgtcgtcgccgaagcatcgataatagtacgtgtggcggtgctggcggaagtctacaggatttgagcagccggtctggtctaccggctccagcttttagccgcaaacaaccggtttatcgatccgttcgaactcgcaactcaaccggagccactacaacgccggtggcacctccccgatcccgtcaagccacccaattgcctatggtgcgtgatgtcacgaatacgtggagcggccgaaccacgggagcaccaaagcgaagacctccctgcaccgccgatacctttgtggcacccacaaatggaacaggaccagctggatccttcgagcgcaatggcaaaggacgctcatcgcaaattctctacgacagcaacggacgccgggtgaggagcggtgcaccgggatgcaccagttcgctaaccacgtcgcccgttaagaatcacgcctcctcgccacttgcccaacaactcctggaggcggccagcagtgccaagaacgatgcccaaattttggagaagatgaagtcactactctcacgctatgcggctggtaatcaaacaaaggcaggagttggagcaacggcaacagcagcgaataagatcaacagcaatgggaaaaagacaccggtctacgaggacttcactacggcctgggtgcacagcaatggcaatctggagcgttcggagagctgttctccgccagccaaggcgcgttccaagcgcagttccgccgccagttcctgcgaaagtaacaattcaaatgctggagctggatccggagcagctgctggatcggccagcgtggtatcgcccaggcgagagaggggcatgtccaagattccggcgccagtgcgtcatcatacagagctttactagcagcgccggcggacgccaagcgtccaggtccgtttccaagccaagtcgagggttttctgaaaagcctccaagtgcgctgaggagcaggcggatcgaagtgaaatcaaatgacgagtgtatttgtgggtagtgaatagttaagataggattagagccaagctggaattgtctgctgctgctacggcgtgtgtgtgtgcgtggagagcgaagaatagttgaagaatcagaagacaggatcccggagaatcagaaaatggaatgggaaagacgaagatcggccattgaaaacgatttaaaccaaaaatgaaaatgtggaatctttagattagccatacaattgctgaagagccccgaagaagaaagcttctgaatgctggagaaccataaaggaaaggaaaccattacaaaagacaaagaatcggaggtgaccccactccaaattgtaatccaggggaaagccatagctaatagtata

SEQ ID NO: 7728 - protein, 1006 aa, DROSOPHILA
MEIPLARSKDHRAAVFFFSFLHRITVTYLQYEGGVARLSVVGESFDVIITISIFHNGPPPSSNAYLSQLSNFESENVMLRLSNMHHANYVRQAAVDYLARRQARNKSMTRSMTSGLAGPILAMGNVHYLPAAKSGTFFARDNVSNFITWCRKSLKIIECLLFETDDLIMRKNEKHVILCLLEVARRGAKFGMLAPMLVQMERQIDREIAADIKANGAGCSENGTQTDALETGNSSAATMTTITTTTVETDLYDDSDDSETEDDGDQNPVLMYGPQPQIITNDLKSLDEMVRDLVEKCTCPSQFPMVRVSEGKYRIGDTKVLIFVRILRSHVMVRVGGGWDTLSHYLDKHDPCRCRAQHRSSVAARLIPRQSPNHNPSNGIELHKAQVIFERSPPAARRVFNSPNCNGGPGTGSSCGTGVVGVAVPPTLQNGHSLSPNSGKYRSRSPTPQRKFLNQQANGGGIASATGSSQTVTTDTSSGQLLGSPSLARRSMSPSPRRLIDMRKKQSSLDSYSSGPKSLPGYSCSMEEANGGSGVGSAAGGVSSGSAGSGVAGEQGGANKFENISDNGSEISDEGYRSLGVIQSGAQKRESLHSQASIEDAESNARLDQTSSDSQISPSDEPAEKATTDILEEEDLNGQDREEDQEDYSVCDGPQSLPAILSGAHKLSDKFEQSGVFITDDEITVDIAKTEDQSVANTMGNPTPNLSKIPRSPLAQRRRRSIDNSTCGGAGGSLQDLSSRSGLPAPAFSRKQPVYRSVRTRNSTGATTTPVAPPRSRQATQLPMVRDVTNTWSGRTTGAPKRRPPCTADTFVAPTNGTGPAGSFERNGKGRSSQILYDSNGRRVRSGAPGCTSSLTTSPVKNHASSPLAQQLLEAASSAKNDAQILEKMKSLLSRYAAGNQTKAGVGATATAANKINSNGKKTPVYEDFTTAWVHSNGNLERSESCSPPAKARSKRSSAASSCESNNSNAGAGSGAAAGSASVVSPRRERGMSKIPAPVRHHTELY

SEQ ID NO: 7729 - DNA, 11273 bp, DROSOPHILA
tccagtcagaaatgaattcttttcttctttagcaacatggacaaacagaaaaacactctcattgaggcgctaagcaagaagggcattgctgtggcaaagctggctgtattagacgactgtatcaaggatagcctggctgagatcaacgagctgtataccgagattatcaagttcgtggacgccaacgactccaaggccatccagttcgctctgtggcacgcctatgcccatggccactacggtcgcatgtacaagtatgtggttaagctaatcgaggagaagcgaacccgcgatcacttcgtggagctggccgccatcaacggcgccctgggtcacgagcacatccgtactgtcatcaaccgtatgatgatcactgcctttcccagcagcttccgtttgttctgagcactttccgacagaatacgcaacaaatattcacgcttcgaagcgatcattgttttgtataactaatgtaatccatatgtatatgaataaatgctattaactgaaattcaatattgttagtcatttcattaaaactaaattattaaatttaactaagattaatgatcgattgattttccggtaagaaaaaaggaaatgagaattgaacaattttattaaggagtgaattttaaaatcccgccaaaccgttacgatgttgaacatagcattttccagcactggtgcctggtaattgagccgactccgcgtgacggtcatacttattgcagcaaaaaaacaaaaaacaatgcagacgcacacgagagtgtaaaatgggtaagtttgacagaaaaagagctgtttaaaactggaaaattgtcttattgtgcggctaataatatgaactcgtgggtgacatgtgaaaagtgcaagaataacgacttccaactgcagtttcctgctacgtagttgcgatgaggcttccgcctgcgtgtgcaagtgtgtgtgtgcgtgtatgtattggccgatcgattttattttgcatattcaaggacagcgaagtcctgcgggaaagtgcggccgggattagaggaaacgggaatcggggcggcgccggaaactagagcgagctcccgttcccaagccgaatgactcagtaatcgcccatgaaatccccggaacgatatcagcttacaatctgtgtacatgcatttgttgcttaagttccaccccgcatcccagtcccgctttcactcccactccaacctaccccttgcccacccactgtgtcaactccggagaggacaaacaatggccccttgcagccggatgacaaatgcgggtgcagcgacatcaagaaagaaccttcgaatttggtgacgcgactatcagatactcttactttcttcgtttgcctatgaagttcattatcatttttgtgtcattaaagcgatttataattagatcaatcagactaattcaacgtattgtgacttataaatcagtataacctatgaaagtttttttaaccacccattaatttctggttaggattcaattgaagtggcgcgtctaattagatagacctaatagcacgaaagttgttttctttaatcattaaacttccgaaaacctcaccttcaagaggaggaattggatgagggttgtatacattttatgagagagtgtagggtataaaataaggcaatcggaattctgtgtcaatgtgctcacgtactcctgtgtgagatgatggtggggagggtgcggggacggtggcagaacttttgggtattcaggagatgtgtgtgttttattttatcatattcaaaaaaccatctgcgttggcggatcgatcgttaaagaagttatttattgcatagggtattccctctactcgctcttcacttcaaagataaggtcccccgagatttggtcttgtgcggtcgcttatatagatctgtataatatatacccacgatcttaatgtgtttatttttgtacattcccccgttccagagtatccacaaattgatttatacgaattcctcactgagtccgaactgcagcagtactacaatgccgtcaagtgagtgacccaaaaagcggaagcacttcccccctgtcttcaaccgaactaactcattatactttttactccccgcagaaacgaattgaaaataacgaacgcggcccaatttaagtatgcagcggacgaggatttgcgtttcatcggactctcgcgcccggaaatccggaggctgcgtaagttctacgagaagcattttccccacagctacctcagcaagatcaagcgtctgctgcaggcgcctggcactatggttaagcgggaagaggcgcccggcggcggaagtcaggtggcgctggatggcagtagtgcctctgcatgctcctctctggccgccaagaacggagccagttctccgagcaaggtgcccaacaacaagcacattataccggcggactccattagtgtaaacaaacagttgggaaccggcgaatttgggatcgtccaacagggagtctggtccaatggcaacgaacgggtgagttcagatcagttttgaccaacttcaaaattgttatcgttcatctttggcagatccaagtggctattaagtgcctgtgccgagagcgcatgcagtcaaatcccatggagttccttaaggaagcggccatcatgcattccatcgagcacgagaatatcgtgcgcctatatggcgttgtcctggccactgactcgctcatgctggtcactgagctcgcccatctgagatcactgttggaatgtctcaaggattcgggactgcgagtcagtttcctcaccatacccacgctctgtgagttcgccctacagatctgcaatggaatgcgctatttggaacagaagcgcctcatccacagagaccttgcggcgcgaaatattttagtgttcagcaaggacaaggtcaagatctccgactttggcctgtcgcgggcactgggcgtgggcaaggactactacaagaccaatttcaacgtgaatttaaagctgccgatcgcatggtgtgcgcccgagtgtatcaattatctgcgctttaccaacgcctcagatgtgtgggcctttggagtttgcctgtgggaaatgttctcctacggctttcagccctgggcggcacttaccggcttgcagatactcgaggccattgatgcacccaactaccagcggcttgaacagcccgactgctgtcccagcgagtattatacattaatgatgaagtgctggcaggatgacgctgccaagcgaccgcgcttcggtgaaatctatgaccaactgcccgatatgaagccagagcagcttaaagctgtagtgaattgcacagaacccaaaaaggaccatctactttatcgccagggcgatattattagcgttctagaccgcaatacgggcacacccttctggaaaggagtgcttagcactggcaaaacaggctacttcaacccctccaacactgtggcattcctcgaaggtctgcccagctccactcgtgattcattcagccgggtgagtgaccacagaatcagcaaacgcaagctgcgcactgagatgatatcgaagccacagaacgacttcaagcacaccggccacgtaggtattgacggagcaacatttggagacatcgcattcctgggaagttcgcagaatgtgagtcctttagtccactaatattactaatattgctaatatgtaattgcttattatttgtttcagtacaatcacgtacccaaacagatagtgacgccctataaaccctcggaggacattgaacaaacacctctcctactgccgcccacgcccactagtcctgactctcttcagactgccagcgggtatttcccagagggtgccaacagcggaggcgccatgggcacctccatgaaccccaccttcattccatccgctgaacacacgcccaagctgatagctaccaatggccagagttcattcgactttgccagcgggtctacaaatccgttttttcctaacagaggagacgatgaactggagtttggcttgcacaactatggtgcggatgggaaaagtgtccattcggagacgggctggcgccccacctctcgaagtattgtagatgatcctcatgaataccacgagatatcagatgatgaaatagcggctgacaagctggactttgggccctcgctgctggacgagattaactcgatgtttggatcgataagcgctgctacaggcagtcatcccaagtcacccggatttgatcatgtgaacaataaaaatgagattacggaaatgtccgccaaattgggtcaaaaaagtggtgacaccaatggtaataaacatggccatggactgctgcccacgctctcgaaaaagaaatcgtcgggaactgtgaaacctatttctgtgaaggatgaaaagattctcaaccatgccatcgagatagccaacgaaattagtgctaggtaagttggacaccttaagtatttgttaaataagctgtaattaaaatgtttttttgttttaggtcgatgattgatctggtctctgatcagacacctgtcatccacagtcctaagcgcaaatttagttttaggtttccgcacttgagtaataatggaagcggcgacaagtctggcggattaggaaccagcggctctgcccacacgcccacccatggcaatgcttcgccttttcccaagaaaaagaatttcaccgaggaactgcagagcattccggatatacaggtgagccctttaaagagtgcaatcagtttagttacccagtactgctatgccaccgatctccggttctaaaatggattctaatccttgagttttgtctatactttgctctttctccttcacatacatcgttgccctttcatttcccccttttgcgtttgcgtttggcattttgttttggttgtttttctcgttttgctcctccattgaatcgagcagcgtttccgctcgctgagcgaaatcaaaaacagcaccgatctacgtgtacccatctttgacaaggagagctccgattttctatttcaaaagtcgcgcgagatccttagcaggccattgaatctggaacgtgagtgcggggatgaacagccgccgaagagtattgacgacaatatcatggacattgaaaacacactgaaagcgctcaacttggactttatgcacacctacacagagttagataaaagcgactccaacgacacgatcctcaacgaccagctgccgcacatggccagtctggacgacgggatcagcagtgctaccggaagcctaaagtcagcggtgtacagctacagcaacggtgtgcaaaccatgttcgattttaatgcggcaaccagtcacctggacaagcacctccagtacatgcataaccaggcccagctaagcgccgctgcccccgtcgatcccaagcctatggatgacaaacggtcgagcactccagacacgggattcgcatcgcgcgacactaacatctcgttgtctcgtcgtagcagtcaaaagtccagctatagtcctcaggaaagttttcattttcctttgaagggcgagcccctgtttagcgcaccaccagtggttatgtcaggaggatatgccagcctcaaggatgagctcggttacgagagattcggaaacggagccaccaagcagatgctggccagcgcctcgcccattaagtccggagtgggcttgaatgctagcagtggctctgtttatatgggatccaagggctaccgccagcgttcaacatcattcaatgagagcttccatcccatttcaccggttctctctgaaccgccccagcgggagaggggcgtgatccagcgacaagtgaggttggagcaacagcagcctttgccacgacgctccgcatcgtataagccccgttcgatcagagctcgcactctaaggcgattaagttacaatccaatgaccctggactcgagttcatccagcggcgaggagcctgtcaagccaagcctggcccgttccgagtgcgacatccgtgccagagtggcggccagctcgaattcgtcgttgggcagacggcgccgggcgggaatgaatcgtcaggtgcagtccgcatgccacgacgaacgtgaggttatcatatctcctcgacaaatgtacggatccaattcgagcatcaaatcggcgccgcactataatattggagggcaaagacgcagctttcacagaggaggacctggtgttatgggtggcggctatgagcagttccaatacgacgagcgcatttacgattttggaggtcgtggtccgggcaataactacaacatggcccaagcgagttatttgagctctagtcaaaagcccagttaccttttaaatggatccgaattgcccggatccgggtcgggttcgtcttcagctgcttcgtcggcagtgcaggccacctacaggccaggagcaggaacctctgtacagcgaccaatgagcggtggtgctgctctgcacgagttcgacattagtcgtctgacgggaaagagtcccacttccaccaacttcgtgggaagttcgcccgaagaactgaaacagcgccagctttctgtgggctcccttcagacgccaaataacaaggtagcgaagccccagcgacccacggaattccactggccggagaagatacatgcatcggcggtaaagcagcacgagatgcactggcgacaggtgcaccagcagcagtcgctgcccacagcatcgattatcacagcagcggttggtggagcagtttcagcccgaagatctagtgatagctcttcctcgtcgagcaccgagagcggggatgagttccagtttcggcgcgagtttgtggcgccgcgaattccgcccagtccggctccataactaaggaaaatgctgaaatacgttctcaatttactgtttggcaatgtgatgtccgattaaggcgatggcgatgaggagatggagagatgcgaattgaatacggcaagtcgtggtcacgaatggatgctccgcaaggagcttggcgatgttgtgtttgtgctactgtctgtgtgtgaggaagggagcgtagagtgttggcgtcgaagagtaaattgtagaagtatttacagcgaatagattatatattttttggatttgaattttttgaagcgagatgagagtgtgccttataggaaaacaccgaagacctctcagaacagataataatgatgtgcagatcagctgcataccttccaaacttccattacatcatctatcacatggttcatcatcaccaacggctaaactcttttgtatcaataaaagcggtgttctttttccagttcgataaagtatgtgaaaatatagtggtctgtaattagatttggacttctgaaactaattgtaaaacgccccaattcatcaaattctatctaatttgaaaaagataacaccgcgaaagttttctccgcaatttctcaaacagaaaataaattaatagccttacgtcaatataccaaacgtttcttcaacttttcactacaaactagcatatataacaaagataatggcttccaaacggaatagaaaatgttcaagaattttataaaatgaaacccaacaagagcttggttgtcgaaaacagtattgcaaggcacacgaaaaaaacacataacacctacactttttgaggggaatccaactagacagggtattacctattgccgatgagagctgagtccttagagcccacggtagttataagtcacacacagacactgaaaacaactagacagacagacagtcacccacacaaaactgttgacaatcctcacaacttgtccacatccaaagacattcgtcggagcaagaatcccgtacggattatgtgccatatcctgacgcttgcattttttatgaaaccaaagctaaagcgaaaccaaaagcaaaaaccaaaaacaaaaccaaacaagttagacgataccgaaaccaagagaagcatttacgctcactttaactagagtgtcgaaccctaagtatcttttaagattgaagatattgaagagtcaagtattggcatactaaccaaaatgaaaccgaaagcaaaactaaaataaccttcaattgaattgccgacggctgcaagggtcgaacgtttttgataacctcactaagaatatattatatgaattaaacttactaaaagattttcgcattctatgcatttatgaataacattaaaatgagaatattatatacagattatatatacacctacctaaatctaaatcaacctaattatatgtatacaaatatttagtacgaaaatcgtaatgtaagcattgcgaaacatgatattctaaactatgcgtttgaagcgtttcaacccagagaacattaaactaaaattaaaaaccaaaatttactcgagtattatacaagaaaccccaaaagtaaacttaactacatttaactaagcgacaactatttaaaaaacaaaagagtttgaattctaagaaccaaacaagttaattggtaatcaaaaaacgaaattgttgtgcatatttaaagggattcaataaaaacaaaactaattctgaatttcaatatttctggcgttgggtcttgcgattgcttaggatacatttattccccctatgctttagttattattcttttgtatccctacattatcattttgtacaatttcatttccattcactttattcccaacccgcccaagcagtcgctgatcggcaaggagggactggaggcctacaacagcctgatcgagcgcaaggccctgctggacattggtcccagtccggcggccaccttgctccgccacctggacaccgacgagttcgatcttcaaagccttcaccagtcacagcgcccaatgacattgcccactcggggtgccacccagcgggtgcgcaaggctgaactggccgccggcctgagtcggcacaatgacgagaactcgaattcgctggaggcttgcgagagtcccagctacatgacccacggcagctacaagtttcccgaggcacagccgacagaacagcttccggagccggagtcgccgaatcccatacccttgccgccgcgcgagggcaaaaagcaggtgaagaccagcaccaagcggcatgtgcgcaagtatccgttgataatcccggccaacggtctgcaacgcaccctcagcaagctggcggactttggtgacgaggctgccaaatcaccggagatctccacatcttctcagccacagccaggacgcgccatcgaagtagtggccgctgtccggccgagtggcatgcgacgtccatcgcgaccctcggagcgggaatacgagaacatgccgacagtgggtaaagaatccgcacacacctaccagaacttggataagctgacacctgcggatgctgccggattaacggatacagcttcgttgcagttcgagtccatcatggaagctgacaccagtaaggagggcattctgcagtcgccggatgtaaccgacggattctacaacttttccattcagaaggagcactacaacaagggcaaagacgccgagtttgaggccactcagatatccggcctgtatgtgaacgatgacgaactacgtaacctggacatcgagagcagtcggcgcacagccactccatgcagtagttgcagcgctttggaatcggagcacagccaaccagacgcgttgccgtcaacagagtctgtgtcggaagtgagtcgcttctcaagtgtggacaatgagctggctggaaatgctctattcaaaaaggttcgagcctccgtaaacatggccatgaacaggaagtccgttgccgaaaccagcttaaccagcaaccaaccaggaggagcttcggccaagcctcaaactgaagcagaatactttgcagccaccgccgcccgactggcggattccaattcggtgagctgtgaggacctgctggagttctctgacaagaagcccaagggctgcgaacgaggcgtggactcggacgaagtgcgaatcatggtaaaagtgctcggcaaagatgtgagttcactgtgcactaagaaccaaatatcatataatcaaatatttatttcacagagcactcccaatcgttgcttgggtgccctggagttcatcaactgggacgtgcacaagtctattaagctcatcaagttgcagaacctggttagcgaggcaaatctcagcctggaagcctcctttgaagcgctgcagcagcacgaatgggatctgcacacaacggcccacaaactaaatggccttaaactttaaatactcctttaaggcccccaattctggatcgccatgatttggtttcaacgaccgccgttgccttaacctcataactatcgtttctaatttgtaggctaagcatgggataggcttaagtaatttggaactaacgtaatcactgctcgccattggctcccttcttcattcggatcgatagaatctcagcatgtacttattcacgcatgcttggtctgcatgcaagtaaccagcatcaaaatacacatttatgcacatatgtggacattttcaataaattataaacatttaatatacggccatcagttagtttcatgttaaattatttaacgatttatttaaactttatactactacataatttacacatattttacacaaacaaacgggtacgcaacttaacgctaacgaacgaacacagaacacacaacgtgaaactaaactatcagaatgagtttgggctgacgctatttcctcctgctgcgcttgccgtccgtgctcatggacaaagccactgcccgcgtcacgcgcttcggcgtggacacttgcagctggccgccactgaggttcatctcgagagacattcgcttacgggtcatgactttggaattcatccgctgtgcgcgcgcctcgtttcgcgtggtcacctttggggtgctggagctggggcgggatcgtattagaggtatcgtctttttgagcggctttttaggcggcgttgattctggtttagcgttggactctgactctgtatcggagtccagctcaataacaatcacaggaggtatttggttctccttgaccgatgaggtgctgtctgtgggactgttcgtgtttttggtcatctgctgtcgccgggtactcctgttgtctaggcgttgctgcttccgccgcggcgaaacgcggggcgaagagagagccgttgaatctcttgaccgcagtgatcgggagttggaatttgaaggacttctcctcagcactcgtttgcgtccgtttcttagag

SEQ ID NO: 7730 - DNA, 4166 bp, DROSOPHILA
cgaagtcctgcgggaaagtgcggccgggattagaggaaacgggaatcggggcggcgccggaaactagagcgagctcccgttcccaagccgaatgactcaagtatccacaaattgatttatacgaattcctcactgagtccgaactgcagcagtactacaatgccgtcaaaaacgaattgaaaataacgaacgcggcccaatttaagtatgcagcggacgaggatttgcgtttcatcggactctcgcgcccggaaatccggaggctgcgtaagttctacgagaagcattttccccacagctacctcagcaagatcaagcgtctgctgcaggcgcctggcactatggttaagcgggaagaggcgcccggcggcggaagtcaggtggcgctggatggcagtagtgcctctgcatgctcctctctggccgccaagaacggagccagttctccgagcaaggtgcccaacaacaagcacattataccggcggactccattagtgtaaacaaacagttgggaaccggcgaatttgggatcgtccaacagggagtctggtccaatggcaacgaacggatccaagtggctattaagtgcctgtgccgagagcgcatgcagtcaaatcccatggagttccttaaggaagcggccatcatgcattccatcgagcacgagaatatcgtgcgcctatatggcgttgtcctggccactgactcgctcatgctggtcactgagctcgcccatctgagatcactgttggaatgtctcaaggattcgggactgcgagtcagtttcctcaccatacccacgctctgtgagttcgccctacagatctgcaatggaatgcgctatttggaacagaagcgcctcatccacagagaccttgcggcgcgaaatattttagtgttcagcaaggacaaggtcaagatctccgactttggcctgtcgcgggcactgggcgtgggcaaggactactacaagaccaatttcaacgtgaatttaaagctgccgatcgcatggtgtgcgcccgagtgtatcaattatctgcgctttaccaacgcctcagatgtgtgggcctttggagtttgcctgtgggaaatgttctcctacggctttcagccctgggcggcacttaccggcttgcagatactcgaggccattgatgcacccaactaccagcggcttgaacagcccgactgctgtcccagcgagtattatacattaatgatgaagtgctggcaggatgacgctgccaagcgaccgcgcttcggtgaaatctatgaccaactgcccgatatgaagccagagcagcttaaagctgtagtgaattgcacagaacccaaaaaggaccatctactttatcgccagggcgatattattagcgttctagaccgcaatacgggcacacccttctggaaaggagtgcttagcactggcaaaacaggctacttcaacccctccaacactgtggcattcctcgaaggtctgcccagctccactcgtgattcattcagccgggtgagtgaccacagaatcagcaaacgcaagctgcgcactgagatgatatcgaagccacagaacgacttcaagcacaccggccacgtaggtattgacggagcaacatttggagacatcgcattcctgggaagttcgcagaattacaatcacgtacccaaacagatagtgacgccctataaaccctcggaggacattgaacaaacacctctcctactgccgcccacgcccactagtcctgactctcttcagactgccagcgggtatttcccagagggtgccaacagcggaggcgccatgggcacctccatgaaccccaccttcattccatccgctgaacacacgcccaagctgatagctaccaatggccagagttcattcgactttgccagcgggtctacaaatccgttttttcctaacagaggagacgatgaactggagtttggcttgcacaactatggtgcggatgggaaaagtgtccattcggagacgggctggcgccccacctctcgaagtattgtagatgatcctcatgaataccacgagatatcagatgatgaaatagcggctgacaagctggactttgggccctcgctgctggacgagattaactcgatgtttggatcgataagcgctgctacaggcagtcatcccaagtcacccggatttgatcatgtgaacaataaaaatgagattacggaaatgtccgccaaattgggtcaaaaaagtggtgacaccaatggtaataaacatggccatggactgctgcccacgctctcgaaaaagaaatcgtcgggaactgtgaaacctatttctgtgaaggatgaaaagattctcaaccatgccatcgagatagccaacgaaattagtgctaggtcgatgattgatctggtctctgatcagacacctgtcatccacagtcctaagcgcaaatttagttttaggtttccgcacttgagtaataatggaagcggcgacaagtctggcggattaggaaccagcggctctgcccacacgcccacccatggcaatgcttcgccttttcccaagaaaaagaatttcaccgaggaactgcagagcattccggatatacagtcgctgatcggcaaggagggactggaggcctacaacagcctgatcgagcgcaaggccctgctggacattggtcccagtccggcggccaccttgctccgccacctggacaccgacgagttcgatcttcaaagccttcaccagtcacagcgcccaatgacattgcccactcggggtgccacccagcgggtgcgcaaggctgaactggccgccggcctgagtcggcacaatgacgagaactcgaattcgctggaggcttgcgagagtcccagctacatgacccacggcagctacaagtttcccgaggcacagccgacagaacagcttccggagccggagtcgccgaatcccatacccttgccgccgcgcgagggcaaaaagcaggtgaagaccagcaccaagcggcatgtgcgcaagtatccgttgataatcccggccaacggtctgcaacgcaccctcagcaagctggcggactttggtgacgaggctgccaaatcaccggagatctccacatcttctcagccacagccaggacgcgccatcgaagtagtggccgctgtccggccgagtggcatgcgacgtccatcgcgaccctcggagcgggaatacgagaacatgccgacagtgggtaaagaatccgcacacacctaccagaacttggataagctgacacctgcggatgctgccggattaacggatacagcttcgttgcagttcgagtccatcatggaagctgacaccagtaaggagggcattctgcagtcgccggatgtaaccgacggattctacaacttttccattcagaaggagcactacaacaagggcaaagacgccgagtttgaggccactcagatatccggcctgtatgtgaacgatgacgaactacgtaacctggacatcgagagcagtcggcgcacagccactccatgcagtagttgcagcgctttggaatcggagcacagccaaccagacgcgttgccgtcaacagagtctgtgtcggaagtgagtcgcttctcaagtgtggacaatgagctggctggaaatgctctattcaaaaaggttcgagcctccgtaaacatggccatgaacaggaagtccgttgccgaaaccagcttaaccagcaaccaaccaggaggagcttcggccaagcctcaaactgaagcagaatactttgcagccaccgccgcccgactggcggattccaattcggtgagctgtgaggacctgctggagttctctgacaagaagcccaagggctgcgaacgaggcgtggactcggacgaagtgcgaatcatggtaaaagtgctcggcaaagatgtgagttcactgtgcactaagaaccaaatatcatataatcaaatatttatttcacagagcactcccaatcgttgcttgggtgccctggagttcatcaactgggacgtgcacaagtctattaagctcatcaagttgcagaacctggttagcgaggcaaatctcagcctggaagcctcctttgaagcgctgcagcagcacgaatgggatctgcacacaacggcccacaaactaaatggccttaaactttaa

SEQ ID NO: 7731 - protein, 1274 aa, DROSOPHILA
MVKREEAPGGGSQVALDGSSASACSSLAAKNGASSPSKVPNNKHIIPADSISVNKQLGTGEFGIVQQGVWSNGNERIQVAIKCLCRERMQSNPMEFLKEAAIMHSIEHENIVRLYGVVLATDSLMLVTELAHLRSLLECLKDSGLRVSFLTIPTLCEFALQICNGMRYLEQKRLIHRDLAARNILVFSKDKVKISDFGLSRALGVGKDYYKTNFNVNLKLPIAWCAPECINYLRFTNASDVWAFGVCLWEMFSYGFQPWAALTGLQILEAIDAPNYQRLEQPDCCPSEYYTLMMKCWQDDAAKRPRFGEIYDQLPDMKPEQLKAVVNCTEPKKDHLLYRQGDIISVLDRNTGTPFWKGVLSTGKTGYFNPSNTVAFLEGLPSSTRDSFSRVSDHRISKRKLRTEMISKPQNDFKHTGHVGIDGATFGDIAFLGSSQNYNHVPKQIVTPYKPSEDIEQTPLLLPPTPTSPDSLQTASGYFPEGANSGGAMGTSMNPTFIPSAEHTPKLIATNGQSSFDFASGSTNPFFPNRGDDELEFGLHNYGADGKSVHSETGWRPTSRSIVDDPHEYHEISDDEIAADKLDFGPSLLDEINSMFGSISAATGSHPKSPGFDHVNNKNEITEMSAKLGQKSGDTNGNKHGHGLLPTLSKKKSSGTVKPISVKDEKILNHAIEIANEISARSMIDLVSDQTPVIHSPKRKFSFRFPHLSNNGSGDKSGGLGTSGSAHTPTHGNASPFPKKKNFTEELQSIPDIQSLIGKEGLEAYNSLIERKALLDIGPSPAATLLRHLDTDEFDLQSLHQSQRPMTLPTRGATQRVRKAELAAGLSRHNDENSNSLEACESPSYMTHGSYKFPEAQPTEQLPEPESPNPIPLPPREGKKQVKTSTKRHVRKYPLIIPANGLQRTLSKLADFGDEAAKSPEISTSSQPQPGRAIEVVAAVRPSGMRRPSRPSEREYENMPTVGKESAHTYQNLDKLTPADAAGLTDTASLQFESIMEADTSKEGILQSPDVTDGFYNFSIQKEHYNKGKDAEFEATQISGLYVNDDELRNLDIESSRRTATPCSSCSALESEHSQPDALPSTESVSEVSRFSSVDNELAGNALFKKVRASVNMAMNRKSVAETSLTSNQPGGASAKPQTEAEYFAATAARLADSNSVSCEDLLEFSDKKPKGCERGVDSDEVRIMVKVLGKDVSSLCTKNQISYNQIFISQSTPNRCLGALEFINWDVHKSIKLIKLQNLVSEANLSLEASFEALQQHEWDLHTTAHKLNGLKL

SEQ ID NO: 7732 - DNA, 2690 bp, DROSOPHILA
ttctttttttcggatacttttgtatcctaccgactgcgccagtaaaattgttgttttatttatgagtcgaactaatgtcccgtcagttgactaaggacaacgccaagaaataaaaaatagtttttaggagaaatagtttcacgactttattctttggatctcagcttaagactaaaaatcaaatgcaaattggattgaggagaagcctcagtatttgaacaatatttgtatttcgggagagcctcgctcttgggttcttaagattaggtagcgttgaaagagggcagtcaaatctgcttaggtcaggctttaggatgtttacaagaacggctgcgctgccaaagataaacgaatgctgcgcagctgggatacgttatggaaaattactagagtgcattactgatttctttgaaataatggaagtggctggtttggaccacccaaatacgtcactatatacatatatatggtatatggtatatggtatacactggtatggatatatatatataccagtgtaatttgtttcagtgtcttggataactcacccgagtgccactgcgataggcggccatggtgacaactggtccggtgtccgcgctggagaccaccgtaatgtccctccaagcactcggatctggatgtaattttcggagacagcaagaccaccccggcatcctatggaaatggcaaatacacccgggccgcaggatctatttcggatgccgatatgattttcggagggccaccatcgaactacaaaaccgatcgcttcggggcctccaaaagcatgagcatgacctccggcggagtgggttccggaaatggatccggatccggattggggggatataagatctatgatagcattcagaatgcggcattcagcgacttcagtgactcgggcagtatgagcagcattggatcgcataccaaacgctggagtgccagcaaggaggaggatgatgaactggacttaaagtaaatccaagggaaattcaaaagtagaactatcagaactacagaaaacattcacacacacactagagcaaccaaactattgaattctatctactttctgcctctgaagtttcctggtttcatgggaaaaacactaagcatatactcactcacacaacacataactattgggttactatcgtttccactgtcaactatcatgatcgaaacactttccatctttcatctgccataaaagcatcaatgaagaaattagcataatatgctatttagacactgtagtacactactaaaacataaatataaccaccaatgcaacaacaataatgcaatgcccataagatatgtgcaatgaaatgtcgccgattgacttgactggttttgcagtgcgataagaacgaggaacctatttaattaccatacttataaacattttgaaacattttccaaagcaacaaattatatattaaatatattattgagaaaaatattgaattatataccgacatattaaaccaattgagagttgacgacattaaaagtaatcgcaagcatatattacgtgttaacctgctaataaatcaatgggaaaacttttaaataaatcgaatattaataaatctgttatataccaacatgagacacatatgaaatcctaaaaactataaaaactaaaaaataaaagacaatatgcgcaacgtataacaaacaaccaagcgtttaatactaatacatacgcgatctaattataatggataaattagttaacgaactacatgtattcggaaattactatgagcaaatgttacataaagaacacaaagacacacgagagtggaagcaactcacacacaaagtaaatgtttattaccacaaatattatgattattattatgatgtattagcagttaatgtttacaaactcgaaaggcccggatcgagggcctcgaagatatggaaagatagaaagtaccaagcaggacgacaagcaatgttaatctagtctgaaccaactggacaacaataacaaaccaaaaatatattcgaaaatgtagcgatcccatgcgatcaacataaatttacacggcttagtcggtacacgatcgaaggtcgagaaatgaagtgaaatgaaaatagaggcaatggtatcgacgaatatttagataatatacacaacaaaatatatataaatgttgcaagcgacaacaacgaagtcatattatgcgttcaagatataaacaatagcttcaattgtttaggactttgatttagcgacaaatgtttagtattttggtgttttttgttacgcacatgtttaagcattatttagagcaatagacaattttacatatgttgaatttaaaataatagttgaagtcgtttcaattgggttgtatacttctctcttttatcaactacaacttaatgcattagagaattctaaatatcgttatatgctgaggaatatagcgcaagtatacttgagaacttgttagtttaccaactctcttcgattttagtagaatctgcatttggaaatgctaccaatattttaatctaaacaaatttacaactatacaagaatattgaataacaattgtttttggttcagggccaaaacccggttatttcatgctatatcatcctaccatttatatacaagtaaatatattaaaatatgtatgtaatcttaagtaaatctttggcta

SEQ ID NO: 7733 - DNA, 3666 bp, DROSOPHILA
atgccgccaccgccggctcccggccaaccggccggagctgctccggagctgtcgttgagctttggcgccggcaaaaccccggcgacggccgcacctgctccaccacgtggtgtcagtgcgccgaccagtccggccaagtcgcgcgaaagcctgctgcagcgggtgcagagcttgaccggcgctgcccgggatcagggagcctccattttgggagctgcggttcagagcgccacacaacgggcaccggcattcagcaaggacaagtacttcacgctgctggttttggatgaccagaacacggactggtccaaatacttccggggcaggcgcttgcacggcgacttcgacatccgagtggagcaggccgagtttagggacattacggtggtctccagcgcggacaccggaccagttgtcaccatggccgcctatcgcagtggcactcgggtggcacgttccttccgcccggactttgtgctcattcgtcagccgccgcgcgacggatccagtgactatcgttccacgatcttgggtttaaagtacggcggagtgcccagcattaattcgctgcactctatctatcagttccaggacaagccctgggtattttcgcacctgctgcaattgcagcgacgcctcggacgcgacggctttccactgatcgaacagaccttcttccccaatccacgcgatttggtaagtatacgcggtatgatgtggcgcacacacgtgctgttgctccggtcatgcttcatatcatactccatgctccacctacagcacgttgccataatctgcatacccgacccggtaacgccaccgcactacagatctacacggcgagaaacgttctttctctccgtgcacttgcagttccaattcaccaagttcccaagcgtgctgaaggctggacattgccatggcggagtggccaccgctcgcctggagaaccagagcgccctgcaagatgccgccggattggtgagcggtgctggtaacgattcccattgttactgcaccatcgagccctatatcgatgccaagttcagcgtgcacatccagaagattggcaacaactacaaggcgtttatgcgcaaatccatcaccggcaattggaagaccaatcagggatccgccatgctggagcaaatcactttaaccgagaagtacaaaagctgggtggatgagatatccgagctctttggcggcatggaagtatgtggtctctccgtggtggtggccaaagatggacgagagtatatcataagcgcctgcgacagcacattcgccctcatcggagacacccaggaagaggatcgcaggcagatcgcggatctggtgtccggacggatgcagaacgtctgccgtcccagcatggcgcagacgggtccgggcaagttgccctcccgctcctcggtctcttcccgagcagagagtcccacggacgagggcgtggctccaacaccaccactcccagctggaccaagacccgcgcccatgggtggaccaccaccgataccggagcgtacctcacccgccgtgggttccattgggcggctgagcagtcgcagcagcatttcggaggtgccggaggaaccctcctcgtcgggacccagcacagtgggtggggaaatcgctaataagaagcgcggcagaacggccagcgagacgagcagcggcagcgggccaggaagtgtgcctagcagcgcgggtccggggagcggattcagtagctccttcctcggcaagcagttctcgttcgccggcaagggggagggcgtgatctccacgcagcccacacagcgtcccagcgaggagcccccagccattccgacgacggccagctcagccgtccggccggagagcagcgtttcagttagcgattcaagaaatacggatacacttacggaaagagcgggtgccggctaccagccggtcaccaattacgagcaacaggagagggtcaatccctttgataaggagcccagcaagtcgggcagcgcggccagcatacacacctcgtcgtcctcatcgatttcatcgtcatccatctcgtcgcgcatcaatcgcaatggcaatgccatccaatccccgcccccaccggcgggtccaccaccaccgccgcccaccaatgtcacggcggtgggcagcaatgccaatagctccagtggctacaggaacagctttagcagctcccttagcaaggacaagacgagctatggcaattatggcagcaccacttcggtggagaccatcacacgaatggatacgaacaccacaaacataggagccactgcaacggaagctggagaagctagtggtgtaacggccataaccaatatcagcaatagtgacggaatagtggctccaaccacgggaaccatcaccacctcggtgaccaccaacgactggagatcggccattggtatgcgatcggccagtgtgtatagtgcacccgctgcagtaaccactgtgttgccaggagacacatccggctacgattccaactcgattgcctcgcagggcgagggtctgaacaatccaagcgatctgccctcgtacaccagaccatcgtactcacgatcagagagcaatgcctccaagcactcggatctggatgtaattttcggagacagcaagaccaccccggcatcctatggaaatggcaaatacacccgggccgcaggatctatttcggatgccgatatgattttcggagggccaccatcgaactacaaaaccgatcgcttcggggcctccaaaagcatgagcatgacctccggcggagtgggttccggaaatggatccggatccggattggggggatataagatctatgatagcattcagaatgcggcattcagcgacttcagtgactcgggcagtatgagcagcattggatcgcataccaaacgctggagtgccagcaaggaggaggatgatgaactggacttaaagtaaatccaagggaaattcaaaagtagaactatcagaactacagaaaacattcacacacacactagagcaaccaaactattgaattctatctactttctgcctctgaagtttcctggtttcatgggaaaaacactaagcatatactcactcacacaacacataactattgggttactatcgtttccactgtcaactatcatgatcgaaacactttccatctttcatctgccataaaagcatcaatgaagaaattagcataatatgctatttagacactgtagtacactactaaaacataaatataaccaccaatgcaacaacaataatgcaatgcccataagatatgtgcaatgaaatgtcgccgattgacttgactggttttgcagtgcgataagaacgaggaacctatttaattaccatacttataaacattttgaaacattttccaaagcaacaaattatatattaaatatattattgagaaaaatattgaattatataccgacatattaaaccaattgagagttgacgacattaaaagtaatcgcaagcatatattacgtgttaacctgctaataaatcaatgggaaaacttttaaataaatcgaatattaataaatctgttatataccaacatgagacacatatgaaatcctaaaaactataaaaactaaaaaataaaagacaatatgcgcaacgtataacaaa

SEQ ID NO: 7734 - protein, 986 aa, DROSOPHILA
MPPPPAPGQPAGAAPELSLSFGAGKTPATAAPAPPRGVSAPTSPAKSRESLLQRVQSLTGAARDQGASILGAAVQSATQRAPAFSKDKYFTLLVLDDQNTDWSKYFRGRRLHGDFDIRVEQAEFRDITVVSSADTGPVVTMAAYRSGTRVARSFRPDFVLIRQPPRDGSSDYRSTILGLKYGGVPSINSLHSIYQFQDKPWVFSHLLQLQRRLGRDGFPLIEQTFFPNPRDLVSIRGMMWRTHVLLLRSCFISYSMLHLQHVAIICIPDPVTPPHYRSTRRETFFLSVHLQFQFTKFPSVLKAGHCHGGVATARLENQSALQDAAGLVSGAGNDSHCYCTIEPYIDAKFSVHIQKIGNNYKAFMRKSITGNWKTNQGSAMLEQITLTEKYKSWVDEISELFGGMEVCGLSVVVAKDGREYIISACDSTFALIGDTQEEDRRQIADLVSGRMQNVCRPSMAQTGPGKLPSRSSVSSRAESPTDEGVAPTPPLPAGPRPAPMGGPPPIPERTSPAVGSIGRLSSRSSISEVPEEPSSSGPSTVGGEIANKKRGRTASETSSGSGPGSVPSSAGPGSGFSSSFLGKQFSFAGKGEGVISTQPTQRPSEEPPAIPTTASSAVRPESSVSVSDSRNTDTLTERAGAGYQPVTNYEQQERVNPFDKEPSKSGSAASIHTSSSSSISSSSISSRINRNGNAIQSPPPPAGPPPPPPTNVTAVGSNANSSSGYRNSFSSSLSKDKTSYGNYGSTTSVETITRMDTNTTNIGATATEAGEASGVTAITNISNSDGIVAPTTGTITTSVTTNDWRSAIGMRSASVYSAPAAVTTVLPGDTSGYDSNSIASQGEGLNNPSDLPSYTRPSYSRSESNASKHSDLDVIFGDSKTTPASYGNGKYTRAAGSISDADMIFGGPPSNYKTDRFGASKSMSMTSGGVGSGNGSGSGLGGYKIYDSIQNAAFSDFSDSGSMSSIGSHTKRWSASKEEDDELDLK

SEQ ID NO: 7735 - DNA, 4768 bp, DROSOPHILA
cgtgaggcatcatatcttacacaggcaataaaatatcattcccggcgacatttcactttgtgtcagtcaatggcccctttagaggttgcatgcggcacgccacagatacatttaaaaccactctgtcaacttatgtatctacatacatggtttgccccagcaaagttttcaaattttgacattgacattgctgttgtgggcctcttcaataccgatctataattagtctggcttttatttggatgtatctacaaatccataccaaaatgtagtgaatgggcttgtgcggctgtgttattatgtttgtctggagcttattggcttgattgattgtgggctccatggtgataagaggctttgcaggaatcagtgattaggacgcgcctcctaacccagaacgtgaggagcgctccactcacatgtgtttcattcttgtttgtacaactcgggcatagattacctaacgaggggaaaactgggagctgggctgctgacgccaatgatatggaaaacaggccaactgtcgtcatgaatatgcgcctacggaatatccactcaatatatgtatatgtatctatctacatatagtatattccacaccagacgttgacaaattttgtgccacaacttgggcacaatattcgttacgttccgttccattctatttcacttccattttacagtaggtgtttgtgttctcttcgcaaaaagaaattatatcacgcgcctgatttccatacgcttctttatttatttactttggcttgggtgcgattcaaatgattttcaattggttacgtttgggctggcacatatattgatggatggcatttaaatgaagcgtgaaacgatgacaatcgccggttgggttcggttcggggttcactttgctttgggtacgacgacttggtaacaagtggttcgtcctcttagaagggggctcgttctgtattcttgagaacttttaattgatttattttttacgctctattctatttgctcatagatctacacgccaccgccactggacatcaaaatggaaatgtaagtattacaacttgattgtaataccattgatggttaccattgtaacttgatggttgattgaatggcaggaacaatgatgcatttttataggaaatataaaaacaaaagttaaagacgcgtgaaacaattgaattatccgatatttgatctttataaattcgttttattcaatttaatgcatttaatttatttttcattcatgtataaacgtctctaaaattcaattatttttattcaaagcaaccgaaatggttgtgcttaatgttcccttagacacatttcacaaatcctttctaacttgggaatttaatgttaattacagtgaaattggcgaacaaccccagcctccggtgaagtgctccaacttcttcgctaaccactggaagggattggttgtgttcctggtgccgctgctatgtctgcctgttatgctgctaaacgaaggcgccgtaagtttaaaccttaaccagatatatagttgcagtaagcataaatatcaaaacttaatttttctaggaatttcggtgcatgtacctccttttggtaatggccatattttgggttacggaagccttgcctctctatgtgacgtccatgataccgattgtggccttcccaataatgggtataatggtaagttctttatttcacatataaattatacaattatataattatactttcactttggcatctgtctagagctcggatcagacttgccgcttgtacttcaaggatacgctggtgatgttcatgggcggcattatggtcgccctggctgtggagtactgtaatctacacaaacgtcttgccttgagggtaatccagatcgtgggctgcagtccccgcaggtatatattctaatggtttgaaaataaggccgatttgagtattagttctttgcttttcccacagattacactttggcctcatcatggttacaatgtttttgagcatgtggatttcgaacgccgcctgtactgccatgatgtgtccgattatccaagccgtgctggaggagctgcaggctcagggtgtctgcaaaatcaaccatgagcctcaataccaaatcgttggaggcaacaagaaaaacaacgaggatgagtaagtaacaattggtattggtggcatcaagctttacacaatacttgtataaactatatacacctttactttgattatttgtttaataaattcatatttttgtaggccaccataccccaccaagatcactctgtgctactatctgggcattgcctacgcctcctcgctgggtggctgtggaaccatcatcggaactgccaccaatcttaccttcaagggcatctacgaggctcgtttcaagaactccaccgaacagatggacttccccaccttcatgttctactcggtgccatccatgttggtctacaccttgctgacattcgtgttcctgcaatggcacttcatgggtctgtggcgtcccaagagcaaggaggcacaggaagtccagaggggacgagagggcgccgatgtcgccaaaaaggttatcgatcagcgctacaaggatctgggtcccatgtccattcacgagatccaagtgatgattctgttcatttttatggttgtgatgtacttcacccgcaagcccggcatctttttgggatgggccgatttgctgaattccaagtaagttgatatttataacatataatattataattatatttatattattataataatagcccgactctattggttttcctggttaaacccgtcccttttatcttattcgtgctaatttctcgtttagaacactcgaaatacgttaatataaatcatattgaattatgagcaattacataaattataggaacttttcaagtatttctctgaacatttatggtttaagatgtgggaaaaccaaaaaagtttagctcttactcataattaatcttgcgagttatatttttacttaacctaagtacatgctcttctttccagggacattcgtaactctatgcccactatttttgtcgtcgtcatgtgcttcatgctgcccgccaattatgctttcctacgctactgcaccagacgcggtggtccagtgcccacgggtcccactccatcgctgatcacctggaagttcatccagaccaaggtgccatggggtctggtgttcctgcttggcggtggcttcgctttggccgaaggcagcaagcagagcggcatggccaagctgattggcaatgctctgattggattgaaggttctgcccaactctgtcctcttactggtggtcatcctggtggctgtgttcctgaccgccttcagctccaatgtggcgattgccaacattattattcccgttctggccgagatggtgagtttaaagcaatgcattttgtatgaaacgttgtgtactaaatgagtttatttctgtttcagtccctggccattgagatccatcctctgtacctgatcctgcccgctggcttggcctgcagtatggccttccacctgccggttagtactccgcccaacgctttggttgctggctatgccaacattaggacgaaggacatggccattgctggaatcggtccgaccatcattaccatcatcaccctgtttgttttctgccaaacctggggcctggtcgtctatccgaaccttaactcgttccccgaatgggctcagatttatgccgcggcagcactgggaaacaagacgcactagatagttagtaattagtgtaaataactaacatacccgtcacagcgataaagttgaggaaaatttagggaattttaaacgaaaagtgcctttgctgacagcgaaaaatgtgaaaaatatttaactatgtatacttgcatttcagagttgcgaaaagttttgatacaaaagcattacctactgtttagaaaaatgtgttaaaaaaaaaacgtatcgcaatatactgttaatcaggaattgaacacctggtctacgcactcagctaaatatttaaatacaaattaatgttacttaattgttgcatttagcataaaaatggaaaagatttggaaaagttagaacagtttgttcaatggcagccctggcctgctaatattttaaataactagactgagagaacttacatattcatacatgtttttcaacttgtaaaaatttttaaatgaacaactcactcaatacttcattgcgaaccaaaatgaacacacaaatagcggtaggctaagcttaaatgatactgtgtacattttcagatgatttatgttttatatagtttgtaaaaaatattaaataataaaaagctcaaacgacaataatactatacgtttgtttatttcaataacttattttgtttgatgttcaaagcgcgccatgcatttcgtataacgataactcgaattaatcgataactcgccctgctagggatgcgcgattcactgaaaaggtttaagactcactggcacagttttacatctactggacacttgtagctgaaatttcaattcatcaaataaaatacatatttttacaaaattacggagaaataaaacattttactcataggagataatggtaataaaaatatcattacaaaaagtattaaattgatgtatatttcataggaacaaatttgattaagattaagttcaatcattcgaagtagtaatttctcagggtaccgaagaaatatttaaatgggaattaagagctcgactataagtga

SEQ ID NO: 7736 - DNA, 1755 bp, DROSOPHILA
tcatagatctacacgccaccgccactggacatcaaaatggaaattgaaattggcgaacaaccccagcctccggtgaagtgctccaacttcttcgctaaccactggaagggattggttgtgttcctggtgccgctgctatgtctgcctgttatgctgctaaacgaaggcgccgaatttcggtgcatgtacctccttttggtaatggccatattttgggttacggaagccttgcctctctatgtgacgtccatgataccgattgtggccttcccaataatgggtataatgagctcggatcagacttgccgcttgtacttcaaggatacgctggtgatgttcatgggcggcattatggtcgccctggctgtggagtactgtaatctacacaaacgtcttgccttgagggtaatccagatcgtgggctgcagtccccgcagattacactttggcctcatcatggttacaatgtttttgagcatgtggatttcgaacgccgcctgtactgccatgatgtgtccgattatccaagccgtgctggaggagctgcaggctcagggtgtctgcaaaatcaaccatgagcctcaataccaaatcgttggaggcaacaagaaaaacaacgaggatgagccaccataccccaccaagatcactctgtgctactatctgggcattgcctacgcctcctcgctgggtggctgtggaaccatcatcggaactgccaccaatcttaccttcaagggcatctacgaggctcgtttcaagaactccaccgaacagatggacttccccaccttcatgttctactcggtgccatccatgttggtctacaccttgctgacattcgtgttcctgcaatggcacttcatgggtctgtggcgtcccaagagcaaggaggcacaggaagtccagaggggacgagagggcgccgatgtcgccaaaaaggttatcgatcagcgctacaaggatctgggtcccatgtccattcacgagatccaagtgatgattctgttcatttttatggttgtgatgtacttcacccgcaagcccggcatctttttgggatgggccgatttgctgaattccaaggacattcgtaactctatgcccactatttttgtcgtcgtcatgtgcttcatgctgcccgccaattatgctttcctacgctactgcaccagacgcggtggtccagtgcccacgggtcccactccatcgctgatcacctggaagttcatccagaccaaggtgccatggggtctggtgttcctgcttggcggtggcttcgctttggccgaaggcagcaagcagagcggcatggccaagctgattggcaatgctctgattggattgaaggttctgcccaactctgtcctcttactggtggtcatcctggtggctgtgttcctgaccgccttcagctccaatgtggcgattgccaacattattattcccgttctggccgagatgtccctggccattgagatccatcctctgtacctgatcctgcccgctggcttggcctgcagtatggccttccacctgccggttagtactccgcccaacgctttggttgctggctatgccaacattaggacgaaggacatggccattgctggaatcggtccgaccatcattaccatcatcaccctgtttgttttctgccaaacctggggcctggtcgtctatccgaaccttaactcgttccccgaatgggctcagatttatgccgcggcagcactgggaaacaagacgcactag

SEQ ID NO: 7737 - protein, 572 aa, DROSOPHILA
MEIEIGEQPQPPVKCSNFFANHWKGLVVFLVPLLCLPVMLLNEGAEFRCMYLLLVMAIFWVTEALPLYVTSMIPIVAFPIMGIMSSDQTCRLYFKDTLVMFMGGIMVALAVEYCNLHKRLALRVIQIVGCSPRRLHFGLIMVTMFLSMWISNAACTAMMCPIIQAVLEELQAQGVCKINHEPQYQIVGGNKKNNEDEPPYPTKITLCYYLGIAYASSLGGCGTIIGTATNLTFKGIYEARFKNSTEQMDFPTFMFYSVPSMLVYTLLTFVFLQWHFMGLWRPKSKEAQEVQRGREGADVAKKVIDQRYKDLGPMSIHEIQVMILFIFMVVMYFTRKPGIFLGWADLLNSKDIRNSMPTIFVVVMCFMLPANYAFLRYCTRRGGPVPTGPTPSLITWKFIQTKVPWGLVFLLGGGFALAEGSKQSGMAKLIGNALIGLKVLPNSVLLLVVILVAVFLTAFSSNVAIANIIIPVLAEMSLAIEIHPLYLILPAGLACSMAFHLPVSTPPNALVAGYANIRTKDMAIAGIGPTIITIITLFVFCQTWGLVVYPNLNSFPEWAQIYAAAALGNKTH

SEQ ID NO: 7738 - DNA, 5917 bp, DROSOPHILA
ggccaagaacgcgctcatcttcgaatcggaagcggtggccatggtgccgagcggcaattgccgagtgtgtgactactgcgggatcacacagttcattccctttccctgcatttactgctccaaccgtctggtggtctattgttcccgacagtgccgcttcaagcatgcggcgatccatgcagtggagtgcttcggccaccagatcgagctgttcgagtcctttggcgaggttttcggaatgccgcgactcctgcagctggccttcaggatgctgatcacaggactgccggaacttttgggccattgccgaaagaaaccgacgctcagcaagctttggtcggccatcaatgggggattgcaggagcgacaggatatcgcttacagtgcagtgctgcgattggagcgcctgaaggaggagcgacccacggacacggtgatcgcattggcattggccgcccacatcctgtccatttacctgagcaagtgcactacgttttttgatcagctggagaagagtctgcctacggcctctcggatgtcgagtgccgaatgggagctgctgtgtgccgctctactcatgcgtcacattggccagctgcgccacagatcgctcactgcctgccgatccttcgtcctgccagctgatccgcacgtcttctcgccactcaacgaattccagctatgggccgcacccatgcgcctgcaggagggccatctgcatctgctggccggcgaggtggctgtcgtgtcgtactccgtctacccggataccctgaacttgtgccgccacagttgttcctccacgatctgcgccaagttctccggccgcacggtgaccgcgctggcccttttggatctgccggcaggctccggcatctacaactgcttcgccggaggtaactttcagcaattgccccgggaggagcgcaccaaacagctcctggagagcggcataaggtgccactgcaacgcctgccagttaacgcactcggatgatcagttcgtaagttgagacaccattcatttattatgtaataatgctttaaataattatcctcccgcagcataagtttcatcgctaccgttgtgataacccaaactgtatggagatcttcacacccaacgccctgccccatgctccaagtctgcgttggtggctatccgaggagtacacccagccggagttcaatggcgccgacctgatcatgtgtccacattgcggcgagtaccagaaactggagtggttctgggccttcaccacgtcgctcatcgattgcgaactcatcgaggagaggtgcaaactgtacgcggccatcgagcgcgccgagaaccaactgatggatctgcacgagtgcaaggtggctctggccaggctgcttctggagcagtgcctcatggtgcaccgcggtaagtgctcggaaatggagagctttggcatttatatatgatttttgatcattaccagctcacgtttccctcttggttgcgcaccttttccgcttcttgatctaccgtttcattgaatttattcagattatccacataatctaagattatatttgcgattaatagtctaaatccagttcggaaagttttctacctctgaatcaagctatgaaatagtcttatatttaaaagattataataatattatcctttaaagaaccagtttattcttaaaaggataatattagttttttaatggcaatctaataagatttcgtaatcatgtaccccatatattttctgctagtcctcttctcctagatcctggtaaactatctcttttgatctctctctttctctctctgctcctcctacctctaacaactgcgccaaccaaaagagggggccacagtcctggacgattgggagttcaacaaactgggctccatcctcagatccgtgctgcccagcgtgatggcccagtatggcggacagtcaatcgagtacgtgaagtacttctcctacttctgggatgtgatggcgctgagcaactacaagtgcaacgatcgggagctgatgcaaatgctaaatgctttggagttcatagccgacgagttcaaggatatattcatcaactactacgaggattatattgcgcccaaatttgctgaagagtcctatggcagtgtcgtagatacgcaagtttagatgagagtcccaaacaaaatgaagcgagcaaagttaaataaacttagatatattttactcagtagcgaaaagaaaaaaaaaaacaaaagaaatgaaaagaaaagaaaacacccacacagattctaggaaaattctattgttgaacgacccatacaaaacataattgcatatatactttgtgctattattcaaaaaaatggtgctgagatattaaattgtacgaaacgaatgttacattcatttaggtaattaagtcaaggcaaatatcgtgctagagaaatcaaaacgatcatattagtagagagtcatatcatgcacacattatgttcatatcacacctaggaaatgattaattactgatcaactgattgattgattatatagcaaatgactttttcattttgcattgcgagcaatatttatgaattaacatacatagctacaagggccaacataagcgatggatcactgtactctcgtcgattttcgggactctttaaaatttagttaaatgccattcgaaacgcaaacggaaactttggatctcggtgagctgtacagtgaccactgcctaaatgcgatacctaatcgatagatgataggccgaggcaaatctaagtgtaagcattaatttagcttctgagaagcttctacctaagcgtagccactgatctcgattgtttgccacgaacacgacaaattgttttatccaccacagagaaaaaatcccttactcaatcacttacatacatattatgtatttgcttgccatcgggcagcctgactgtaagcttttaatgcttaaaaatcagataggaatcaaacgcaatcactgcagaaacagaaaagcaaaaaccaaaaaccaaaaaccaaaaattaaaaatgaaaaacgaaaaaccaacaagacaacaaatgaacaatttaaattaacgaatattcgaattatatgaacaaacaagtgttttttcaaacctcgccttaattttttaaagtgttttgaaatacgataacgatagcggagataacgagtttcgatctcgaatcgaaatcgaaaacaacaaatacaaaaccaaaaacaaaaacacgcactgataaagcataggccaggcaaaattcacaccgacacgcccacacacacacacacacacacacaatcagacacgcgaatctatataaataaagaaatacaaattacaaacaagatactcaaacaacttctagcagctataaacaaatgcaataaattctttttaacaacaaacgcaaactgtttttttcatatgggctgatggctatttttttgtaaacccatcataaaatatatattattttcaataatcataaataaatttattaaaaacattaactgtttccatgcttaacaattaacccttactttagcaacatctccatgctttgctttcatttacttcttggaaaaaaagttcataatgccagcttgtttggttttcggcgcatcctttccagctttcgcggctgaaggcggtgacttctttttgttgacgggagcagcagcctttggggaaacctttttgttggcaggctgggcttttgttggtttacgctgcgtaatgacgaagccatcttcatccagataggtttcattggccggttccgtatccattttctcatccaatgcgatggtctcttcatcggcggacttcttgggcggctgctcctcgtcctcagagtcgctgattcgtcgccgcttggaggacgaggccttttcctgatcggagtcgttgtccgactcgatcaccttccgccgcagcatgtccagcttttcctcctcgtcggacgattcggcactctcctcgtcgaacagttgcatggaagtgtttgccgttgttggctttttggtgggactgggggatttctttttcgaggcttcctttttgtttgaattggaagcatctttcttcgatttatcttcggattccggtggcgacttcttggcgcctgccggttgcttcttaaagaagttgtccacggtgccggacgtcgatttgctgggcgtggctttgacatcctttggcttgctggccgccgctgtgaagaagctattaatgctaccctttttggctgctgcaggcttggctttagaggcctgttccttgggcgaggtcttcttatcctccggagaggacttgctggccactggcttttccgccttcgactttgctggctctgatttaagtgaagattttgaaggctccaacttaaccgcagactttgatggctccgatttagtgggttcagatttgactccattgtggggagtcgtcccatttgcactgggcactatctttcccgctccaggacgctgctccacttttgccaacttcacctccaaatgctgcatgggcttgaaaatcgcagccggcgctttggtgccaccggctattttcacactatacagctgagactccgcatcctggactttggccagccaatcctgcatcctgctctccagcaccacagagtacagatcttcgccggaatcggatccttgcgttttacgcttgccatggactagaaatctcttctcgaattttgtggcaggttcctgctctttgatgtaggcctccagcacatcgttcacctccttgtaggacagtttgtactcctccagaagatcggtgaccagcacacagcgatcgaaatcgatcatgcaatcgtcgagagcctttttaagcgacatttcgacaatttgtttagttaaaattgcgcgaaatcgtattgcgggcgtgccaacttatgtgactaaaaaaagtgctaaaactcaccagcaaaataatgaatactgaattcgaaaatttgtgactttgctatgcatattgtcaatgtagaaaaaggcgtatttattaaagttaattaattaattattatatatatttagttgcttttttttgcttgaattatgagcttattaatagactttacatttagcttaaatatagctaaattgaaacaactgctatctatcgataacatctacttgccgctattgcaaagataagaagaagaaacgagaagtaaacaaaccagatatcctaataaattttgatttctttttaatgcccaaacaatgcaagtaaatccaaaacacaacacagaagctcacagacaagccgagtaagtgataaaaatacaagtgaatgcagcaagtgtaagacccaattacaggcaggatgccaacaaggcgcgaatcacccaaattgaggagttcatcaacgaggtgctgaaagaggatctcagagagctggaaaagtgcatcgggcagtacaacgaggagatcatggagtacgtccagctgaagaacaccctccagaccttcgacacccacctaccagatggctacaaaacgcaagtcaacatcggcagcaacgtattcatgcaggctcgcgttcggaaaatggatagcattctggtcgatgtgggcaagaatgtgttcctcgatatgagcattccagatgcggaacgcttctgcgacacacgcgtaaagatcttgaccaagcaatccgatgtcctgcgcgacgaaagcgtcaagaaaagggctcaaatcaaaatggccctcatagcaatcagcgaaagaaccaaacttattcaacaggatgaaagcaaatagcttcgctgcgtccacagaagctgaaagcatctgtatccttgttcgtatcagtagtgatcacattattaccaagattacacaagcacttagtttttattttataccacaatttac

SEQ ID NO: 7739 - DNA, 3917 bp, DROSOPHILA
caatacgatttcgcgcaattttaactaaacaaattgtcgaaatgtcgcttaaaaaggctctcgacgattgcatgatcgatttcgatcgctgtgtgctggtcaccgatcttctggaggagtacaaactgtcctacaaggaggtgaacgatgtgctggaggcctacatcaaagagcaggaacctgccacaaaattcgagaagagatttctagtccatggcaagcgtaaaacgcaaggatccgattccggcgaagatctgtactctgtggtgctggagagcaggatgcaggattggctggccaaagtccaggatgcggagtctcagctgtatagtgtgaaaatagccggtggcaccaaagcgccggctgcgattttcaagcccatgcagcatttggaggtgaagttggcaaaagtggagcagcgtcctggagcgggaaagatagtgcccagtgcaaatgggacgactccccacaatggagtcaaatctgaacccactaaatcggagccatcaaagtctgcggttaagttggagccttcaaaatcttcacttaaatcagagccagcaaagtcgaaggcggaaaagccagtggccagcaagtcctctccggaggataagaagacctcgcccaaggaacaggcctctaaagccaagcctgcagcagccaaaaagggtagcattaatagcttcttcacagcggcggccagcaagccaaaggatgtcaaagccacgcccagcaaatcgacgtccggcaccgtggacaacttctttaagaagcaaccggcaggcgccaagaagtcgccaccggaatccgaagataaatcgaagaaagatgcttccaattcaaacaaaaaggaagcctcgaaaaagaaatcccccagtcccaccaaaaagccaacaacggcaaacacttccatgcaactgttcgacgaggagagtgccgaatcgtccgacgaggaggaaaagctggacatgctgcggcggaaggtgatcgagtcggacaacgactccgatcaggaaaaggcctcgtcctccaagcggcgacgaatcagcgactctgaggacgaggagcagccgcccaagaagtccgccgatgaagagaccatcgcattggatgagaaaatggatacggaaccggccaatgaaacctatctggatgaagatggcttcgtcattacgcagcgtaaaccaacaaaagcccagcctgccaacaaaaaggtttccccaaaggctgctgctcccgtcaacaaaaagaagtcaccgccttcagccgcgaaagctggaaaggatgcgccgaaaaccaaacaagctggcattatgaactttttttccaagaagtaaatgaaagcaaagcatggagatgttgctaaagtaagggttaattgttaagcatggaaacagttaatgtttttaataaatttatttatgattattgaaaataatatatattttatgatgggtttacaaaaaaatagccatcagcccatatgaaaaaaacagtttgcgtttgttgttaaaaagaatttattgcatttgtttatagctgctagaagttgtttgagtatcttgtttgtaatttgtatttctttatttatatagattcgcgtgtctgattgtgtgtgtgtgtgtgtgtgtgtgggcgtgtcggtgtgaattttgcctggcctatgctttatcagtgcgtgtttttgtttttggttttgtatttgttgttttcgatttcgattcgagatcgaaactcgttatctccgctatcgttatcgtatttcaaaacactttaaaaaattaaggcgaggtttgaaaaaacacttgtttgttcatataattcgaatattcgttaatttaaattgttcatttgttgtcttgttggtttttcgtttttcatttttaatttttggtttttggtttttggtttttgcttttctgtttctgcagtgattgcgtttgattcctatctgatttttaagcattaaaagcttacagtcaggctgcccgatggcaagcaaatacataatatgtatgtaagtgattgagtaagggattttttctctgtggtggataaaacaatttgtcgtgttcgtggcaaacaatcgagatcagtggctacgcttaggtagaagcttctcagaagctaaattaatgcttacacttagatttgcctcggcctatcatctatcgattaggtatcgcatttaggcagtggtcactgtacagctcaccgagatccaaagtttccgtttgcgtttcgaatggcatttaactaaattttaaagagtcccgaaaatcgacgagagtacagtgatccatcgcttatgttggcccttgtagctatgtatgttaattcataaatattgctcgcaatgcaaaatgaaaaagtcatttgctatataatcaatcaatcagttgatcagtaattaatcatttcctaggtgtgatatgaacataatgtgtgcatgatatgactctctactaatatgatcgttttgatttctctagcacgatatttgccttgacttaattacctaaatgaatgtaacattcgtttcgtacaatttaatatctcagcaccatttttttgaataatagcacaaagtatatatgcaattatgttttgtatgggtcgttcaacaatagaattttcctagaatctgtgtgggtgttttcttttcttttcatttcttttgtttttttttttcttttcgctactgagtaaaatatatctaagtttatttaactttgctcgcttcattttgtttgggactctcatctaaacttgcgtatctacgacactgccataggactcttcagcaaatttgggcgcaatataatcctcgtagtagttgatgaatatatccttgaactcgtcggctatgaactccaaagcatttagcatttgcatcagctcccgatcgttgcacttgtagttgctcagcgccatcacatcccagaagtaggagaagtacttcacgtactcgattgactgtccgccatactgggccatcacgctgggcagcacggatctgaggatggagcccagtttgttgaactcccaatcgtccaggactgtggccccctcttttggttggcgcagttgttagaggtaggaggagcagagagagaaagagagagatcaaaagagatagtttaccaggatctaggagaagaggactagcagaaaatatatggggtacatgattacgaaatcttattagattgccattaaaaaactaatattatccttttaagaataaactggttctttaaaggataatattattataatcttttaaatataagactatttcatagcttgattcagaggtagaaaactttccgaactggatttagactattaatcgcaaatataatcttagattatgtggataatctgaataaattcaatgaaacggtagatcaagaagcggaaaaggtgcgcaaccaagagggaaacgtgagctggtaatgatcaaaaatcatatataaatgccaaagctctccatttccgagcacttaccgcggtgcaccatgaggcactgctccagaagcagcctggccagagccaccttgcactcgtgcagatccatcagttggttctcggcgcgctcgatggccgcgtacagtttgcacctctcctcgatgagttcgcaatcgatgagcgacgtggtgaaggcccagaaccactccagtttctggtactcgccgcaatgtggacacatgatcaggtcggcgccattgaactccggctgggtgtactcctcggatagccaccaacgcagacttggagcatggggcagggcgttgggtgtgaagatctccatacagtttgggttatcacaacggtagcgatgaaacttatgctgcgggaggataattatttaaagcattattacataataaatgaatggtgtctcaacttacgaa

SEQ ID NO: 7740 - protein, 431 aa, DROSOPHILA
MSLKKALDDCMIDFDRCVLVTDLLEEYKLSYKEVNDVLEAYIKEQEPATKFEKRFLVHGKRKTQGSDSGEDLYSVVLESRMQDWLAKVQDAESQLYSVKIAGGTKAPAAIFKPMQHLEVKLAKVEQRPGAGKIVPSANGTTPHNGVKSEPTKSEPSKSAVKLEPSKSSLKSEPAKSKAEKPVASKSSPEDKKTSPKEQASKAKPAAAKKGSINSFFTAAASKPKDVKATPSKSTSGTVDNFFKKQPAGAKKSPPESEDKSKKDASNSNKKEASKKKSPSPTKKPTTANTSMQLFDEESAESSDEEEKLDMLRRKVIESDNDSDQEKASSSKRRRISDSEDEEQPPKKSADEETIALDEKMDTEPANETYLDEDGFVITQRKPTKAQPANKKVSPKAAAPVNKKKSPPSAAKAGKDAPKTKQAGIMNFFSKK

SEQ ID NO: 7741 - DNA, 3075 bp, DROSOPHILA
cagagctgtatgaccatcagtgctgtgcttccctttcgcgctcagaactcatatagtcacttccgattccccttgacttatactcccacaaaaacgcccactagcagtgaatcatcttgaactaatcagcaaagtgcagtcaattgcctggcaatatagagcatgaataattatgggctaatgaatccctccactgggtgggtagtggaaatcggtggccgtcttgtcggggcaattaaatgattggcagtgatcgtgaaatttgatagcaactgtgccagcgcactcgaaacagacaaaccgtctgactggcaaacgagttcttctgtcagcaaatgtgggcccaatgccaaagccaagggaactggtagagattgcagtgaactatctacaaacgcactgtgacattacgagcattaactcatttctccagctgtgtgcgagtttttattgttaagaaatgaactgtcggtcaggactttccttgttgacgggtgcgaagtggcagtttcccccattgagactgccccccaccaatccgagatgcagccgcagctgcctcattatcttcggaaacgatgtgcatggggcaatttgtcagttgcttaggcttccgtgaacagaaacgcgggcagcacttggcggtttattgtgccagttctttccctcgccgagttctgtgggtggcgacaagtacatggaacatttgttgctgaatggtggcaaggaggtgccaagagctatgcaaagaatgggcgaatgatgaaaggaaaaaactcattactgcctgcctgccgaggcactccaataaatggcgtttctttcgcttgcaaggcgattcatggaaagtattttcttggcaaaaaggttttccatatctgtagcgttgatttggctatttgcgatttttcatatttacccagaatagaatgtttacccatcaactcacatgaattcatttcgatttactgatctgaaaacaacaccttttacttgcagaatgtggtggaccatcacaggaaactttggcaacattctgcccatcgactggtccaagtcgtacacccgtcagatgcacatgcccacactgaatctgggccagaaccacacgaagcagcagcagcagaatcgcaaccagcagcagcagttgcacaaccagagccatcaggcgtatccacacaccaacggtttgggatccggatccggatccggcctggatgcccagactccgggcgatgagttcaacgatctgaccagtgaggacgaggcggtggccaacgatttggacatgcacgccctcatccttaacggcttgaacggtgacatggacgaccagccgattaagacggtagaggaggtgatcaaggagatcgacgacatcatggacgaggccgagagcccgctggacgagccggagacctgcgattcggaggtgatcgagaaggcgcgagaggtgctgggcgcccccctctatgcggaaagtaagcaggcgacgacgtcctggatgccagttacacagattaacataatccgcacattctcttgcagaactgcaatatctgaccacgacacagctgaacgagctgtacatggagatggaggtgctgatccaggagctgagcgagacgttgatcaacgagctggccctgcgcgacgagctggagttcgagaaggagctgaagaactcgttcatctctctgctcctcgccgttcagaacaaaaggcggcagtaccatgtggagaagaagcgcggcaagttccagggtgagtttcgcgaaccaaaatccagccagcgcgcttatacttaacacggcttttccctgttcatgcaggtcccgagcccaagtacttgaccacagtcattccgtatcacctggagaacggcacgcccaacaatcagtctctgcaggtcctgatcaagagtaagtacccattgcgggctaaacatcccagatgccgactctaatgccgactcctcccgatctcttgcagttctcaaggccatcaacgaggacagcccgacggttccggccctccttacggactacatcctgaaggtgctctgccctacataagcgccgcaagcggtagtcgccgaggagcaggaaccccagctgtcgctccatctctctgtctgtgtttatacaattatacaacttgcatatacacaccgaacacaccacacataatttaatgattagttcgtactttaaattattgtttaaatgcaatccgtgtactctccgcggagaagaagatttgccgcataaagagaggactctagtgattcgtctgtcgaatatgaggcacccaaagtggggtcttcttctcaacggagtgcttttcccggccgattcgaccgacagaacaaaatatgcaacaaaacatacatgcaatacacatacatatatagacacatatatatatatataaaccgaaaaatttaccgagagcgcgctctacgaactcagccagtcctcccatggcaataatactcaattctctccgccgcctctctttctctttaaggagcattcgtattgttaaagagccgactccaactaagcttaaaatacatacatacatatatggtaaatgcatgtgggccagttgcaagtccgcctgccggtgcagcttcaattttttcgtctatatgtgaaatatgcagatctaaatcgatacacgcttgcattatgttcgcccagctatctgcgatcgaacggacagccaatcactaggttttacaataaggatcttatcttgtatgtaatatataatctgattataagaggtgtgtggcctgcagtccctggaaaatccgccgtttcgaaatgtgttccgagtgcaatttacaaaaatatgatttgagatggcatcagaatcagactcagaatcggaaaatcagaattagttgcagcaattgttttcgcatcgctttaagtttacgacgcctaatttactcatttttttattgtttacgaggccataaaacgcgttctattttgttcaaaacaattgtttaatgtaaatggaggaaacacaaatttaattttaatttgcatagaaaacgctgtg

SEQ ID NO: 7742 - DNA, 870 bp, DROSOPHILA
atgtggtggaccatcacaggaaactttggcaacattctgcccatcgactggtccaagtcgtacacccgtcagatgcacatgcccacactgaatctgggccagaaccacacgaagcagcagcagcagaatcgcaaccagcagcagcagttgcacaaccagagccatcaggcgtatccacacaccaacggtttgggatccggatccggatccggcctggatgcccagactccgggcgatgagttcaacgatctgaccagtgaggacgaggcggtggccaacgatttggacatgcacgccctcatccttaacggcttgaacggtgacatggacgaccagccgattaagacggtagaggaggtgatcaaggagatcgacgacatcatggacgaggccgagagcccgctggacgagccggagacctgcgattcggaggtgatcgagaaggcgcgagaggtgctgggcgcccccctctatgcggaaaaactgcaatatctgaccacgacacagctgaacgagctgtacatggagatggaggtgctgatccaggagctgagcgagacgttgatcaacgagctggccctgcgcgacgagctggagttcgagaaggagctgaagaactcgttcatctctctgctcctcgccgttcagaacaaaaggcggcagtaccatgtggagaagaagcgcggcaagttccagggtcccgagcccaagtacttgaccacagtcattccgtatcacctggagaacggcacgcccaacaatcagtctctgcaggtcctgatcaagattctcaaggccatcaacgaggacagcccgacggttccggccctccttacggactacatcctgaaggtgctctgccctacataa

SEQ ID NO: 7743 - protein, 289 aa, DROSOPHILA
MWWTITGNFGNILPIDWSKSYTRQMHMPTLNLGQNHTKQQQQNRNQQQQLHNQSHQAYPHTNGLGSGSGSGLDAQTPGDEFNDLTSEDEAVANDLDMHALILNGLNGDMDDQPIKTVEEVIKEIDDIMDEAESPLDEPETCDSEVIEKAREVLGAPLYAEKLQYLTTTQLNELYMEMEVLIQELSETLINELALRDELEFEKELKNSFISLLLAVQNKRRQYHVEKKRGKFQGPEPKYLTTVIPYHLENGTPNNQSLQVLIKILKAINEDSPTVPALLTDYILKVLCPT

SEQ ID NO: 7744 - DNA, 3861 bp, DROSOPHILA
tacatagtatgtaaatatatatgcacttgggatggccggccattcgtttaggaaagcaatttcacaacagccattttcggattgagcaaaaatcgtacgactgtttttacggagtcaacttgcaaaaaaaaacaaacagacaacaatttacaattagcagttaaaattaattgaataatacagtaactgttttcgagcctaaggtaatatcagttgaacctgaacaacacgtaaatgcagagcataaatcgatgctaacctttgcatacaccaattacactcatgaaacgcactgttgaagcatacactcaatcaagccttaaaacattcgcggccaagtcaacatttcacaaggaagccaaatttaacagtgttgtctttttgtgggactaacaaaccaaaagtgaaatatatatcttatatatatatatatttatataaaaacaatgaagtttattacaaaataataataatcataatcgtataattggtttacaaaatggtgtatatcagtagtaatgatcaaaaaaaaatatttgctttttgggggaatcctgcgcacatacatatataaattgagtagcaacggaaaaaataatatttgcattgcttaactttatacaattcgctagccagtcgctcaatttgttctcttttatataattacacttttttctttactaatagcatagactatcttgatcttgatgtcaatattttaaagattgtaaacgatgcagcgcggttgcatcgatttagtttagtttataggctaatacctagagaacagctgcaattgctgcaaggtttgttgaagtgcgatcgtgtgtatatatgcgtgtgttcgtttcctgtggggatgagagcttcctgggattcccagcttagcaccaatgcctctgcctttcattcagatggacatttgctcctccaacgcctccgtctccgtttccatctcggtaagacaacagcgacttaggctaccgggagtcgttctctgttagtgacagtgctcggttacgtccacgataaccgatttcttccagcagaagaggaagtaaccaacggcggcgcccaggacaaccatcaggcagagccacacgttgtatgtcatgaagatcagcatgagcaggaaggacagcgtcacctggagcacgtgcagcagtgtctggagcaggtggttaatcgacagcatcgaaggtctgttcatatcgaaagaattttacatttagttataattaaagcaaacatcgaacaaaattagcaggacaagaaaatatacataattgaacgtaaacaaaaatcaaaacagaactaagtattgctaaagactatatatatatatatatatttatatatcgctgagctgctctaagaatttccattgttagattaaactaccattattgattagggttagattctctctagattaattgccaacttgagctacaggtgtgtaatactatatcttgtggtccagccagatattctgtacaaatgacgggccaatttgtaaaccgacacggattcatcgtcgccgccgagcgcagttgtttccattaactttttcccattaactggcgcattgggtatatcggacatatcggatagccaacaacagctaaatagatttaactaattcaaattgtagtgaggcatcaaaattacacagagacggtaatctatataacacatatgtacgtatgtatgtatattgattgggcaggtggtcaagtggtgtacatatacatatggtgtggtcaatggagcgatacttacggttgcttgtgcacaacttcgcccacgtatctaagaaaggatcgatcgaagcgtgccgggagtagggacaccacacgattgcggatgcgattcgcggatgcagatgcagatacagaatcaaattgagttacaatatatatatgtttagtttcaattacggtcgcgtgaatcacaacaatggccaattatacgatattaacgaggcagaccgtatcgatatgaatttggttttgaattgggtttcgtttagttttttttttttttttttgtcgagatgattcaatttacaaatgaagagcgacgacgcgcattgatgatgatgcagatagagatattgatggtattgatcagaatgtgaagcggtagcggtaacgatttgaacgatttaacgggtaacagcataacgaaaacgaaacgagaagagagaagaaagcattaagattaatatatacaacaagttaagtaaatacaatagatacaaagctacagtatgggtaagggcaacaggcatgcgaaggggataccaaagatccaatatgatccattccattctacaatgggtagcagaaaatccgaaactcactgaacgggcgatggagctgccgctgccggcgatggtatgcgcggtgcctccggatttctttgtggccccgtcacaggtcgatattccagcagattgtatgtcttccagaatagatactcgcggtagtacttcagtccctcgtacattagggccagcaggaagatggcgatcatggagccgatcaaaccggccactgtttcgatgtgccaccaggagaacaggatcgtctcgttgtagccaaaatggaactgttacgattgaggaacattatttggttagaaatgaaaattcttcaaatactacgttctcttaccgccatgggcatcatgtgctccattcccgtgccagagccaccgccatgattgtgcgctccgtgagcggcgtgacccgcgtgacttgcctgcaaatcgctggtatcggggatcaggtcgaacatggaagctgcatccattggagacgctgtcgcagcaggtataccgctgtgatcgtggtgcatgcccacatgatcgtgatgcatcgagtgatctgtggattgcgaatgatatagataagatgctagatgctaagcaggcatcttcaatgttttggccaaatcacacaacacctaccaacaccgggcgcactgtgatgggcgtggtccatagcagctggttaaccgacttcttattgtggatctgcgattaatgactgcaaagaagaacggagtgaaagtcgcattaagtctttgccactcgtaagtgaataataaacaatgtacataaatgatagcaatggctacaatggcggccaagataatagagctttctctatataaattccccatgaaaggtttaaagatcaaaacaatcttgcaactaagctgttattactatctaatataaacactgtaacatatatattatattgaccatttttatattatttttatttttgtaagtctaaagtttgtgttttttttgcgggtcaattgccaagccccaaatcgcatcaaaaaccgatatatctcaattagaaagtcaatctctgaacaatccaacctccgccctttccctttcacatcttcgaagggaatgtccaatgacgaatgcgaaatgtgtagctgggtaaaactgtgtaactggggaatgtgaaatgaaaatgccacacataactctgcgtgctccattcacaggaaactgcgtgaggcagacccgacacccgattccccacacccccgccataaactaccaccatatctgaccttggattaacctggattataatgggtcgctaacgactcaaccaactgctgttccacttctgcaaatgggaacactgcgaaccataattaaacagtgctggatacttcatttatttcacttttttgtttgcctctgtgtctgtggttcaccgcattcagttaatatcgcagttttagtgataaggtgctgcgacgacaccacattgcaaagtaatcagtgaaacatgctcgaatatcgaaccacttgtggcatgca

SEQ ID NO: 7745 - DNA, 663 bp, DROSOPHILA
atgcaccacgatcacagcggtatacctgctgcgacagcgtctccaatggatgcagcttccatgttcgacctgatccccgataccagcgatttgcaggcaagtcacgcgggtcacgccgctcacggagcgcacaatcatggcggtggctctggcacgggaatggagcacatgatgcccatggcgttccattttggctacaacgagacgatcctgttctcctggtggcacatcgaaacagtggccggtttgatcggctccatgatcgccatcttcctgctggccctaatgtacgagggactgaagtactaccgcgagtatctattctggaagacatacaatctgctggaatatcgacctgtgacggggccacaaagaaatccggaggcaccgcgcataccatcgccggcagcggcagctccatcgcccgttcaatacgtgggcgaagttgtgcacaagcaaccaccttcgatgctgtcgattaaccacctgctccagacactgctgcacgtgctccaggtgacgctgtccttcctgctcatgctgatcttcatgacatacaacgtgtggctctgcctgatggttgtcctgggcgccgccgttggttacttcctcttctgctggaagaaatcggttatcgtggacgtaaccgagcactgtcactaa

SEQ ID NO: 7746 - protein, 220 aa, DROSOPHILA
MHHDHSGIPAATASPMDAASMFDLIPDTSDLQASHAGHAAHGAHNHGGGSGTGMEHMMPMAFHFGYNETILFSWWHIETVAGLIGSMIAIFLLALMYEGLKYYREYLFWKTYNLLEYRPVTGPQRNPEAPRIPSPAAAAPSPVQYVGEVVHKQPPSMLSINHLLQTLLHVLQVTLSFLLMLIFMTYNVWLCLMVVLGAAVGYFLFCWKKSVIVDVTEHCH

SEQ ID NO: 7747 - DNA, 5697 bp, DROSOPHILA
cccaacagctgtttgtacacaaaacaagtcaaaagttgagcaattttaatttaattggcaatttgcacagaaatcatattgaaagctgcacaatgcaccgatcacacccgagtatcagtcgtcgcaagcatctcatgaaggagatgatggaggacgactacgcgctgcccacagaaactcagcagattgcgcgggtcatcagcagtcggggcaacaatctccacgaggtggagaccgtggacgaaacgttccttggtgagtggatgaataaagtcgaggaaaactccatggttagttaattttgaactagctattgccgggtatactagattttttgaaaagtatgtcacaggcagaaggaagcgatggaaccataccaagcatatatattcttgaacaggatcaatatcccaatcgatctggccatgtccttccgttcgtccgtatatcttcgtccgtccgtctgaacgtctcgataaagacatgttgagatagcccatcccaactcatttcatgttgatacttaataatgaatttgtatccttctgacccttttagtttcgatgcccaacaaattccgcaagagcatgtgggtgaaacgtggcgactttctgctggtcgaaccgattgaggagggcgataaagtcaaagccgagatttgcaaaatactcacacccgaacatataaaggaatacacaaaagctgcaatttggccggataaattcacaaagaaacctgtacaggaggaagccaccagccaaaacaaagacgactccgatttcgaggatgatctcctgcccaatacaaatcggcctgtaaatcgcgattcctccgacgaagaggaagatgaggaaacatccagcgaagaggactgaacgatgtacaaacacacacatagttaggttatttacaaatttgtcaaacttaattaaaaaaaaactgttggttaatgctggtgttgtttttgaacaaaatctgcccgcaatcaagaacaccttttgtgctttacaaaaatttgtatttacgatttgttcatactattgttaagtcttccaccatcgctgcatctcaggaatgtaacaaagtaatgtgtttgtgaatgctggtgctacttctaagttctcgtaaccgatctaatattgttgcaaaagctacacaaaagcctaagaaaggaattaataagcgctgagatcgacccttaaagcgtttatactcctcatttattaactgggatttgttcatggatctttatcaagattttccgagtcttcttgggtctccttcaggtcgacatcattcaattcatcgattttgggacaagccagagcagcttcgtgcttggattctagggccaaggttgagggccttgttttggtgaatggaaaattggtgaggtcctctatttgcggcgtgtgtacggcaatgaggtccgtctgagtggagctgcaatcaatgatctcggcctgcttcttaatagcgtcctgcggcagattgcacaccattgtgaggcagttgacgatggttccaatcgagctttgcagcatttgaacctgatcggtgagcatggtgcatcttttcgccaaatcatttaccacggcggctgaattttgatcgagactcaggtggccagaccctccgccattggagtcctcgccctgttccgcagcagcaggtattcccttgggatccacctccatggtggacacctttttccacagcgcattgatggcctgcatctgcagctgctgaatctttcgctcgttctcgagctgggccttcgtaagtagcatatccttgccgagttgtctgaggaatgcgacagatagagcattagaaagttgcgatatatgttgcctaaaacgagaccacctactcgatatactcctgtgtgcgtcgtcgctgcaatcgctcggctatgtccttgttggtcttcttgcgtgtgtgatagcctcgccacatcttttggatggtaacggccgaggactctgtcacgtgctcgatcagccgatcctggcagttcaggttgttgtccacctgctgcttcagctgctcctgatgcatctgctgttgcttctgagcggccatcttccggattgctctcagtttctctatgttgatttgctcgccgtcgtcgtcggtgctgaagccaccgctatcggccaaaacagccgattgctggagtttctccggtgcctgcatgttgtccgcgctgcacttattggccatcctccgtggactgctcgtagggctttggttcctcttcagttgtggacttcgcactcttggcaagttcagtttgttgtctgtagtgtaaatgtgtatgtatgttttagaaatctgtgtcgttttaaaagtctagagtaacaactactggctacctttatttttgttgatcttggtcttgtgcagctgagggttcagtgccgtaaccgtaactctttgggccacagcggcgggacagacatccgggctcatcagagtctccggaactgggaccattttcgaggcagccgccaatggaccaccagatggggtttgactgatgaacgtttgatctgtggaattgttgtttactattaacatcattttccactcttgcattgaatatattttaattgtcataccattgtagggattgggtgttatattccgtggcgtggactccgtggaattgtatgtcttggtggtcacgctgctggacattccgctgccggccaaactaaagccttcgccatcgtttttaatgttctcaatgagcgaaatgctcatttgcagcgaatgattcgtagatccattgtcgctaacaatgctattgttgctgctgttcccgtgatagctattcaccatggactccggtgatccctggcggccactcaagcgggagactttaaatcgaagacagaaaaatataagttatatgaaaaagcatagatagggagttaataacttacatctgggcgactgaatgcgactcgtgggcttcttgcgatgggatgagggcgaagtgctggcagaactatttgcgttatccatgatctcttcctgcagctgccgctgatggtgttgcgccttgctgaggatcagccggagtttcctatcgttttcattttccagcgccttgcccaccagcgggcacacagaacttaggtattttgccaagccctgctgctcgcccacacggaactggcgaccacgtccctggctatacagccattcggccttaagactctcaataggatcgaccacaaagccatcgatgtacttgaggctcatgcaccagtttaaaacaaaaggtcggtaatcaaagccactgcaagagatgttacattttaagcgcaatccatatgatccattaagctaactcactccaaactgttgatcatggtcacacagggattatccgcaatggaaatgctcagcaagttgctcagatgcgacagcgtacagatctcgttgagatcgttgatgctattcttggccaacgttagggtttccagtgaggtgggcaaacacttgtcgcactgcctcagatgcgtcaagcgatttccgtgcaaatatagctccttgagattgcgcaaataggacatatccgaaatgctgccaatgctattatccgccagattcaggcactccagattgacattcgtgttcagatgctcgatggtcttgatgttattcccctccagattcagaacgcgcagatggatgcattccttcaggccctcgatagagagtatgccattgaaggacagattcagttcacgcaggcaatgcagccggcagacgccatacatgcgcagcaattgatttctggccaaggagagctgaaatatttgaatttctgttaattaggaacttgtttcttttcgcagaacgttgcaagtcaccgtttcaattttgagatacgagtctatgttgtcgatcttctgcagctcgttctcgtccaggatgagctgccgtatgctgtgcgcatcgtcctgcttgggcaccttcttcagcttttgcttggacaagttcaggacgtgcttctcctcgccactttcgtcgcctgtttgggttaacaaagcacagtgggtagaaactaaggtttaccacttcatacttattatgcattaaacacaatatcagaattatgtaaaacaaaaagcccaaaaaggaaatacataatgcaagcttcactgtatacgtgtgcatgttacaaaattgatgacttcatcgaggggtccgcacttttcaagaagttggagaggaggtcagggcgcaggtgcgtcctttttagccaggacctcgaagcccccggcccgctgaacattaaccccaactccccaaaagcagactgcaaattcccatacagtcagcacgcaaatcccaatccccgcaaatcatattattagttactaatatatagtgcccattcttgcatagaactggcttcttaccactcatttttctgattggcaggccgaaattccaacgctgcggtcaatttttttttaatcagcagatacttagcgaaaaatcaatgggccactcttttttccacgcagtttcagattggcaatttcccaagtgtgcagctcagctgttccacttgcagtcctttggtttcaagccgggtttataattcagtccacgccatgatttgcaaacttaatttttattttagcgccgtgcaatacagtgaatttttgtttattgttattatactacgtctatcgataattggaggcgtgatgtcgttatcggcagcttgaaaactcaagactgcgccgctagttatcgattgcacttccttagacttatcgcaactgccaaagcccgcgtagttcaaaaagcttagtactgtgctgagcaattacccaataagaaaaccgatactctttacagtttacagtgttcgcataaagaataaataataagaactaaatttaaataaaatatttattttcataatttttttaaacaccccgtagtgttttatatttactgaaatgacgtgtgatccaatttctagctggatgccaaaacaggctattgccaccaaagacgatcgaagttaagtgaatttactgagcggatacaattccggagcacatctgcacgggatgctggcacagctgtgagctggtaacggaaacgggaatggaaatggcaatggcaatggaagaagcaatggtgatagtgctgatagttcggttcaatttcaggacttgatctcgatgcaggcatccggaatcggcgccacctcgcagccctcctggacaacgggcttaagtatggccagcgtggtggcaccgtccaagacctcatcctttcgcacgtgcagcatatcgatctcggtaagtgcaacatttggttcctagataagaaatatgacttgaaaatggactacagaagcggtacggaaggggaaattcaattgaattgaattgatcgttcaccttttccatggcggcgtccgacacctgtaaatggtatttgtcccggcaatagcgcgacagcaaggcaatgcccatttccctattcttggcgtacttcgtctcccaggcgtccagcaggcgattatagtaccgggcattctcgacatagcgcagatatacatgtgtgccggcggtggggaagatccgttccagcggctgacacctggccagctcgtcctcggcaacgatcaggcaacggacatcgtccggcagtaga

SEQ ID NO: 7748 - DNA, 2814 bp, DROSOPHILA
aataaacaaaaattcactgtattgcacggcgctaaaataaaaattaagtttgcaaatcatggcgtggactgaattataaacccggcttgaaaccaaaggactgcaagtggaacagctgagctgcacacttgggaaattgccaatctgaaactgcgtggaaaaaagagtggcccattgatttttcgctaagtatctgctgattaaaaaaaaattgaccgcagcgttggaatttcggcctgccaatcagaaaaatgagtggcgacgaaagtggcgaggagaagcacgtcctgaacttgtccaagcaaaagctgaagaaggtgcccaagcaggacgatgcgcacagcatacggcagctcatcctggacgagaacgagctgcagaagatcgacaacatagactcgtatctcaaaattgaaacgctctccttggccagaaatcaattgctgcgcatgtatggcgtctgccggctgcattgcctgcgtgaactgaatctgtccttcaatggcatactctctatcgagggcctgaaggaatgcatccatctgcgcgttctgaatctggaggggaataacatcaagaccatcgagcatctgaacacgaatgtcaatctggagtgcctgaatctggcggataatagcattggcagcatttcggatatgtcctatttgcgcaatctcaaggagctatatttgcacggaaatcgcttgacgcatctgaggcagtgcgacaagtgtttgcccacctcactggaaaccctaacgttggccaagaatagcatcaacgatctcaacgagatctgtacgctgtcgcatctgagcaacttgctgagcatttccattgcggataatccctgtgtgaccatgatcaacagtttggatggctttgattaccgaccttttgttttaaactggtgcatgagcctcaagtacatcgatggctttgtggtcgatcctattgagagtcttaaggccgaatggctgtatagccagggacgtggtcgccagttccgtgtgggcgagcagcagggcttggcaaaatacctaagttctgtgtgcccgctggtgggcaaggcgctggaaaatgaaaacgataggaaactccggctgatcctcagcaaggcgcaacaccatcagcggcagctgcaggaagagatcatggataacgcaaatagttctgccagcacttcgccctcatcccatcgcaagaagcccacgagtcgcattcagtcgcccagattctcccgcttgagtggccgccagggatcaccggagtccatggtgaatagctatcacgggaacagcagcaacaatagcattgttagcgacaatggatctacgaatcattcgctgcaaatgagcatttcgctcattgagaacattaaaaacgatggcgaaggctttagtttggccggcagcggaatgtccagcagcgtgaccaccaagacatacaattccacggagtccacgccacggaatataacacccaatccctacaatggtatgacaattaaaatatattcaatgcaagagtggaaaatgatgttaatagtaaacaacaattccacagatcaaacgttcatcagtcaaaccccatctggtggtccattggcggctgcctcgaaaatggtcccagttccggagactctgatgagcccggatgtctgtcccgccgctgtggcccaaagagttacggttacggcactgaaccctcagctgcacaagaccaagatcaacaaaaataaagacaacaaactgaacttgccaagagtgcgaagtccacaactgaagaggaaccaaagccctacgagcagtccacggaggatggccaataagtgcagcgcggacaacatgcaggcaccggagaaactccagcaatcggctgttttggccgatagcgagtcctcggccgttaccatccaaaagatgtggcgaggctatcacacacgcaagaagaccaacaaggacatagccgagcgattgcagcgacgacgcacacaggagtatatcgaacaactcggcaaggatatgctacttacgaaggcccagctcgagaacgagcgaaagattcagcagctgcagatgcaggccatcaatgcgctgtggaaaaaggtgtccaccatggaggtggatcccaagggaatacctgctgctgcggaacagggcgaggactccaatggcggagggtctggccacctgagtctcgatcaaaattcagccgccgtggtaaatgatttggcgaaaagatgcaccatgctcaccgatcaggttcaaatgctgcaaagctcgattggaaccatcgtcaactgcctcacaatggtgtgcaatctgccgcaggacgctattaagaagcaggccgagatcattgattgcagctccactcagacggacctcattgccgtacacacgccgcaaatagaggacctcaccaattttccattcaccaaaacaaggccctcaaccttggccctagaatccaagcacgaagctgctctggcttgtcccaaaatcgatgaattgaatgatgtcgacctgaaggagacccaagaagactcggaaaatcttgataaagatccatgaacaaatcccagttaataaatgaggagtataaacgctttaagggtcgatctcagcgcttattaattcctttcttaggcttttgtgtagcttttgcaacaatattagatcggttacgagaacttagaagtagcaccagcattcacaaacacattactttgttacattcctgagatgcagcgatggtggaagacttaacaatagtatgaacaaatcgtaaatacaaatttttgtaaagcac

SEQ ID NO: 7749 - protein, 774 aa, DROSOPHILA
MSGDESGEEKHVLNLSKQKLKKVPKQDDAHSIRQLILDENELQKIDNIDSYLKIETLSLARNQLLRMYGVCRLHCLRELNLSFNGILSIEGLKECIHLRVLNLEGNNIKTIEHLNTNVNLECLNLADNSIGSISDMSYLRNLKELYLHGNRLTHLRQCDKCLPTSLETLTLAKNSINDLNEICTLSHLSNLLSISIADNPCVTMINSLDGFDYRPFVLNWCMSLKYIDGFVVDPIESLKAEWLYSQGRGRQFRVGEQQGLAKYLSSVCPLVGKALENENDRKLRLILSKAQHHQRQLQEEIMDNANSSASTSPSSHRKKPTSRIQSPRFSRLSGRQGSPESMVNSYHGNSSNNSIVSDNGSTNHSLQMSISLIENIKNDGEGFSLAGSGMSSSVTTKTYNSTESTPRNITPNPYNGMTIKIYSMQEWKMMLIVNNNSTDQTFISQTPSGGPLAAASKMVPVPETLMSPDVCPAAVAQRVTVTALNPQLHKTKINKNKDNKLNLPRVRSPQLKRNQSPTSSPRRMANKCSADNMQAPEKLQQSAVLADSESSAVTIQKMWRGYHTRKKTNKDIAERLQRRRTQEYIEQLGKDMLLTKAQLENERKIQQLQMQAINALWKKVSTMEVDPKGIPAAAEQGEDSNGGGSGHLSLDQNSAAVVNDLAKRCTMLTDQVQMLQSSIGTIVNCLTMVCNLPQDAIKKQAEIIDCSSTQTDLIAVHTPQIEDLTNFPFTKTRPSTLALESKHEAALACPKIDELNDVDLKETQEDSENLDKDP

SEQ ID NO: 7750 - DNA, 3690 bp, DROSOPHILA
acacacgctcaagtgtgtaaaaatatatatatgtatagacatgaaaatccaatgtgtgtgcatttctctttccaacatttcaatttttaatcgctccatttttccagctgccactttggagcattctttcgcgattgcctttcgcgaatttgccagttatgagtgtgagtggcggctgagaagtatgaaacactccaataaatgagtaatatccgctgctaccaatgactaatttggtatatatgtatacgcacacattcatgaccatgtatatgcccgaatatggccaacgaacatataggcaaaaaaaagtggaaatatatgtatgattgatatatacacacttatctaaatatgtatgtatatacagatttcaaaggagagatgcttatatgattcatcgaatcgaagacattatttgcactccacctcgcttccaaaagtgcacaatgaccggccgcttttaccaccgagtctgaatgcgagtcccaagtgtacgtaccatttttcctgtagtttttcgctttcacaattctcaaattgctgcttcgccgagtatatattttacaaatactgtttaaccttccgccttctttcacgaacaaccggacgaatcaatttggtcggttatttcgcacaggttagggttgccaggcgccggcaaagtatcaacatgcgtcgtgacgcgtcgcgacgtttgtgaagcgtttggaacggtgaaatggcacactttcgatctttcaaaatgtcaaatattttagggtgctttaaaatacatagtatagtttgagttaatttatttatttatattaacaaattgcactatactttcgtgtaataaagctgaagatttacagatttgaatcttaacacattcgctgttttggaacatagaatatatatacatagtttacacttatagctacaatttattacttcaatatcaattcatcccaaagctaatgatattctttgttgtatagtattgatcttagtatttattaattagtacaacgattgcgatgaaatttgtatttaacagttaatataatatgttaaaagcgatattattaacgataaatatattttgactaacaagcagaccgaacattaagaaatttagcacaagccaccttcgtcctcggcgtcgttggtttcctgcgagagagaaagagagaaaatacgaaattcttgttagctatttagtttactgcttcgcactgtcccaagtcttctatcgacaacaaaggcagattcaatcgcctatcgataacatcataataagagccaaatttacaaaacaaaaattgcaaattccatttttagaataaaaatactcacagcagcagtgtcgccagccttcttctccatctgtataccctgaggtagtggaatgtttttagatagaatagcgtactcaacatccatatgtcgtatgaatggggatgccagcatcctagcagctaactcgggatcctcgtcatcgaaggcttgcagaagggtctgcagtgtggacacttcctctggctcgcagcagtttccccactccctgaaggtcttttcggcttccacggaatccccgcgagccagttggaccatcaccaaggccacaactaggcgtccaatttgtccgtaagattccgtttgctgattcaagctgatctcctttttgagcgcattcgtggcttcgtcgtacctggagtgattggatgatataagctaaggatacccaaagtgattcgttgcaatcataggtacatacctccttagtttgaccagtatcctggaaacttttgatgcatactcggctgcttgacggacggaatcctcgatctgtcgggtaagtataaaattaatagtttaagaatggaattgactagagcagtgtcaaataggacgaaccattatgacttctagagcatgctgatagaagcgcaaagccatgtcaggatgcttggattcagttaacttggcggctttatccaaggcggatgcggctgcctctggggaaccgtgctgttgatacaaactcgccgatttgttggcgtattcctcaacttcgtgtagcttatcggcatcctttgacagcaaaatgatctagaagatgtgcacatttagagggtttaaatttcctattaacttcacttatattaacttcaatttaagctcacctgttcgtatgcctttgcagcatggaaccaagacttgttgtttttataggcgtcgattgccttcagaaaacactccttgctcttatcataacttttagctattcgatatgcagtggctgcaattaaaaatgtaaaagaaagatacataattgtacaccaatatgtgtgtatcttgcaagttatggatactttgggataatcgttagctgtaattcatagtatttacatatctcattgatgtcacaatgtttttatagatagatactctgggtgatattagtcactcctactttgtgaaactcaccagctttggaatactcatccgcagcactatcgtaatcaggaacccatttcagcatggacaacttcaagctgcaaataaagatgggtgttatttggaaacccctttataaggatatttttgttggggatacctcttctcggcctgcttcaccaggtcctccgcttcggcaatctttttggcagcgattcccgacattttcaaccacttttgtttagcaggaaaaatcaattgtttacgtttgaaaatagtgtgaccgaatgcgagaaggaaaataacaatggttcgaaaatcacggtggtttcgaatctttgaaaaccgaaagcagtacgcatgtctgaaaatttcagaaaagcaaagcctgattacaccgggaaaaaaaagttggtcttataaagcagttgacttcgaaatgaaaatgccatgtatttacatacatctattcatttttttattttatctatgatatttaaaaagtagagtatgtgtaacgaacaagatcgaattgaagtgtttttaattgattgaaaatgattttccactcctgatttctccgcgtgcatgtcatacctgttctgttttgatttgcaagtaaataagaaagtgcattaggtaagaaatcgcagttttcgccaatttcaatctggagtaagtggaaattttggatttattattaagttgtttttaagcgaagatttatttgaatttgcttacgaatccggatattctgagctttgcgaatgtttgattataatttgcaacactttttcgtttctatactttgcagacttaaaaatgtcccacaaatcttgcgtggaactgagcgaaattcgaaaattggataaaatagtgcagcaatgcgagctgtacatgtccaacaacaatattaacgataatgcggccaagaaaccgcctgtgaaggaattcaagcgcaattgccctgcaaaatcgaacaaatttgtggagagggaactcttctcgctcatgtgcaacctgaacaagattgaaaagaagcaggttttcgtttcagatatcctgattaacgccagcatgttcgacgacaagaaggagagtttggcgcggtttccgaaaaacgtgtccgaccacaacactctggtgtaccacaaattcctgaggactcgacccactaacgatgatgaagccctaaagctgaaggctggtggaaaatcgaaggagaggccaggcacgaaaatcacg

SEQ ID NO: 7751 - DNA, 1048 bp, DROSOPHILA
ctaaacaaaagtggttgaaaatgtcgggaatcgctgccaaaaagattgccgaagcggaggacctggtgaagcaggccgagaagagcttgaagttgtccatgctgaaatgggttcctgattacgatagtgctgcggatgagtattccaaagctgccactgcatatcgaatagctaaaagttatgataagagcaaggagtgttttctgaaggcaatcgacgcctataaaaacaacaagtcttggttccatgctgcaaaggcatacgaacagatcattttgctgtcaaaggatgccgataagctacacgaagttgaggaatacgccaacaaatcggcgagtttgtatcaacagcacggttccccagaggcagccgcatccgccttggataaagccgccaagttaactgaatccaagcatcctgacatggctttgcgcttctatcagcatgctctagaagtcataatgatcgaggattccgtccgtcaagcagccgagtatgcatcaaaagtttccaggatactggtcaaactaaggaggtacgacgaagccacgaatgcgctcaaaaaggagatcagcttgaatcagcaaacggaatcttacggacaaattggacgcctagttgtggccttggtgatggtccaactggctcgcggggattccgtggaagccgaaaagaccttcagggagtggggaaactgctgcgagccagaggaagtgtccacactgcagacccttctgcaagccttcgatgacgaggatcccgagttagctgctaggatgctggcatccccattcatacgacatatggatgttgagtacgctattctatctaaaaacattccactacctcagggtatacagatggagaagaaggctggcgacactgctgctgaaaccaacgacgccgaggacgaaggtggcttgtgctaaatttcttaatgttcggtctgcttgttagtcaaaatatatttatcgttaataatatcgcttttaacatattatattaactgttaaatacaaatttcatcgcaatcgttgtactaattaat

SEQ ID NO: 7752 - protein, 302 aa, DROSOPHILA
MSGIAAKKIAEAEDLVKQAEKSLKLSMLKWVPDYDSAADEYSKAATAYRIAKSYDKSKECFLKAIDAYKNNKSWFHAAKAYEQIILLSKDADKLHEVEEYANKSASLYQQHGSPEAAASALDKAAKLTESKHPDMALRFYQHALEVIMIEDSVRQAAEYASKVSRILVKLRRYDEATNALKKEISLNQQTESYGQIGRLVVALVMVQLARGDSVEAEKTFREWGNCCEPEEVSTLQTLLQAFDDEDPELAARMLASPFIRHMDVEYAILSKNIPLPQGIQMEKKAGDTAAETNDAEDEGGLC

SEQ ID NO: 7753 - DNA, 3591 bp, DROSOPHILA
aggtgagcagcggattgggagcacaggaggcgtcgcccatactggcgcagtccgcggtaattaaggcgttgctttcgccgctgcaggaaacatttcactttcgggccccagtgggccatttcttttggccccatttgcatatcgtttggaaatcggactaaagatttgtttctttgtttgtttgtttgtttgcctaaatgaagcccgccgatcgataaaacgcggtcggatttgattgataacattgcttaaatggtggcctgttgcttgctttgcttcttaaattctctgtataccatttaaatatagaaaattactaacagaaaagaattcataatgtaaatcttatagcttaggttttcattatgatatggttataccaagctgcttcattgatatatatagtatatacagagataataatctaggccattccttattctaaatgactaatgatgcttaactctttctccacatgaaacgctaactgttaaccaatgataaccaacgataacatcacatcgacaacagtcctaacacacacctctttggcgctacttacctgggcgaggattctaaccagcgacgtggttcgcagcagcagacaacaccgaatgcacgactgcagcagataacacagatctctccgtccggacgatatggggctaaacgtcccacctgcagcatggccgaggtactgagagatgctcctcaagcgtaaggatagccatgagggttatatttcgatattgttggcttatatcattccgttgaaagctaaatataattatttgttaatataataatctagagttagggaaatcaagggaattgccagttaattggttaattgggtgacccatttttttgttgctagaaatcaaaaagcattcggatggaaaaacataatcctagttggccaagctctccaactttcaatctgtcagagtcaagatccccaagcgactgtggatttagctcagtttaaatttatacatcccagcggtcggatagctctttcgacttccttcctgtatacaaaaatatatttgtattttgtacacttttttttttgtaactgaaaaaaaatcatcaactactttcctcgcgatttgtgctgaatttttcgtgcggcttgctaattttcagtgatttaatttatggatgccaaacgtggtaatgccaccggggcacgccaagtcggtggtggtggtggtggtggctatcatgcctccaagacgagcgttgctgtaagttggtcgactaactaacactcctcgagatgatgactgaataacttggtttacagtcacgccatgccgctggtggtggagtagcaccggcagtgggtcgcaagcaggtcagtcaggtcagcctgacgcccagccagtcaaggaataccaatgccaccgaaaatgtaagatgctgctttccgcattcggaatcattaacccaaacgataaatcacagccactcaagagtccattggacgctttaagccgcagcggccccgtacgcaatcagaatcccttccagcgtcgctctggcttgcaggatgtcgatgaggcttttctggcatccaacatttttgctcgaccgtcccgtgtccgccattctggacttgatcgggagatcatgccacaggccgcagtaggaggagcagtagctggtggacagcaagcatcgcctcccattcccacccagcagcagcatcatcaacagcagcagcagcagcagtatcagcagatacccccagtggatgccgtgccacagcagcagatggctccgccggcagtggtgccacagcagcagcaaatgcaacagcagtacgtgcaacagccggctgccggtcagccgacacgcatggatccaccaccttcgggacgagctcatgtccatcaacagcaagtaccacatcagcagcagcagatgcagcatcagcaacaaatgccaccgcaaactggctacgagcagcagcagcagcaagtgattcaaccagatgcacaaatgcagaataaatatgcaaaccagcagcagcagcagcatcagttgcagccgcaacatcagtctcctctgaatggatatgtaaatattactacgttcatagacaattttcgaagaggttaaccaactacacacacctgacccacagccctctcagccgccgaatgcggttgctccgcaggcaactatgccaaccaccggaggaggagcagcaccagctccaggagcaactggcggcagtaatgcacccagagaaaacgctggtggctctgctgcaccggcggaagccgagatgtgcaccacatgccccaactgccagaccacgatctatttagtacggtccccggaacttggacacggcgatgccggtttacctgtccagtaaatgattaaatctccgccgagtgaaatgcaccaaattctaagtgcatacttctgttgtttcatcatgttttgttttaatgtatcgacattttctgaaggaatcgcaacttcaaagaagctccttttaaactggaccgtaatataatattgggacgaatgtgtgtaaattgaacaattcccaataaaacaaattagagagttgtaatttagccggttaaatagagtgggtggtcaaatggggtggttatatcagcaccaaaatcttaggggttgatattttggctgcgtgccaagtggtttttttttttgtttggggtaacaaaaagtatattatatatagtatacatattaagttgtagagctggcaagtaatagagaaactcgttgaattttaggtcccacgaatgggctattaatataagttaataggccgatcttatctgaaattattttcacctcgaatttgacccaataaatttctctatttccagataattcatgccggcaactcgaagggcggaaatggcaatggcagtgcagaagcgaacaggtaaaagcgcttaattatttaattaattaatatcaatttccctggcattatcattttgtgtgtttggtcttcatttgggtttcattttgttctttttcgtttgtctttcagaatcaaatagacaaagccagtccacaaaaattgcacacggctgcttcacataaaagaatataaatagaaatcgacactagataaactgatatatcaactaaataaccattgtacaaagctttgattttagccaattatttatattttcgcctagttaatttataaacaaccgatgaatttacttaatgtacaagtacaaacagaagaagctgcacttgccgcatgccaccacccaccaccaaccacccacattgcaacacaagaaataaagaaaaatatgaagagtatcagcccactaaatcggatccgttacacaagacacacgaaaatacctgacaaattgtgattacaacatatataacttatcatttaacatttaactacatacttgttggtcgtaacttatttcgttttttctcgagcaataaaatcaattgaattcaatgaattcaggtgtttctcagtgctgttattatattgtagttgttaagtaaagactagttttaaccgctttgaaaactcttccaacagtggcaatggta

SEQ ID NO: 7754 - DNA, 1412 bp, DROSOPHILA
cagcggtcggatagctctttcgacttccttcctgtatacaaaaatatatttgtattttgtacacttttttttttgtaactgaaaaaaaatcatcaactactttcctcgcgatttgtgctgaatttttcgtgcggcttgctaattttcagtgatttaatttatggatgccaaacgtggtaatgccaccggggcacgccaagtcggtggtggtggtggtggtggctatcatgcctccaagacgagcgttgcttcacgccatgccgctggtggtggagtagcaccggcagtgggtcgcaagcaggtcagtcaggtcagcctgacgcccagccagtcaaggaataccaatgccaccgaaaatccactcaagagtccattggacgctttaagccgcagcggccccgtacgcaatcagaatcccttccagcgtcgctctggcttgcaggatgtcgatgaggcttttctggcatccaacatttttgctcgaccgtcccgtgtccgccattctggacttgatcgggagatcatgccacaggccgcagtaggaggagcagtagctggtggacagcaagcatcgcctcccattcccacccagcagcagcatcatcaacagcagcagcagcagcagtatcagcagatacccccagtggatgccgtgccacagcagcagatggctccgccggcagtggtgccacagcagcagcaaatgcaacagcagtacgtgcaacagccggctgccggtcagccgacacgcatggatccaccaccttcgggacgagctcatgtccatcaacagcaagtaccacatcagcagcagcagatgcagcatcagcaacaaatgccaccgcaaactggctacgagcagcagcagcagcaagtgattcaaccagatgcacaaatgcagaataaatatgcaaaccagcagcagcagcagcatcagttgcagccgcaacatcagtctcctctgaatggatatccctctcagccgccgaatgcggttgctccgcaggcaactatgccaaccaccggaggaggagcagcaccagctccaggagcaactggcggcagtaatgcacccagagaaaacgctggtggctctgctgcaccggcggaagccgagatgtgcaccacatgccccaactgccagaccacgatctatttagtacggtccccggaacttggacacggcgatgccggtttacctgtccagtaaatgattaaatctccgccgagtgaaatgcaccaaattctaagtgcatacttctgttgtttcatcatgttttgttttaatgtatcgacattttctgaaggaatcgcaacttcaaagaagctccttttaaactggaccgtaatataatattgggacgaatgtgtgtaaattgaacaattcccaataaaacaaattagagagttgt

SEQ ID NO: 7755 - protein, 349 aa, DROSOPHILA
MDAKRGNATGARQVGGGGGGGYHASKTSVASRHAAGGGVAPAVGRKQVSQVSLTPSQSRNTNATENPLKSPLDALSRSGPVRNQNPFQRRSGLQDVDEAFLASNIFARPSRVRHSGLDREIMPQAAVGGAVAGGQQASPPIPTQQQHHQQQQQQQYQQIPPVDAVPQQQMAPPAVVPQQQQMQQQYVQQPAAGQPTRMDPPPSGRAHVHQQQVPHQQQQMQHQQQMPPQTGYEQQQQQVIQPDAQMQNKYANQQQQQHQLQPQHQSPLNGYPSQPPNAVAPQATMPTTGGGAAPAPGATGGSNAPRENAGGSAAPAEAEMCTTCPNCQTTIYLVRSPELGHGDAGLPVQ

SEQ ID NO: 7756 - DNA, 4164 bp, DROSOPHILA
gtgttgtcggtaatggaaacgatgttcagcccacccatttgcagtcctttgatggccgactgaatcaaaacatttaattatttttaagtgacatgagagacaaaaagtattgaacataccattcttccagggccaagaccacgaacctttactcgcactgtcttccagcccaattcaatggctttctgaaatacaatttaagttttttgttttaaatgattctatgcccatattatactattcaaatgcatatatggtatacaactataatggagattatctcgatgttctatgtagtttttgaccatcctactttggtaaaacctgtttcttgtggaaatgacttactccactaatggtaaccgctgtagcttgagctgctatgttggttcccttgcgagtgtttttgaatccctcaattccacaggatcgtatcagccggaggactcctggaaagagggatactttagatcacagttagagtaacgttccagatgacccacctttgtgatccgtgacggaaataattgtgttgttgggtgaaacgcgaatgttgcagatgggcagctcgttgaagggtattccattgaataacgtgttggcggtgctggcatccgggaaaaacttagccttgctaaatggaaaattaattgaattcaagactatttacaaatgtaaaattgaattccaaccggttgataagtgtgtcgatgtccacggtcttttcgcccacggttccttcgtctttggccggtaaagatgccagcatttccttgcggtcctccgccttccgccagcaagcgctcgtgtgtatcctagaagtctggagcggcacagcgggcatagtaatactccgaagagcacttagaaatacacttttcagtgacattattaatttacttcgcagagggttcacaaaaaccaaattacatcacactgccagtctggcaacactggcagtgttggctagcacgccacaacaagtggccacgcttcgtggtgactgacaaaaagtcaagaagaagactattttcacgtgttcttgttttaagttggttttgattccggttatcctcgtgtaaaatggctttaaaaaggttgaagagtaagtaatagtatatatgtatatacattaaatgaagctctacatctattgtcaaaatccacagccaagaaatccaagaggctcaccggtcgcttgaagcacaagatcgaaaagaaggtgcgggaccacaacaaaaaggaacgtcgcgcagccaagaagaatccaaagaagggtagcaagaaacagaagctcatccagatcccaaacatctgtcccttcaaggatgacatcctcaaggaggtggaggaggccaagcaacgtcaggaggccgaacgtttggctcgccgcgaagcctttaaggcggaacgcgaacagaacaagttcaagacgctggagtccatggtcgaggatgcagacatgcggagcaccgtgcacggaataatgcacgaaaacgatgcccaggatcaggacgaaaagaagtacaagaacgccgtgaccaaagagcagtcattgaagcagtacttcaaggaattccgcaaggtgatagaaaatgccgacgttgtcctggaggtggttgatgcacgtgaccccctgggaacccgctgcaatgaggttgagcgcgccgttcgcggtgctccgggcaacaagcgactggtcctggtgctcaacaaagccgacctggtgccgcgagagaatctgaacaactggatcaagtacttccgtcgcagcggacctgtcaccgccttcaaggcttccacacaggatcaggccaaccggctgggacgccgcaaactccgcgaaatgaaaaccgagaaggctatgcagggttctgtctgcattggcgctgagttgcttatgtccatgctgggcaactactgccgcaacaagggcatcaagacctcgattcgcgttggcgtcgttggaattcctaatgtaggcaagagctccatcataaactcgttgacccgcggccggtcctgcatggtgggcagcacgccaggagtgaccaagtaagttcatatttatcctttatagtacctcgaacttatacgatatatatttatttttgcagatcaatgcaagaagtagaactggattcgaaaatcaaactgatcgattgtcctggaatcgtatttaccagcggaggtgaaaactcgcatgcagttctgaagaatgcacagcgtgtgggcgatgtaaaggatcctttcaccattgccgagagcgtattgaagcgtgccagcaaggaatacttctgtacgatgtacgatattacaaactacgacacatttgaggaattcttcgccaaaaaggcagccagaatgggtgagtactatgaatgcttactgctgtacatgataataatccatttctttaccttaattataggcaaatttctaaagaagggagtgccagatgttgtggctgcagcaagaagcgttctcaacgattggaacacgggcaaaattaaatactgcacacagcctccggaagttcaggaagggcaaagtgtgcatataagtgcctcgatagtacactcagaggctcgcgaatttgatgtggagaactttgagtccatggagacggaaatcttagagcattgcgccgtgaaaacggatgacattatggagataacgtctacggggcctttagagattcgacagccgcgtgaggaagccgaacctgcagataaaataactgccagtttggtaatagacgagaaggaaaagcccgcaaagggtcgcaaacgaaaactggatgaggaaaaggagaaggttgatcccagtctactcctagaaggtaagcaaatcaaaaccattaccatggaacataaaaatgtattaacgctgtgttatttataaattctagaaaaccaatcactgaataaaggcataaagcagatgcaaaagctaaaaaagaaacagaatgttcgcaacgagaagaaaatatccaaaattacagacgttctggatagctttagcttaggtccatcctcgtccaaggcagaaaaatacgattttgatgaggactatgtgattgaataaattctgccttagttttaataattaaatctgtagatagtacactataatatagaaaggtgtaatgtctctgaaaaactaatataactttttattactttggaaggatggctgcatccatttcagaatcgcaattgtgttcccttctactgggtatttcactgtattccctcaaagaagatgaacatattgtaaatgtttaacgtggatcgcatttattcttagaacgaaatacatacaaggctgggattctaggatggcctacatgcagtttggtttggtaaggggttaaagatcatctagcgcacggatttcaaatagagcaccagttcctcgaattcgcatttgctactgttggaaatgcaaacgaagttggtgcttcgtcaatggacataaagtgattacagatttaaataaaattattctatggtattcagctcatgtaagtatcgtgttgtgatatctttttatacacttgacaaatgacagattttttaatttaaacaatgaatgtacgtaataatgacaacgaaaacagtcaaaatatcaacataaaacaaataatgttcgaacatgacgtgtgctttctaaagccgattggatcctaatgcgctagaatctaaaaccgtattgaatttgttaatggtgtttttttgttagcctaggatctatgcagattctactgaacagatttgtatttcagtgatgtttggtttcatttgggtggggtataaattatgggcttgggtttcttctaaaaacgtcgcatagaaaatgtagtggctttttgaatgtattgcatcgtaactagacttttcgccattctcaaaactattaaccctgatgtgccttctgttaagtatgtatgttagattaaatatttatacatatcatatagctactggcaatggagctctagccccttgcatcggtacgtcctacatgtgtatatatatagagtgaatcacaggatttcaatttttgctaagtatttttaacaatcaattactatgtatttcggctcgactcgctacgacttctcgtcaccgctttctctctctctctctctctctttgctct

SEQ ID NO: 7757 - DNA, 1906 bp, DROSOPHILA
tgactgacaaaaagtcaagaagaagactattttcacgtgttcttgttttaagttggttttgattccggttatcctcgtgtaaaatggctttaaaaaggttgaagaccaagaaatccaagaggctcaccggtcgcttgaagcacaagatcgaaaagaaggtgcgggaccacaacaaaaaggaacgtcgcgcagccaagaagaatccaaagaagggtagcaagaaacagaagctcatccagatcccaaacatctgtcccttcaaggatgacatcctcaaggaggtggaggaggccaagcaacgtcaggaggccgaacgtttggctcgccgcgaagcctttaaggcggaacgcgaacagaacaagttcaagacgctggagtccatggtcgaggatgcagacatgcggagcaccgtgcacggaataatgcacgaaaacgatgcccaggatcaggacgaaaagaagtacaagaacgccgtgaccaaagagcagtcattgaagcagtacttcaaggaattccgcaaggtgatagaaaatgccgacgttgtcctggaggtggttgatgcacgtgaccccctgggaacccgctgcaatgaggttgagcgcgccgttcgcggtgctccgggcaacaagcgactggtcctggtgctcaacaaagccgacctggtgccgcgagagaatctgaacaactggatcaagtacttccgtcgcagcggacctgtcaccgccttcaaggcttccacacaggatcaggccaaccggctgggacgccgcaaactccgcgaaatgaaaaccgagaaggctatgcagggttctgtctgcattggcgctgagttgcttatgtccatgctgggcaactactgccgcaacaagggcatcaagacctcgattcgcgttggcgtcgttggaattcctaatgtaggcaagagctccatcataaactcgttgacccgcggccggtcctgcatggtgggcagcacgccaggagtgaccaaatcaatgcaagaagtagaactggattcgaaaatcaaactgatcgattgtcctggaatcgtatttaccagcggaggtgaaaactcgcatgcagttctgaagaatgcacagcgtgtgggcgatgtaaaggatcctttcaccattgccgagagcgtattgaagcgtgccagcaaggaatacttctgtacgatgtacgatattacaaactacgacacatttgaggaattcttcgccaaaaaggcagccagaatgggcaaatttctaaagaagggagtgccagatgttgtggctgcagcaagaagcgttctcaacgattggaacacgggcaaaattaaatactgcacacagcctccggaagttcaggaagggcaaagtgtgcatataagtgcctcgatagtacactcagaggctcgcgaatttgatgtggagaactttgagtccatggagacggaaatcttagagcattgcgccgtgaaaacggatgacattatggagataacgtctacggggcctttagagattcgacagccgcgtgaggaagccgaacctgcagataaaataactgccagtttggtaatagacgagaaggaaaagcccgcaaagggtcgcaaacgaaaactggatgaggaaaaggagaaggttgatcccagtctactcctagaagaaaaccaatcactgaataaaggcataaagcagatgcaaaagctaaaaaagaaacagaatgttcgcaacgagaagaaaatatccaaaattacagacgttctggatagctttagcttaggtccatcctcgtccaaggcagaaaaatacgattttgatgaggactatgtgattgaataaattctgccttagttttaataattaaatctgtagatagtacactataatatagaaaggtgtaatgtctctgaaaaact

SEQ ID NO: 7758 - protein, 581 aa, DROSOPHILA
MALKRLKTKKSKRLTGRLKHKIEKKVRDHNKKERRAAKKNPKKGSKKQKLIQIPNICPFKDDILKEVEEAKQRQEAERLARREAFKAEREQNKFKTLESMVEDADMRSTVHGIMHENDAQDQDEKKYKNAVTKEQSLKQYFKEFRKVIENADVVLEVVDARDPLGTRCNEVERAVRGAPGNKRLVLVLNKADLVPRENLNNWIKYFRRSGPVTAFKASTQDQANRLGRRKLREMKTEKAMQGSVCIGAELLMSMLGNYCRNKGIKTSIRVGVVGIPNVGKSSIINSLTRGRSCMVGSTPGVTKSMQEVELDSKIKLIDCPGIVFTSGGENSHAVLKNAQRVGDVKDPFTIAESVLKRASKEYFCTMYDITNYDTFEEFFAKKAARMGKFLKKGVPDVVAAARSVLNDWNTGKIKYCTQPPEVQEGQSVHISASIVHSEAREFDVENFESMETEILEHCAVKTDDIMEITSTGPLEIRQPREEAEPADKITASLVIDEKEKPAKGRKRKLDEEKEKVDPSLLLEENQSLNKGIKQMQKLKKKQNVRNEKKISKITDVLDSFSLGPSSSKAEKYDFDEDYVIE

SEQ ID NO: 7759 - DNA, 6031 bp, DROSOPHILA
aacaacacatatctcacacacacacactcgcacatcaagtcgggctaacaccgacattgacgtcacctttgcttactcgtgggctgggttaaattgccggcacagaattgtaatcagcttcgagcccaataaactgcatgagtgtaaatttccggaatgtaatcgcccccaaatcaaaatagagtactcgatggccttcgagcacttagatggtacaatcgggtatttgggctggaggatttgggtatcaatagcacacggctggcaaaggtctaaattgggcacggtcagagttcaacacggcaaaaattccaattccaattagaacaccaagacgaggttttcaagttttttgtaaacgtgttcgttttaaatttattggtttaaaaaagagaaaaatgtttggtaaacattaaagactttaaaccttttttggattaatagttagtattaacactttgtttatggtttatttattaacttataagaaaaatagataacagttaaagaatagtgaattaattaacgtattattatcatctacgacgtcaatggcttagaaaagaaaataaataaaatttaaaatatagttttaaagactgatttattaaaacaatccatggcattacaagaagtatttgctaaatttgaatttaaaatcgcccgccgagaatcgggcaatgcaaccctggattgcggctctctcgctgtgcagtgaacaaaatttgtgtatctaatcggcgagtaagtagtataacaagctcaaagattggtcggttcctttctgcattattttacagctgtattttcattaacaattagttatgctaagggaacttaaaatttatttttcaaaattttcaaaccgtggaggggaaattgcgccacgactttaaacgctgagaatccaaaataaacgagaagagccgtaccgaactggttcgtggcaatgctgggggcgaaccagttccgacgctcaaatgagcgctgcgaccagggctgcattgccaccctcgagctgcacaaagaaaaataatttactcgccagcagctcattggcgttttttcattttttaaagtgtacttaagagttgttaatatttttcgcagtgctcggcccgaccacaacaaacaataatagccgaataatagtgtgagtgaaaatgcggcgagctgcattcggcgcaaaaccaagtgttccgcagcacccaaagcccaaatcgaacaactcgaaatcggaatcaggcgaagccatcattagcgagacatttgtatttgtctgacccctcagcggtgtctgagaatctcggagagtcgtcgtggagcggtgtggagaggagagagcaggagcagaaaagggcccacaatccaagtccaaggaagcaccactccgataccgaaccgatatgggtaggtgtatacggtctatacggtctatacggtctatacggtgtatatggtgtacatggtgtgtgttgtatgtaggtggtgcatgtagatatgtagtcgtgaatcgcacgatatcggggggttaaggtggagccccgttttggggtacagccgatgcaggccaactaggagcatttgtgcgtgatgcgcgcacttcaagtcgctgtcctgcctacctgccccgcctcccccgtcacttgcccatcgactcggcgaacgcaacgccaccagggctgcagcacagcgtcgctaatcggctgccgtcgtcggtgttattgttgttgttggaggtgtcggtggtagtggtggtgggttgcaagaacgaattgaatatcgaacaaagggctcgttgccgatagttggttcgaaaggagacttatgaatacattcattttatggcactaaaatatgttatgaccattggaaaacagcttttattatttttttgaatcaaatagaaattgaaaataatataaattgaaaccattattaacataataatgaatatcctaaattaatttataaacttgaaaattacaaatgtcatgtcaattaataatttatcagaaagaagctgcttataaaaattaaagtaaccaaaagaataataataaaatttgatagtttgcttaaaacgaaaaaatagaaaaaacggaagtcactagatctaatttgatttacatagttattattattgtgcacaatgcagcttctttactaaaccctatgataaatataaatacaataatattgcgacaagtgcatttaagacagaactgaaagacccagccctggtaggcgcatacaaacccaaaccaaccgaaaatcaaatttgcatttgtttacgttcgccccaacatgctataatctcaattccccactcgcagaaaccgagtcgatggctccaagcagcagtgcggcggctgcagccaccaagctcctggtggagatcaccaccgacggaatacccaagctgcactgcccggtgtgcaacaaggcgctggtctccctagccggatatgtgaagcacgtaaagaagcaccagccgccgggcggcttcgagtgccgtcactgcgatgctcggttttgccacgaggaggagctcacccagcatgcaaaggatgagcacggagtcactggcgcggtagctggacaggagcgaaagcctttcgtttgtgaaaagtgcggcgcggagtacaagtaccaggaggcataccgtcgccactgcaggaccaagtgtggcgaggaaaagctacccagggtgagtagaaccgaaacagtggaaccgtttgtaaatatattaataataattactttctcttccttaggaggaatcccgaccaatggagtgcaagtgctgctacacccgcttctctagcgcctctaacctatccaagcatcgacgcagtcgtcccgacacctgtggacagccggaatacgattcgcccggttcatccgatgggatgaagaaacataaggccttccgcaagaaggacagaaacagggactctgatgatgaagataccaccagcgaagaatcggaagatagcgatgatgacattcctctggccagtcgtctgaagacgaagctcaagcaggagagccagaactcggactcgggcgacgagtgtcccgacttcgaacccaacaacagtgaggacgatgcggatgcatccggattccagcttcctccgccggctatggtcaaggtggaggccttcgacgaagaagatttcgagtaccaggacgccagcatgtatgtgaagaccgaaagcaccgatatctttagcaacgaaaaggataagctgctggatgtgctgctcaatgagggtgatggcttaaagccctttgagagcctaaaggtggaacagggcgctggtatactagacgaaatcgcggccgtgccgctagtggaggttgcggaagaagatgtcttagaactgaggggtcatcaaatggaaaaacctcccggaccaagaaagcggggcagaccgccaaaggaaaagatacctgtggtcaagagaaagtatcgcaaacgaaacgcacctagatcgccctcgcctgacgattcatcgggtacaccaaaacgcgtagctaagatcagcaaaaaggagctaaaggagcgccttaagatgatcaacaagatggaaaaatcctggaagtgtcctcactgcgtaaaaatctaccacatccgcaagccctacgaaaagcatttgcgcgacgaccacaagttaaatgaggcggaaatgaaagagatctttaaggacgtggacgtccatgctaagctggacgaggaagtctttaagtgtcccatatgcagcaagatctatttggtggagaagcgcttggtcacccacatgaaggtgcatggcgaagatggcaagctgactttcaagtgcccatgctactgcaacctcttcttcgccaccaaggaacaggccactgagcatgctagggcccagcacaaggaactgctctactgcgaaaaatgcgacaagtacatgaccggacacgacagcctcaagaaccacgaacgcaatttccactcgaagaaggagccgcgcagccagcagcgcaacctcatctgcgacaagtgcggcaagaagttcaccggacgcacatcgctctctgaccacgttcgttctgactgcggccgtctaccgctctacggctgcagcgtttgcggcaaacatttgtccaccgctgggtaataactatttgtgtttgaatgtttattctaagactgttagtaacgcatcttcctttccgcagtattctcaagacgcacatgctccttcacaaggcagacactccgtaccagtgcgataagtgcggcaaaacattcaaggtgaaggcgcaatacaagtcgcacttgaagacgcgccacacggactacaagccgtacaagtgccacctgtgtcccaaggagtatccgtacagggagagtctgctcacccacatgaccgtgcacacgggcattaagcgtttcctgtgcaataactgcggcaagcgcttcacttgcatctccaacttgcaggcacatcgcaaggtgcatgccgatacctgcggccagttgcctttgaatgccaaggccacccagtacatgggcgtgcagcgcggaaaactcttgatgggcgctaagccggaggcgggcatggagtacgaggagaccaagaccttgatcgcccaggatgtcatcgacagggacatgcccatggcacaggagctcaacttcccatctgacggctcagcgccattggccacggtgcccctgaactacgcctccacacacctggtgccacacatcgtactgcagaccatgcaagccgaggcccggcgaatggagtaacttcggaacacattcatttagcgatcccactcaataaagattcttttgtaaacggatgcgtattctactgtacaacaaatgggatgacaactacataataatatctacttaatgactggattaattaaataacattgaacgtaaataagctacataaaattgatgtagatgaaggtttaacgccatacggacctgtcaaaaacatttaagaaaaataaatttccttataaaaacacgtttcggaatttattcgtaatagagaaaattaattatatgggatttgttaaaaaaatctttatatttatttactttttacttgtttatgtatttttatattgactaacagccttacaaactatatttcttaatgtctcgactcgctagttcagtctgaaatagggctgctggtatctgcctatgggcatccgatccttggtcctcagtcgtcgcactgcctctcgtatgaatttgggctgcagggcaccggattcaccttgggcctccatcacgtcgagggcttcctccacaacctcgccgacgaagaccttcgcaatgccggacatggctatcacaacattctgggacacggaacagccggtgatagtttgcattagacgcttgacggcggccttgggaaaggcagagcgacgatacatttcgtagcgatccagctgttcttccgtaaagttggaaacgagaaccctggagtggaataaaatagtttttataggattaccccttcgaatcgctttaagctaacttactgcattcgttcgcgctcctcctcctccagttccttcttcgtcttgagctttttgtgcgccggctcgccagagtcaccatctccgtccgtgttcttgttgtcgttgtccccatccgcatccttgccatcacgatccgcatcgtttcccggatccgaggtgtcgctgtccttccgctcgccggaggccgactggaagaatttcaggtcgacatcgtcgccgtcgcttagggagttgcttttttgctgcgtgggaaagaggatttcgtccatttaaatgaaatttgaaaagcaccagcgaataataaacaaaatcaaccagggatggagttgcaccatattcgctttttgcaacactcaaaagttccgcaccacataatagatgaatataattcaaaatatcggattaaatatattaaaggtatatcatagttgtttataaggtggctttgagattttaataaataataaat

SEQ ID NO: 7760 - DNA, 2973 bp, DROSOPHILA
tgcattgccaccctcgagctgcacaaagaaaaataatttactcgccagcagctcattggcgttttttcattttttaaagtgtacttaagagttgttaatatttttcgcagtgctcggcccgaccacaacaaacaataatagccgaataatagtgtgagtgaaaatgcggcgagctgcattcggcgcaaaaccaagtgttccgcagcacccaaagcccaaatcgaacaactcgaaatcggaatcaggcgaagccatcattagcgagacatttgtatttgtctgacccctcagcggtgtctgagaatctcggagagtcgtcgtggagcggtgtggagaggagagagcaggagcagaaaagggcccacaatccaagtccaaggaagcaccactccgataccgaaccgatatggaaaccgagtcgatggctccaagcagcagtgcggcggctgcagccaccaagctcctggtggagatcaccaccgacggaatacccaagctgcactgcccggtgtgcaacaaggcgctggtctccctagccggatatgtgaagcacgtaaagaagcaccagccgccgggcggcttcgagtgccgtcactgcgatgctcggttttgccacgaggaggagctcacccagcatgcaaaggatgagcacggagtcactggcgcggtagctggacaggagcgaaagcctttcgtttgtgaaaagtgcggcgcggagtacaagtaccaggaggcataccgtcgccactgcaggaccaagtgtggcgaggaaaagctacccagggaggaatcccgaccaatggagtgcaagtgctgctacacccgcttctctagcgcctctaacctatccaagcatcgacgcagtcgtcccgacacctgtggacagccggaatacgattcgcccggttcatccgatgggatgaagaaacataaggccttccgcaagaaggacagaaacagggactctgatgatgaagataccaccagcgaagaatcggaagatagcgatgatgacattcctctggccagtcgtctgaagacgaagctcaagcaggagagccagaactcggactcgggcgacgagtgtcccgacttcgaacccaacaacagtgaggacgatgcggatgcatccggattccagcttcctccgccggctatggtcaaggtggaggccttcgacgaagaagatttcgagtaccaggacgccagcatgtatgtgaagaccgaaagcaccgatatctttagcaacgaaaaggataagctgctggatgtgctgctcaatgagggtgatggcttaaagccctttgagagcctaaaggtggaacagggcgctggtatactagacgaaatcgcggccgtgccgctagtggaggttgcggaagaagatgtcttagaactgaggggtcatcaaatggaaaaacctcccggaccaagaaagcggggcagaccgccaaaggaaaagatacctgtggtcaagagaaagtatcgcaaacgaaacgcacctagatcgccctcgcctgacgattcatcgggtacaccaaaacgcgtagctaagatcagcaaaaaggagctaaaggagcgccttaagatgatcaacaagatggaaaaatcctggaagtgtcctcactgcgtaaaaatctaccacatccgcaagccctacgaaaagcatttgcgcgacgaccacaagttaaatgaggcggaaatgaaagagatctttaaggacgtggacgtccatgctaagctggacgaggaagtctttaagtgtcccatatgcagcaagatctatttggtggagaagcgcttggtcacccacatgaaggtgcatggcgaagatggcaagctgactttcaagtgcccatgctactgcaacctcttcttcgccaccaaggaacaggccactgagcatgctagggcccagcacaaggaactgctctactgcgaaaaatgcgacaagtacatgaccggacacgacagcctcaagaaccacgaacgcaatttccactcgaagaaggagccgcgcagccagcagcgcaacctcatctgcgacaagtgcggcaagaagttcaccggacgcacatcgctctctgaccacgttcgttctgactgcggccgtctaccgctctacggctgcagcgtttgcggcaaacatttgtccaccgctggtattctcaagacgcacatgctccttcacaaggcagacactccgtaccagtgcgataagtgcggcaaaacattcaaggtgaaggcgcaatacaagtcgcacttgaagacgcgccacacggactacaagccgtacaagtgccacctgtgtcccaaggagtatccgtacagggagagtctgctcacccacatgaccgtgcacacgggcattaagcgtttcctgtgcaataactgcggcaagcgcttcacttgcatctccaacttgcaggcacatcgcaaggtgcatgccgatacctgcggccagttgcctttgaatgccaaggccacccagtacatgggcgtgcagcgcggaaaactcttgatgggcgctaagccggaggcgggcatggagtacgaggagaccaagaccttgatcgcccaggatgtcatcgacagggacatgcccatggcacaggagctcaacttcccatctgacggctcagcgccattggccacggtgcccctgaactacgcctccacacacctggtgccacacatcgtactgcagaccatgcaagccgaggcccggcgaatggagtaacttcggaacacattcatttagcgatcccactcaataaagattcttttgtaaacggatgcgtattctactgtacaacaaatgggatgacaactacataataatatctacttaatgactggattaattaaataacattgaacgtaaataagctacataaaattgatgtagatgaaggtttaacgccatacggacctgtcaaaaacatttaagaaaaataaatttccttataaaaa

SEQ ID NO: 7761 - protein, 777 aa, DROSOPHILA
METESMAPSSSAAAAATKLLVEITTDGIPKLHCPVCNKALVSLAGYVKHVKKHQPPGGFECRHCDARFCHEEELTQHAKDEHGVTGAVAGQERKPFVCEKCGAEYKYQEAYRRHCRTKCGEEKLPREESRPMECKCCYTRFSSASNLSKHRRSRPDTCGQPEYDSPGSSDGMKKHKAFRKKDRNRDSDDEDTTSEESEDSDDDIPLASRLKTKLKQESQNSDSGDECPDFEPNNSEDDADASGFQLPPPAMVKVEAFDEEDFEYQDASMYVKTESTDIFSNEKDKLLDVLLNEGDGLKPFESLKVEQGAGILDEIAAVPLVEVAEEDVLELRGHQMEKPPGPRKRGRPPKEKIPVVKRKYRKRNAPRSPSPDDSSGTPKRVAKISKKELKERLKMINKMEKSWKCPHCVKIYHIRKPYEKHLRDDHKLNEAEMKEIFKDVDVHAKLDEEVFKCPICSKIYLVEKRLVTHMKVHGEDGKLTFKCPCYCNLFFATKEQATEHARAQHKELLYCEKCDKYMTGHDSLKNHERNFHSKKEPRSQQRNLICDKCGKKFTGRTSLSDHVRSDCGRLPLYGCSVCGKHLSTAGILKTHMLLHKADTPYQCDKCGKTFKVKAQYKSHLKTRHTDYKPYKCHLCPKEYPYRESLLTHMTVHTGIKRFLCNNCGKRFTCISNLQAHRKVHADTCGQLPLNAKATQYMGVQRGKLLMGAKPEAGMEYEETKTLIAQDVIDRDMPMAQELNFPSDGSAPLATVPLNYASTHLVPHIVLQTMQAEARRME

SEQ ID NO: 7762 - DNA, 21109 bp, DROSOPHILA
acagtctttggcccttcagtttggcggaaatttgcggcatttgttcaaggtgacggtggcggcggtgggatctctgttcgccggaggcatgcaaatctgtcaacaaattggcggcgattaggcgccgactgttagatgacggtagacagtgccactcccaccaatccaaagcgccacaactcccagttagctggccaacaatttagacataatttgaaagcgacgcttcgttccacacgcaatgtcgcttacgcaatggccacacatcaaaattatgcataatgacattgggcagtgggccggccaggtaagccgccgccaggtgtgatggctggccagaccaccgcggtctggcctgcccaccacccacgtaaccaccaccttccctcccataagttggcattagtttcagggcgcggtgtccatttttgggtgcaacgtagccggagctggagccatcggcagcttaataacttttatgcgtgtttgcatatcgctcatgcatcgaatttgatggaaaatacgtacgagtttccaccgttttgcaaaaatgcaccgctgggaatcatgaaaaaaaaaagaatcattggccccaaagagatggcgattgggaattcgattaaaaattgtaaccaccacatttcgatagagttgattgggatcgagaaccaattaggttttttcgaaactctcgacacactaaagccatcagccaaagcaatgaaaagtctagtgagtgaagtttgaataatgctgtgtattccgtattattcagattattatgagtgtgatatttatcaccagcttgcaacacactgtcaccagcttatgatgaagtgaacgccatcataggagcgttatatattatacacatgtaaagcggaatatgttaaaccactccagctgtttgacactttatgatgggtacatgtaatgcagaatatattaatcgacgctcaggtgttgctgataaactgataaacaacaaacgggcgtaaatatgtgggggcaatcaacgcgagttttattattatattatattttatagtcgatttgttggtcggacctagccgaaatcgtggattgtttacacaatacatggatagacgggggtgtcactcttatcgggcgtacagcagaataaatattgaatacacactgaactatattatcaaatttggttgtgtaagcggtatcagaactctacttctcgggcacattgcactgcaggcagctctccatttgggcggtatagtcctcgatctggatggtggtctcaaagaagttatagcgcaaatgaaccgccgatgtggccgcatccaggatcctcttcggattcgcattttcagctgttcggtggagagaagagcagtgagggcaaacgattagacgattaggtaatataaggaggataacactaatgggtaccaaactccgctgctatcgcactcgctggctctatcaaaattgtccacgcttaaaaagccatttcaaaaataattaagctaattgctcactgtctgcccatggacatgggctatgaacccgtgccagcggggggtgcagtgcagcttaaaacaacaacaaatccattgggataattaccctcgatgcccaaaagcgcgaccccatggcccatgccccaacgaactcccacccactcggacaaacacatgcatcagggcaaaggccaccccaacgacctttctggtctgattcggttcggtttggtttggtctgttctggtctggtctggtctgttttgtgctggtgctgttttgctcggaaaaggccgacggcctgggggcagctacttaccaatggccaaatgtgcagatagcgccactttattaatgctcagcgcccagatgcgcaaattgtgcacccgctcaacgccctcgatgccttggaaaatctgcagtacctcggcgtagtgcatatagttgggagtcccctccatgagcacctgcggggaaaaatggcaaacaaggagcagtgtttacaagcaatctgataagtccgaaaaaggcactgagcatttgagatttttcgcaaaatgagtataaaagtatgttaaatttgccaaaggaatcaaagaaaagtgagaaaaaacccagttagactcaccagcaacgcatccttcatgatcgtgaacgtggtgaagagcacaatgatggagaacacaaacgtgcaaatgggatcaacgatggagtactctggccaaaagtaaatcacgccagcggcgacaaaaactcccacgctctggatgacatcgccaatcacatggatgagggctgcccggacattcatgttgacggcctcgcgtccaaccggtccgccgtgatgatgtgatccgggtgccgtttcggccagaacggcagcaatttccaaatccagtgtgggatcgaccaacttggtattttggtaggagaacgttggcagcccgccgccaggcaattcggcatcctcgggcgcgtaggccacaccgccctcaatacgctggctgggcgaatcggagcatggtgtggatgtggcctgcacatgggatgcgttcttggaaccaccatggctgtgaccatgcccaccgcccaggccatgcgaatggccatgctgcagctgaacgcccatgctaaaccgagttggagagagaaattggaaacgttatcacaaatatttaatatgcttgacaatgttgcaagctattttgtgccggtcctgtgccaccaccaacccaaccccgcgttgcaccgaaaaaccataccagttgggggcacgttagcctggccacagtatgaaaacaaaaacgcacccaaaatgttcgttttttttttgtttttggtctgtgtgtgtgctctggctgacaaaagggggtgtggggctgtggcaacggtatgcgggaaacgcttttgcattgtttggcattttatttcagcattttaatgcaccaacaacagtcgcaccgcacagtcaaacaaacacactcaggtcatggacagtggagccgagtggccgaagtagtcctcaaatggaattaagctgcacggaagccaaatctttgttatgcaatttaaagcgggtgttgtcagtgctagcatgcacaggaatgttgtgcggaattcgagagcatatttcgatttcgaatcatagtatttttgataatcccttgaattttaaaagaacaccaaatgcaagttgagtaaaaaatgtatatacgaaattatttaaatacacttatcgccatttataacgaacataaagctaaaatattttatgatttcctcagccaatttataaaaatatacataacactaaattgcacagctttttagtatttctatttcatcgcccatatattttcgaaaccctttaactagactttataggttgcgcagccatttccataaatcaattacacttttcttttcaaaataaataattttaagcactgtacagtgtgcagcagcagcagcagtaccgtgccccctccctttggtggatgcaccatcccgaattcagagccctgctttcagggttcatcgttcaccgttcactgttgaatgctgaatgttgactgttttgccgctctgtgtaccggaaggtgtgtacgaatcctgtgcgagggatcctccgagccgaccagccaaactaaccgctcctgtccgatgattccgaccccggcccaactgggctgctccagttcagtacgtccggacacattgccgcatgcaaatacaaatgtattgtcgaaaatggcaaccggctgaccagaccgaccattctccccaatccccaaaactccggtttctgtttttttgcaaccactcccccactcgctcttatgcgcccagctcacggcgtggatcggcagttaatagctcggcacattgactttttattcattttaaatgctccgacattgcagatttatggcttttctatttggggaaaaaggccatggtcgaccaaccgaccgaccgaccgaccgacatgccaacggaccgggctctttctgtccgtcgccgccggctgcacttagccggctttttggggaaacaatgcagtgccgggcatcaataaataaactggcataaattacgcacaaccattggcaggagcaaacacaaagcagcaaagtgagcagccgcgtagcggaacggaaccatctagccgttcttatagaccagaccaagtacccatccccctcgcagtgggaaagttctgctgggaaatcgattggcggctaattgacgtactcaattgatgacttaaagacattctgttggtcttaaaaggagtttacgccaggcgataaaatgttactggcactgaattcgaaggggtaaaatagcattaaatatgtttaatctttgattagatctaacccaaactactctaaaattttgggagaatttatagcgcctgtcttagaaactcgactagcccaataaaatataagaccttggtgtaaagtgcgcgttagtttgcgatgagcgaaataaacgtgttccgttgtcgtttcatccaggtcctggttccttgtgctccgctccttggcttcttggaccgacagcttaacgagctgctcatccgggtgacagaccaaactgagaccaggatcacgacagactaggaccagagcaccccacatgcctcgagacatccttagtggctgcaaaatcctggcaacagtcacatacgcgaccaaagctaaagccctagccgagccaaggcgagctgagtcaagatatgcgctaatatttatgttcctgtcaattaaatcaggacgtggcatatacgccacacacagcggacccgtttccccttggtccttggccactctgctgggtcgcaggactccgcttgcagctaccagctcccgattcccagacttatccgagtcctggtgttgtcatggctgctgctgtcgtttgttggccactaacgaggcgagtaaagatgccgcaaaatcaaggggaaatgcttcattgcgcgctacaaattacagcgccacagttggaacaacaatgccggggtgacggaggagcatgggcagctgggaggggcctctcctgatggccggggaatgtcgctcgcattggcattttttgcgctcgaggacacatagcgcaggaggaggggatcggtggaggtggaacaaggggcagagtggtgggggtaatgcctcggcaatcggatgttcaaagtcgaaaagcgtatgtgctccgcatggaatccctggcgccaccatggaccgccatcactgaccgcgtgaccacgctggttaggatcgaaatagtaggaggtagtagggactacagagtggtgttcaacataactcagaaaaaaacgtggatttgattactaggttactaatatttttcgaataatgaatttttaggtatcttaccacattttagaataaaaatttcgatttttagagttttgattaggggatttaaatctttgattgattgataaaaaaaaaaccggattgaatataaacataaaaacagatctatttatagactcccactatggaattttcaacataaaaatatttatgtctactttttggggttatgaacaagttgtttccagcgagtactcgtttttatttatgaaacatcggaaaacagctgatttggcaccactgctacctgaatctgaagctaggatgtggcgctctgaacaatttatttagtgcccatcaacgcgacgccccacacgaaacggcgaaggaagtgtttgctccttcttcatcaccgtttatatttattttctccttgtgtttcttctggcgtctgctatattttttcccgctttttgtttctttgctgtttgacaaattatggccacatttggcctggtaacttcttcgaaccgagctggctgggccatcacagcgtggtcttaagaaattgaaaatgaaattgagttgtcaggctaacaagcttttggccagcttcggtctcaagtggctgccgggaataggaaaacggaggaccgacgaccaggccaggctcaacgttcacatagtgaacactaaacacaagcaaggagcaaaaaaaatatatcaagtgaaagaagcaaattcataagagaaattatacgacagataggaactgcaacagaagctgaagcatttttagggtatttaaaacttttgctataccaactactttatataaattactactttatataaatttagataaattacaaagagaagagttttccactgaaacgtaagtatcttgtatagtttgatttaaattgcatttgccacaaaaacggactctgtatcaaatttatttgattgctttaaagaaatttgtctgcgcattcatccatctgtcctaactgccattcccacggctaagcgccttcaactccacacgctggttgtaattgctttagcacctcgctgccccagcactttcccgctgcctttcccgccagaataaacctctcatatttcactggcatttgctctcgctaatgtcccacttgcagtttaaggtcaggcacagtggaaactctttataaggcattttcttgatctaatgcgctattaaatttctaccactaaattattattatttttttttgatgctaggtcattgacttaaggttgatttaagaaactatattaactattattttaatcgtagctcaattagcacaagaacacaatactggtcatccagaaagtatgctatgttttttcagcaacttcattattacaactactatggtaacatattgtgaaaaagaatgaatgagaatgcaatgaggatcgaagctaagtttcattgtactttggcgatttcactctctctcttcttccagcatttctcgttctatttctccattttcaccgcttttggccctaatgggcgttttaacgatgtgaagtcgacggacgtcgttgccgccactcaaaagttaacccaacaacaacgcacaaagcgaatccggaaaattcagtgcgtgtgtgtgtgtgtatgcgaatgtgggtgtgtgtgtgtagcgttttccagctattttcggcattgtgctaattgaactaaaaactggcaaaaataaaatccagagagctctcaacaactaaatgaaactaagtaaaatgccttcaataacaacgagagcaaacgggactgaaaatagttaaaacttgcagctaactcgtttgcccgaacgcataacggtaaaaggtggccatttaatttcgttgttcgaacacaggtcaaaggtacaccggaaaaaatgcgtaccaacttaagattctttactttttttcccagaaaattcaattgctgaatagagaagtgaactaaagaaactgaaatatattttttttcgatgtatacgaataaggagtatgcttcggtattgacttgacttaacttcctgcttttatggcagcatccacagatggccttcggcacgcccctcgcccaccgcccatctccacaaagtccggccatcttctacgtcttcttcttggacaaatctgtaagccaggagagttgcttctgctgcacgtttttcacaatcaattcacgtaatcaaacaattcaagtggcaaacactgaaaatgccaacgtcaactggaaaatttttgcgctaccgcccaactagcggcaacaaaaacaaaagcaacaacagctgcagcaacactcgtgcaggaaaatatgtaggtgagctgaggtgggcgtggcacggaggggcgctcagtgggcgatgggcggtgggtggagtaggggtccacacacacgttagtgttagctcggcattgaacgttgcgatttatgcgccaaaaactatgcttcgacagccacatgaatgagcatcaatggggaaaggggctggcataggagcggggcgtggcagacaaggggaacggaggaggcagatccttgcaggttttgcacttggcgaaatcaaaacaagcgaaacgattagtaattcattaggcgaactggaaatgcccttctagaacccaacgtaactaaaattcactaacacgttatatctcaaatgaaggtttaaatagtgaatatttttatattcgcttaaataaatatatatatattccctctttaaacaaatataacataataactttccgaactctggttaagcccaatatatttttaaagcttaataaaaacaaatccaatcttcaattactttggcttaactgaaccggcaagcgtttaacaacaacaaaaaatcaattgaaaaatcacaattaaattaagtaaaacgttaaactttgcgggcctcgattatttttttagctagccaaactgaaaagaaatccaatggccgaggggctccccattggccgccgtttggagcattatcgaaaccatcttcgatggcacgttaccccatcccgcctagagaattttccacctttggggctggccaacacaaacaccagcaaactcctcgtcgacgccgccttttggcttttgttgacgcagaaggaaaagtacaaaaaaaaaaatcaaataagaagcgaaaaaaatacgctaaaaatagaacgagaagaaattctaaacttgcggaaaaagttgtcgctaaaatgtggagaaagttgcggcaacaactggcggatacgtaagggaatgccatccaggaatcgagcagttggcctgggatcgggaggcattcggagtgtgcaccatgttgacccatttggtgcttcatgcccgggacaagttgattgcggcaattgcaattggaaaactgcccaggggaaaacaggggaaaactttgccgccgcacggatgggccaaacaggacaggtcggacagaccgccagcaatcaaagatctgcatatcaggatgaaacattcgactgtacttacatgacattcaccaatatggccaggccggatgtgatcagcatgatcttcgcattcacctcgtagtcgccgctgatgagtcgtccgatggccagccaaacgaggatgcccgtgatgacccagatcatgaagacggaggccatggcgccaataacctcagcccgataccagccgaaggacatcctgtcaaagataagagcgagtggagcttaattaatgtgggggcaggtgaagataatgaggctgcgatggagacgagcgaaaaatttccacttgccacccgataaggatggcaaaactttgttactttggcgatggcgacaactttgccaactaacaaactattatatgcaaacaataattgcactttatttgttctggatggctttaatagttgtgccactttagcgtaccttttttttatacatttcatagttttaaacttttagtttcacatattcatatttgatattttgttgaaacaagctagcttgcttactaaattcccaattaatgcaagttgccttattttagttgagctaaaattgagctgtttaatattttatttcctcattaacaaagcaccagatgcattggtgacaattgcgtgctcttaacacatagattcagtcaaataaaccgctttcagaaaataatatccttttctaagccccaaggagagggggggggggatgtgaaaagacaaacttatcggtcacaagcgaaacataaattgttgatgacataaagagaggtcactgtgggcaagttgaaaattaacacgacttgataaatgtgaccaaaattcgtcaaatgccattttaatttgagttcgcttaggggcgcggctgctcccccaaatgataacatttcgccggccaggagagtgtgttccaggatttccctaatgtaatgagcgttttgcatgtgcgcccacccccccccccttttgcttatttttcatgtagttttttataacgtatttttcgttttttggttgggtcaaagtcaacacctgaacggcagaggcggcagtgaccaagtcgagggtcgttcaattaaagcccaacctagaccagaaaacaagccaagccacatcagaacgagccaggaacaggaccaaaaccaggaccaaccggtaaccgacaggtgaaagtgggagaagtgggagtgggaggagcgaccactctcgttataaaattgaaataatggcaaaaggcaacaattttgccagcctgctaactaatgcgatgccagaaggcagcaggcagctacagcaacgaatgtctcgccataataatacaatttaatttccagcaaacatccgtcgtattctcactcctggagccaaagccagcaaaccctacagaaaccacccaaaaaacacacccagccgtgtcaatgtatggcggagctctctatacgtgtgtatacaaatacctctgtatgtacaaatatatatatatatgtatagttggggccttgcagttggcgttgcaagtgcagccatttgcttaatgaccgcctgctgctggcggcacaccccctcgtccgccggcccgccggcccgccggtccttaggtcctttctattcccaacggaggagcagcaacatcgctacctcaatggtggttccggcacactgggaccgggtgcgataattaaaagaaagtagccaaaacacttaattgggattagcgataatgaaatacggtagtgtgttatgccaaactaactttttggcagccaacaaagtcagatatatagggaaatgaaattaaaaggatagtatattaaggatagcaattatgtagctttataatatcttaagatacttttgaaaaagtgagaaatgctagatgctagcaaagatagcagtttgaaatcagtagttactatataataaagaaatattagcgaattaagttacttaatttaggccaatttatttgcaacgctactctagctttgagctaattaaccactgctaattgatctactcgaagaaatttggcacttatcaaactatgtcattacacaaatcctttgctactgcaaatttgcatcattcattatcatggaatataccgcaggtattaattgaattattccactgtaccgtgcttggttttacctagcttttgcatttcgttttctgcgtttgcctttgcaattgtgcaaatgtgttttgttttgataaattaggcttgtcaactcggcaacggcagccagagcgccaaaatgggtggtgcggtgggcgaaggagccaccaaaatatggaggaaggctgcgaaccgcactgaaaccaaaaccagccagaggaccaggcccaaagagagaggcattcagcgtcagcccgagactgagactgctgcaacatgcagcagcagcagcagcagcaacagcaacagcaacatgcagcatgcaggagcaactggaacagaaacagaaacagaagcaacatcaacgcaacggaggctctgagtccgggagtctgatggcaggagcgaaatttacaaaattaccatgcaacacgcttgaaattgcaaaagtttttcattattcactttgtggctgcagtcgagtcgtcgagtgagtgagatttttgcatgaatgagcagaacgtgccgtttgcctccctccttctagttcagcctaagatggatgccgtatgggaaaggggcgtgcggcgaaggggaacactgggggccggatgttggggcggagacaaaggagtgctcccaaagaccaattgaaaaatgtgcaacggccaaatgtacagtgcgcagcagcaacagcaccaaccagtgatgccaaaagctacttcaaaaactagacgttatttaaaaaaaaaaatgtcatcgttatccaaagacattcgcaggaatagatttggaatcccaaatgttgaagattatcaaaaaaataaattaaaaaactatgttgtttaagtactttcaaattaagatcaaagagaaaagctccaaaatggaagcaacttgtgactttcgtcccttaaaattcacatattttcttattcatttcgttataatgctaacttaaaaaaggtattatggatataacttgaatattccccctaaaaataaaatttcgacaacactgtgagcaaaagcaacacaggggcccgcagacgcagaggaaggcactgaaaatttggaaacaggcttttcgcctaattagacgatggcgaatgggaaatgcaggcagcagcagccaaggatatggaggatggccaagtcgagcgacagaaattatggtggagagcagccttataagagggaaatataaattgcaggccaatgcagatacgctcgttataaggggaatcctcttcagaagtgttttgcaaagaaattttatattcaaggcttgcaaatagaatgatttgtcagctttccttcccttttgttgtcttggaagctagagataattgattaagttataaaaatgccgaatatactaaaatataaaacattagaatccaaagataagcctatttttaatgtaatttttaagaatttatataattgtgaacagaacgttagtataaatgaatctttcgctcgtattatttcattaattattcttaaagtcttcccaaaaagttcaaacaacattgaagtgaagaatatttttaaggaatagctttacgttattaccgagagcaggatcccaaggacccggtgataaaggaggacgcagacgagccatgccaaaggagttggcagcagatagtgagcaaaagaaatgcgaaaaagattgaaactttacgttttattgatttccctctacccggccaaacgacttttggcagtgtctccattccggagggcagtacttaccgctgcgtagatggtcgcccggcaatccagatggcaaacaacgagatcataaaactggcgaaatccgttagcaaatgagcggcgtctgttgcgatggccaggctgttcgataggacgccacctgttcgggttggggagaaagtaaataaatgcgcaaaaaattaactcgacattctgtgggggggcttgtggatgctgattttgggggattaccccccaaaacggctgccgagtgacaatacccccggcctcagacggaaaacattaaaagggtggagagttggagccctttctctctatttcccattatcgcagcaacaatttcgatttgaaagcgaaagaaaggaaaaaagagtgcaaaacgtaaagcaaggggcgcaaaaatgaaatcctttcctggcaactgggaattggtagccgcctagtcgtggtcctcagtcctggccctttgtccttttcccagcgaacattgtaggtaattgcaaagcgattaacgacaacagccgtcgaagctccgtcgacatcgtcgccactcgaaaattaaatgtttattgtataaccaaccccggtgccgtcataaatggaggagggctgatggcagacagtaagctcttccggtcgccatattgttgcacttccggtcctcagtttttaatcgtctcgtcgtcgtcctctcgtcgtgtccttttcccgtttccctattcctcgctgcccacattgtttgactttaccttatttctttcgcttttcactttatacgttttgtttatttgttggctcagattctctcagaggtgagtaaaattagtttgggaattgaaaggcagacggaaaagaaatatttcaaaaagaaatcgaaggggggaaaagagtcctttgtgaactcgtccaattggtggctccaaagatgcatatagccctttttatgattactaactctacttacccacgatttcggcaatcataaaaaccagacacaaaatgctcgcaatgatcagttttcggcgagccttcacatccacgccctcgctgcgggcacgatgacaatgatcccggactgaaaacaacaaaaaaaatataggaatttaacaaatgtaagacatctgcacaaaaaatatatggaaaatacagcctttcacgatctttatgtcattgacaatcatgaattaactaaaatagaaacctaacaaaataagaatgattaagattatccaaagatatattaacaagtcatgctttatgctttacacataatatatcttcttatgtatcttatggtttaaataaataacaaatcatattatttagcttcttcgatgtgaaagtttttattgttgtagaattaaaacttttgcataagcgcctacccctaattgttttaaacaatttacgcctgctttcatgctcctcatttactcgtaattgttgataaaagttcttacacagatgcaccccaattgatggcctttaaataaatttcgcgatattcttaagccccgccaaagactataacctcattctttttttcgcaaaagtggtaaattaacaatgtgccagtgcacactcgtattccctgtggggaatgagttggacgtcgcccatctgttatgccgctgagcatgcaatacatatttacaaaacaggcatttaaatttatttaacatggtacgtgaataatgaccgccagcgcagctcctacttctgctcctgatcctgctgctgctccttgccagccacgcccctcccatatggattcggtatatggcccatttccggaggtttctgcgcttgtttttatgttttttttttttttttggtcttttcctcgcttattttattctttttttttttttggttttattcattttgggtgtcagtgacaggcgaaagttggtagctgctagttgctcggctcggtttggttcgccggttgcctggctggttggttggttggtgttggttggtggctctcggtcggctaggagcagtctattaaatactttattgcatttgtcgcagccgtatttcatgctttgtcatttccgctgcattttctttgcacttgcactccggtctttgcacccactcctcaacttttcctcgccaagctgcttttcattgtccggagcgggaaaagctacaggagcttcgtgcatgtgcatatgctccgctggctgctcggctgctctgcaagtggaagccatagagatgagcccgtgcatgaggagttctctcccagatttgctctggcaattaggcctggtagtcaagtaagcattgcaactcgcatacaaatctttacaataagtcgttgttatgttttaagccaaagggtgcatgctgcttagatttcaattcagttaaattcttctaattgacttaattcaaatttttagtgccagttaagccaaaaatattgaaagatattgtaagtaattactttaaatgactatcaattatcattgattttaaatagctttgatattattttatccattcatgtgttaattcttccctttccgtgcgtgtcaacccctcatctctgacatggtgactatgtgaacgcggtttcttcatttgaatccagcacaaggccaccgacgcctggcctgcgtctgctggcaaccgcttcctactcctccggctgctcctgctccagcgctggcacctgctcccgccacctcctcaaccacctcatcctccacatcctccacatcctccatgtccttgcccacacactcacacaatggcagtaacaatgccggcagcgaaattaaattcctgtgcataaccaaggcccggcactctggaggagcaactgccactgcaactgcaactgcaactgcgattgcgacgattgtggcacgtgaaaatttcacctattagacccgcatccagtttcgagttttcaggttcaggtttccacctccggtggagcagccagtgcggccagctgatgcataagaatcgtcatacttgcaatttaaacaactccgatccatctgcatctttaattggtcgccttggaccgttctggtctcgttccgttcgccttgtttgtttgcgcaatgcggaaagtatgttggactcccggggagctgaggttaatgttctgggattccgggggggggggggggggggctgctgcaagacggtggatatgggcgccacattcactgatgtgcggctctctcctccttcttcacatccatatctggttctgccatggcaacaattgtgctctgtacttgttcttataaataattaatggatggcagggcgcaggcatcacttgcatcagttgggccaagggaatgggaacgggaatggctaggtgccggcgcacaggcattaattggatagaaataaatacgcgacaaaagcaattccattatgtgcaaatatcaataccaatagctggacaggtgcccagaatctacgccagctgagatctaaagatgatccaatccgatggctggaaacatcttttatataattaagcacttgttacacggaaaaatataagtccctagtattctgtatttcaaatagttcaaattgaagctcatattatttatcattttccagtgctttcaaagtaaaatatttccatcaaaattctttctttttaaaattctaataatttaatattaataataattttaatttcactttctttgctagagctgttggattttgttaactgtttaggcaagcgctttgtttgcgcaataaacacctgactatacccaaactttatatcatcaaatgaagtgaatacctcatgaaaccaaatcagactttcggctaacgagggctcagcatatttgattacgcgctcattatgttgattataacttcacatctgatatactatgtatatttccacgccacatcatctcctgtcctaattagcaagttaccattgctctggtccgcctcactccgcctgagcacatccataaccaggaaatcggagcacgcggcgataacaacgagggaagacgttcactcgagggaacaatggacacggacctattcgaactgcttagtattccagcatttgcgaatggacccatctggagcgcgttttacaaacgactaactacggccaaagcaaatcaatgcagctgcatcgaactgcactcggctagttgagctatctaataggagtcactaactcaagccatgattgaatgcaccgagcgccccaagacgattgcataatatatatactatatactacgagaatatatcgctgtgtgtggcagtgtaggatggaggcagctttcagtagcggatccacctcgtctagacgccagttaatttcattttgggcccagctcgtctgccaataaatcgaatcatcgccaaaaaagcagaaccattcttcctgcgctacttgcgactatcgcatactcattaaatgtactttctgtcagtaaaatggggcatagctattgtattatatatgtaattgaacagatggctgataattgaagttttgatattgagtgcttccgagaatgcagtcgttacttataccaaatcctttcctacagggtatgcgattagtttcaaagccgaagcgcaggaaattaaaatataaacttgagatagccacgtcgatttttcggtttctgaccctatgtatgatggcaatgaatgaaaaaaatgattcaaacatttatttggtccatcgacgatgtcgtacgtaaattatggcgagcgttacactggctcctcgggcgatttatgacatatggccatagtggtgggatgcggtctgctcccagcagcggtgtgtcagcaaagagcataaattttgattatgccacagatgctgatgggggggagtggattgggtggattgggcggattgggcggcggctacggcggcgacagcggattgctctccggctagccggcccagtttccatcataatttggtttgccaacctcgagaatcatcagctgattgatgacactgggcgcggggacaaggggcggttgtgggtggttggtgtatgggcgaatagtgagcggaatgggcggaaataaagcttcgagtaggtggtaagttgtttgctcaccatattcgtgcagcatttccaagcggcttttatccagcgaagttgccgcattcctatatagccgggcatcattcatttccgacgatttccgtgccgtctgccaattagcgagcatttacccgatattacagctcctcagtcacccatacatttgggtccgaacacgagtagattgcagcgagtttttcgattttacccgaataaaaaaaaaaaaattaaggaaagcaaacaatcaacgatccgcgcttaggaacaatcaagcttcggtaccctaaaaaattgggtggggggggtggtggggaaaacacacacggaaaaataacaatgtgaaaactaatttggttgattttcgttgttgtcgaatttgatttgtttgcatttgacttttagtgcaaaatgccgctgcctgctgcgttttcttgataatttatgaatgactgcaaattgctgcgaggcagtccgacctgattgaaagcgacacgaaagtgccccgccgtttgtcacagtcaccttgccaccgctttaagcccacccctcagcccctcgcagccccttttcaaccccttttcaccccatttcaggccctcttaacttaaccccttcttgcctcactcaccttcgacgttgttggaccgcccgtgtaaacaaaaaatttgagcaggtgttgcaggcgttgccgggtgattgttgttgccattgccagcgactacgttcacacctggttgtccctgctccatcaggtgaaaggatggggccgtgccatagttgctacggcgcgtccgtccagagtcgcgtctgcagaagaagaagatggttactcgatggaaaactcaagattataccgataagtttcataagtttcatactgtaaacgctaaatgctttagttttaatcaaaatgttcatatttagcttatgatgttccactagaaataatcttacaagtgtgcatcacaaaacaagtttggaatgtggtctaaacaatatataacgttttcccaactaattctttaattaaaatgtgccattcgttagttttattctgcacaagtttctatagaaatgcacttgttttccacggtaaacaagtgcaagacgcccaaaagaatgagaagtaagtaagtgcagccacagcaagaaaagtttttccgtggcagcttcgactggaaaaaccccggcagagaattaaaacgtagcgttgccggtgccaacaaaacactgcggcatttaagcagacacaatgtacagtggggccattgactgccataagccccaccgaaccgaccgtccatcagcaggcagttgccactgtaatgagcttgatgctttggaaagcgaggcgaaatgcaccgaaaaaaggagtttttttgataggtgctaaaatgaaaagtgctgcgaaaaattcaatttgaagttttgttacttaacgcaaactacgatgactacttaaaggccacgcccactccgccgacgccgccttcatcagcagcacgtgtgtgtgcgtgtgatgtgcccgttgataagtttctcatgttgcatgggtgtgtgtgtgtgcgtgggtgggcgtgcgttggtgggcgtgggtgtgccagagcaagtgcgcgtaatttttactacggaaagtgcaaatggcgctaaactacttgctctgcaactttccaacgcaattgcacaaaggaagaaaaaaaaatcaaaaaaaaaaaaagaaaaacgagtgaaaaaaaaacagcaagcaaaatacgttagccgtcgcactttaagctttcgatccaacttttggaggcctgtgcgcacctagaaaatcccaagactccaggaacccgacagttgtcactgctcccacgcggtccgctcttacgcctatttaacaaatcagcagctcatttggcgctttatgttaatttggcccaaaagagattttatattcggccaactttttgcgctgcgcaaactttggcccaggaagtcaggcgataaaccgttttcccagcatcccataacttacttggcaatcggtgtatcctcgttcctggacattattatttccgaatattaactcactttatattttttcaacaagacacactaacaccacacgttacaacacaagaccgcaccgacaagtgtttcttataagatcccatatgctccactgattcacagaggctgtggaatgataagattcaagcaaatagtagataatcgtggttatcttaacttacaactttcagatcggcgagagccgagtgcaatgcatgtgtttgtacttcgagggaggtgaggaggggtggatcagtctagaagctaaaataaagcagaaacaaaacactcaaaaaaaataactggtatatatattccaaagcaaaggtaaacattattcgtcccaataataatatatataatgataatatatagatagataatatctttatatagaataatataatccgcataattataattgttgaaaattacataatgccaaagcggatttcaaaataaagatttaaaattaaaaattaaacaaatgtaaatcaaggtagattcatcatagatataacaatgattgataaagttatcaacagaatatcagatctttgggtttagtactttcttttttaaggaaataaaaacttttaattttaatactgtgccaacatttttctgcgtgcaatgtgaaacgaaaaaggggaagaaagatgcccattcttatcagcaggaggtatgatatgtcaagtgtgaatatagcacacggaccgttcaatgatggtaacgtgcggtaagacaaccaacgggatcagtttgcttttaagagcaggtttacccagccggcagataagaatgtgaatgggcgcaaagcactcgctagaatttttgaattttgcgcttattctcgggctgccagatagctgaaaacagtttgatgttggtatttttaaatgaagccctggctttacaaatataggaaaatattgtacaataggtggtttatttgaaaggttaataaaataacaatgctcaaaagctacaaactcgtttttccttattctaacttttctaagtttaaaattagaaatatatattttaaactctttcaagcataaagatcaaacgataagaagaacttaaagatttgatattagtaaaaatgttttgggcagggtatataataagataagatttatttcataggtacagggttcacaacttttttaattcattgggattggtgaatgcataatatgggatagaatattcttgaaataccatccccaag

SEQ ID NO: 7763 - DNA, 1806 bp, DROSOPHILA
ctccctcgaagtacaaacacatgcattgcactcggctctcgccgatctgaaagttcctctgtgaatcagtggagcatatgggatcttataagaaacacttgtcggtgcggtcttgtgttgtaacgtgtggtgttagtgtgtcttgttgaaaaaatataaagtgagttaatattcggaaataataatgtccaggaacgaggatacaccgattgccaaacgcgactctggacggacgcgccgtagcaactatggcacggccccatcctttcacctgatggagcagggacaaccaggtgtgaacgtagtcgctggcaatggcaacaacaatcacccggcaacgcctgcaacacctgctcaaattttttgtttacacgggcggtccaacaacgtcgaagtccgggatcattgtcatcgtgcccgcagcgagggcgtggatgtgaaggctcgccgaaaactgatcattgcgagcattttgtgtctggtttttatgattgccgaaatcgtgggtggcgtcctatcgaacagcctggccatcgcaacagacgccgctcatttgctaacggatttcgccagttttatgatctcgttgtttgccatctggattgccgggcgaccatctacgcagcggatgtccttcggctggtatcgggctgaggttattggcgccatggcctccgtcttcatgatctgggtcatcacgggcatcctcgtttggctggccatcggacgactcatcagcggcgactacgaggtgaatgcgaagatcatgctgatcacatccggcctggccatattggtgaatgtcatcatgggcgttcagctgcagcatggccattcgcatggcctgggcggtgggcatggtcacagccatggtggttccaagaacgcatcccatgtgcaggccacatccacaccatgctccgattcgcccagccagcgtattgagggcggtgtggcctacgcgcccgaggatgccgaattgcctggcggcgggctgccaacgttctcctaccaaaataccaagttggtcgatcccacactggatttggaaattgctgccgttctggccgaaacggcacccggatcacatcatcacggcggaccggttggacgcgaggccgtcaacatgaatgtccgggcagccctcatccatgtgattggcgatgtcatccagagcgtgggagtttttgtcgccgctggcgtgatttacttttggccagagtactccatcgttgatcccatttgcacgtttgtgttctccatcattgtgctcttcaccacgttcacgatcatgaaggatgcgttgctggtgctcatggaggggactcccaactatatgcactacgccgaggtactgcagattttccaaggcatcgagggcgttgagcgggtgcacaatttgcgcatctgggcgctgagcattaataaagtggcgctatctgcacatttggccattgctgaaaatgcgaatccgaagaggatcctggatgcggccacatcggcggttcatttgcgctataacttctttgagaccaccatccagatcgaggactataccgcccaaatggagagctgcctgcagtgcaatgtgcccgagaagtagagttctgataccgcttacacaaccaaatttgataatatagttcagtgtgtattcaatatttattctgctgtacgcccgataagagtgacacccccgtctatccatgtattgtgtaaacaatccacgatttcggctaggtccgaccaacaaatcgactataaaatataatataataataaaactcgcgttgattgcccccacat

SEQ ID NO: 7764 - protein, 472 aa, DROSOPHILA
MSRNEDTPIAKRDSGRTRRSNYGTAPSFHLMEQGQPGVNVVAGNGNNNHPATPATPAQIFCLHGRSNNVEVRDHCHRARSEGVDVKARRKLIIASILCLVFMIAEIVGGVLSNSLAIATDAAHLLTDFASFMISLFAIWIAGRPSTQRMSFGWYRAEVIGAMASVFMIWVITGILVWLAIGRLISGDYEVNAKIMLITSGLAILVNVIMGVQLQHGHSHGLGGGHGHSHGGSKNASHVQATSTPCSDSPSQRIEGGVAYAPEDAELPGGGLPTFSYQNTKLVDPTLDLEIAAVLAETAPGSHHHGGPVGREAVNMNVRAALIHVIGDVIQSVGVFVAAGVIYFWPEYSIVDPICTFVFSIIVLFTTFTIMKDALLVLMEGTPNYMHYAEVLQIFQGIEGVERVHNLRIWALSINKVALSAHLAIAENANPKRILDAATSAVHLRYNFFETTIQIEDYTAQMESCLQCNVPEK

SEQ ID NO: 7765 - DNA, 4577 bp, DROSOPHILA
taagatcaaataacaatatttaactatggcgccacgtttgacttacctcggatagcaatctcttgaggccctcgacctcatcctcgccggcgtttagctcgccaccgggcaatttgaagaacgtggtgcccagctgcaggagcaagacatgtggcagtccgtgctcgtggaccagaagcactccctcgacggagcgccgcattccgatccggtcgaattcctcgcgcatccgctggaatcgggatggcaccgacggatccttctcaaagagcggctccttggtgccgaatgtgtagttcgtaagggggtatctgaaacaatcgatcgatctatgatgtgcgtctatgaatgaaatgtgttgtacccacaagttgatggtgcgattgatggttagcgcctggttggtgtacttctgggtaccgttgttattgctgctggctgcatccgcttggccttggcttccgcggcgcggccaaccggagcccgatttgtttgagacttgcgaggacgccattttgttatacacacacccctgtgggaaaatttgcgggacaagctggccgactttctaccaaatcctttggttgtgcgttggaaacttgtattccaataatattataatccttaactgtttatttacaagttatactataaatgtaaacccgttttaagccgcttaattacacttttctgtccagcgcttgtgcaaaaaaattaaccggctggacgagggctgcacgtgaattgattgatgatgagcagaactggttcgttgaactagattatggaattaatcgatttcgtactttgtgtgaaataaacttgtaatgaccttttgcttaatatttattaaagatttattcaattttttgttttatttttaaatgcagttttaaattattgtttgtttacatatgtaacgacagccctggtgtttcttgtctaatggcaacgctctgaaattgcgcagcaaccccatctggccacactgacccattagttttttgtttatgttgggttgtcggaaaaatcggctgttttccgtgtgtccgtctgccatgaaaagctgctaaaaagctaaatataaaaatcagcgcagcacacacgttccgctgcctgcattgtttgcccattctaatgggaaattatgtgagtgcgagtcaggaaaacgcatcgtgtgtgtatatatacatatatacataagtatgtaactgcgcccgtttgtttgtgtgtgtttttgtgtgcatggtgcaatggaaaagtgattattataaatgaaaatcagtgaaatgtgtaagtgtggcaccgcaaacgctttgaacttttccattttcatgttttcaccttgtcttctcttctcttcttcacccacctcccccgtagtcaaccaactcccacttgtgcgtgtgtaggaaggcagaagggtgttttgcattcgtgtgcgtgccagataaaaagactttgaatttctggaggatattagtgtcaactgtgtggggtataatacgccgtaggccctaatatgcaggcaagtccattaattacgccaaaggtcacaggttaggcacgcagccaggatccaaggagcaataataatgttgtatgaaggcgacctgtaagcgagagcgagagagctggtgttttggtgtgagtgcgtggtagaacaaagaggacgaaaaacacggctaacgaattcgccgcacgacacactcgccgcatggcgaattcaaacgtatcccagtgaacgaatgagaaacaaaaggatatcttattgaaactgattaaactaaagactgccgaatagttatataaaatccaaaaccatgtctgcggccgaactcgaggcggaggcttcagcccaggagcaacaatcccagcaacaacaacaaaatcaatcacaaagcgaggagataaatacaaacactgccatcaatgcaaatgcaaccacaacaaatagctacaacaataatttagatacggaaacccagcttcagatgcaccaggatccgcagcagcagcaggaactcgagggcaatagcaacaatggcatcacaggactcggcctcagtctgatgaactcctcaccgccgccgcacagctaccgacattcgcgggcctatcgccacttcaagaatccgccacagccccacatgtgcatccgcaccaccacggaggcgggcgaggagctcttcatcaatgtcctcagctggacgcgcattgtgataccgcaggagcccagcgatcccattcccctttacggaggcatgcgggtaagattccttagattaagtgtcctcaaacattcacgtcggtgtttcctttattagttatttatgttaatgttcttattcattaaggtaccgcctggcagcccacgcagtcctcccattgtctttgccgtaatggccaatccggaggtgctcaaagactccggacgtcacagcaaagatcctgaggagcgacgagctatggtggagctgatgtgcgactttgtggaggctatgaatccaggcgtgaaattagtcaggtatataataacactattagtttactgcccgattaaaaacaagaataaaaatatatgtaatacatctccagaaacgccgtaatactcaaggatcgcgatatctccggcgagctgaaggatgtctggaatgccgttcaggcgcagcgcgatcgcgagagggaggagcagatgatgcagcagcgccagcagcagcactaccagaacatcaccacgcaacagatgtttcccaaatcgccggatgcatcgcgggcagctagtgctggtgctgcagtgaacgaggccagctcgccgccggctcacttgtctgagccgctgctggtagagcagggaaatggcaatggcaatggcatcaccctggccgtgtttgcccagcagctggacaacaaagtggccagcgagcagggtgagcagcaggagcaatcgccagtttcggaggatgcttgcgtggatcaaacggatgcaggcagctcgctgaatggatcaacaactgtgctggacaatcagccggtggcagtggagaacgaaccagaagtaaaggttgcaccaccggcagccacaaatggtgctagcactcccacacccagccacgcaacacccacagtaacagccacagccacatcatcgcccagtccaactccaactcccgttgttgctcccgtcgttacagcaactcctccacctgctgctcccgcaaagaaggagaaactgggcggcttcctgcccaacggctgcatcttcccgcgcttcaagaacaacaagcacaaggacaaggacaatagtcacaaggagggcaagagcaaagagaagaccctgctgaatgcgctgaaaaagagcaaagagaagaaggtggcgcccagtgaacagccgacagaaaaagccgccgcctcggacaacggaacaacgcagtacgagaagaactgcatcaacaatctggagtgcgaggtgcagaagctggacttgaacagcggcaccaatggcgacaatagcatgttcatcaagctgaaagtttcgccggccaatgccacagcagcggcagcggcggccaagtagagataatcctgaatttacacacaaaaaaaaaataaataaaatctcgtaggtaagtgggaagttaggacgatagagagccagaggaggcggcactctaccagtgaacagtgtcactgtgtcagcacttagggcttagagtcgtggatagagtcgtgtagcatatacaagatttatatatacagatatatatacaagcattcacacacccgtttttacaccgttggtcaattttttggatagccactcagaaccaggactagatgaactaacagttgtgccatgctccagctcatagacatttatagacgacagcgcttctcccaggatcttccccggcatttaactgacagaatgataaacgtatttacatagttcaatatatgtatgattcgcatacagtttgccttatatacaacaagcccgagagagcgacaagaacctagcaagaaccagttgataaacacgagaataaatgtatttaaaaacataatcgtcgaatgaaactcatgcgccaaatgaacttaccagactaactactagctccattcccaaattgtcacatcatctcatcgtgaaccatacacccaccaggcatttgcccatcgattcatccatccatccatccatccatccatccatccatccatatccatatccatatccgtgcaaaagtattaagaaacttcgcagatccaagaaccctaaccctggatcgattgatctccacgctttgaagttgaggggcagtgaaaacagcggagggagttttaaagccggctctttagtgccacgactaacttatgtaccttagtatagccgaatgcgaaaacagtatacagatccgcaatgtcgctattatgatttatattttaaagtttaacttttagtttccccttttggataccgaaacggggaaactacatttcattctatttattttccgttcgtgcttgttgtgttgtaattgtgtaatactactgttggaatttttaacttttac

SEQ ID NO: 7766 - DNA, 2329 bp, DROSOPHILA
ttttttgtttatgttgggttgtcggaaaaatcggctgttttccgtgtgtccgtctgccatgaaaagctgctaaaaagctaaatataaaaatcagcgcagcacacacgttccgctgcctgcattgtttgcccattctaatgggaaattatgtgagtgcgagtcaggaaaacgcatcgtgtgtgtatatatacatatatacataagtatgtaactgcgcccgtttgtttgtgtgtgtttttgtgtgcatggtgcaatggaaaagtgattattataaatgaaaatcagtgaaatgttcaaccaactcccacttgtgcgtgtgtaggaaggcagaagggtgttttgcattcgtgtgcgtgccagataaaaagactttgaatttctggaggatattagtgtcaactgtgtggggtataatacgccgtaggccctaatatgcaggcaagtccattaattacgccaaaggtcacaggttaggcacgcagccaggatccaaggagcaataataatgttgtatgaaggcgacctgtaagcgagagcgagagagctggtgttttggtgtgagtgcgtggtagaacaaagaggacgaaaaacacggctaacgaattcgccgcacgacacactcgccgcatggcgaattcaaacgtatcccagtgaacgaatgagaaacaaaaggatatcttattgaaactgattaaactaaagactgccgaatagttatataaaatccaaaaccatgtctgcggccgaactcgaggcggaggcttcagcccaggagcaacaatcccagcaacaacaacaaaatcaatcacaaagcgaggagataaatacaaacactgccatcaatgcaaatgcaaccacaacaaatagctacaacaataatttagatacggaaacccagcttcagatgcaccaggatccgcagcagcagcaggaactcgagggcaatagcaacaatggcatcacaggactcggcctcagtctgatgaactcctcaccgccgccgcacagctaccgacattcgcgggcctatcgccacttcaagaatccgccacagccccacatgtgcatccgcaccaccacggaggcgggcgaggagctcttcatcaatgtcctcagctggacgcgcattgtgataccgcaggagcccagcgatcccattcccctttacggaggcatgcgggtaccgcctggcagcccacgcagtcctcccattgtctttgccgtaatggccaatccggaggtgctcaaagactccggacgtcacagcaaagatcctgaggagcgacgagctatggtggagctgatgtgcgactttgtggaggctatgaatccaggcgtgaaattagtcagaaacgccgtaatactcaaggatcgcgatatctccggcgagctgaaggatgtctggaatgccgttcaggcgcagcgcgatcgcgagagggaggagcagatgatgcagcagcgccagcagcagcactaccagaacatcaccacgcaacagatgtttcccaaatcgccggatgcatcgcgggcagctagtgctggtgctgcagtgaacgaggccagctcgccgccggctcacttgtctgagccgctgctggtagagcagggaaatggcaatggcaatggcatcaccctggccgtgtttgcccagcagctggacaacaaagtggccagcgagcagggtgagcagcaggagcaatcgccagtttcggaggatgcttgcgtggatcaaacggatgcaggcagctcgctgaatggatcaacaactgtgctggacaatcagccggtggcagtggagaacgaaccagaagtaaaggttgcaccaccggcagccacaaatggtgctagcactcccacacccagccacgcaacacccacagtaacagccacagccacatcatcgcccagtccaactccaactcccgttgttgctcccgtcgttacagcaactcctccacctgctgctcccgcaaagaaggagaaactgggcggcttcctgcccaacggctgcatcttcccgcgcttcaagaacaacaagcacaaggacaaggacaatagtcacaaggagggcaagagcaaagagaagaccctgctgaatgcgctgaaaaagagcaaagagaagaaggtggcgcccagtgaacagccgacagaaaaagccgccgcctcggacaacggaacaacgcagtacgagaagaactgcatcaacaatctggagtgcgaggtgcagaagctggacttgaacagcggcaccaatggcgacaatagcatgttcatcaagctgaaagtttcgccggccaatgccacagcagcggcagcggcggccaagtag

SEQ ID NO: 7767 - protein, 531 aa, DROSOPHILA
MSAAELEAEASAQEQQSQQQQQNQSQSEEINTNTAINANATTTNSYNNNLDTETQLQMHQDPQQQQELEGNSNNGITGLGLSLMNSSPPPHSYRHSRAYRHFKNPPQPHMCIRTTTEAGEELFINVLSWTRIVIPQEPSDPIPLYGGMRVPPGSPRSPPIVFAVMANPEVLKDSGRHSKDPEERRAMVELMCDFVEAMNPGVKLVRNAVILKDRDISGELKDVWNAVQAQRDREREEQMMQQRQQQHYQNITTQQMFPKSPDASRAASAGAAVNEASSPPAHLSEPLLVEQGNGNGNGITLAVFAQQLDNKVASEQGEQQEQSPVSEDACVDQTDAGSSLNGSTTVLDNQPVAVENEPEVKVAPPAATNGASTPTPSHATPTVTATATSSPSPTPTPVVAPVVTATPPPAAPAKKEKLGGFLPNGCIFPRFKNNKHKDKDNSHKEGKSKEKTLLNALKKSKEKKVAPSEQPTEKAAASDNGTTQYEKNCINNLECEVQKLDLNSGTNGDNSMFIKLKVSPANATAAAAAAK

SEQ ID NO: 7768 - DNA, 3112 bp, DROSOPHILA
aaaaggtttttaagcaagtcattagtttggatttcatttataataataaaaatgtttaaaaaactatccttacgaaatggtaaccgtgaaagaaaaagtgattggcgtcccagttttaaaagcgttaagttggccatcttccggtggatttcccatttgttacgcaattcactttaatccgcgaaagtggaatcgtgtctaagcactggctgatactttgtcgcagctgctgttccgataaggattcattcactttgtgagtcttttcgaagatatcagcgcaaatagcgccagcacacacgaatgaggcagaatcattgttgcaaggcagatagtgcaacgcagaaaattcgatttctagcgattcgcgcaatttgtgcaacaaagtgagccacacgaaagcatgaaaatcgaagcaataagaagcacttttgcaccgacaaagctgaggcaagtttgcacgaaactgacattgaatagaaaaacagtgaatgcagctgagcagaaattgttaaaggagttcgaaaggttagcatagtttcccttagggtttgacattttcccacatgaatattcaattgaaagccgcaccgtgatacaatgtattatatgctctattttagtgttggctgaaacatgtcttggagcgccccttttgaaattaacatcaactgattggcatgcaattagcattttcccctggaaaatcggctagggaaaagcatatgtaaagtacattgcctacttttgggcataatttatgcattactcaacccgacattcaaaagctactgtcagagcttttgtacacatccgattctaattgacagatgctggtgttgtttcagtattaattcagttcaaatatagaacacttcgaaaatagagtgactaacccaattccattaggtcaacttatacattaaaaggtcgcctatgtgaccgaccaccatttgacctttgttcacaatgtgtgatggaataaaaaccacaaaagcaattactgtgtgatcgaattttaatattcgcttgccttagcttagggtaaatgtgagctccaaaaacattgactagctttaggactaacttaaatgaccatcaaagggggttaaggcaaatggcacaaaggtcaccgggcgtttacacaacgtgactgcaagtaatgtgagaaaatgatagtcttggtgatgtaataatttcacagctccatttttacttacatcgcatttggctctggatcagcccaaacgggtgcgggaatcaggacagccgcctgaacaggaatcgctgccggcgccggctggggagcagctcctccagctccaccaccgcctccggctccattgcgtgctccctttccacccttgccgccttttccacccttggagccatccggaccgtctggcccatcggctccatcagcgccatcttcgccatcgggctgaggacccgctggactcggcgctccgggctggccactgtctccgctctggccggatgtggccgttccgccaccgccgccgcctcctccgccgccaccgcctccagcgctgcctccaccaccagctccacctgctcctcccgctccgcctagaagtgctccagcctgtcccgcttgtccggcacctcctgctccaccggcctccgccggagcaggggcatcttgggcgtctacagattgtgaggcaaccaaactcagggcagcagctcctgcgtcactggctgtaatgcttccactgccactctggcttagttccgggtccgagtactctccctccagaccaggctgtggctgccacgagccatcttcggggggcgaaggcggcttgtaggagccatcgtcttccggcggaggaggaggtggctggactagcaagacaacgggtggagacagcagataggttccgactgcaggaagacccacgggcacaacatgaccatgggactcctcccagtaactgatagccaagaggccgagaaaaaactggttaggggaatgaaaaattagacgtcttcgacataatgtgtgctcgtcgctccactcaccactgtggcacgcattttggagagctagtttccgatcccttcgagtccgttctcgacagcttccacggcgggactgactcggttggcaatgccctaggccagcttttatacggtcatacggagatcgctggttgcgactgctgattaattgtgagcaggggcactgtctatacttggaagctgctgccactttgcatggcacctgcataaatcaagtgctaccaacgctaattgcagcaacaacagttacgagagacaatgatcttgttaatgtgtgtaatgtgcaccataaggcttgaccacccgatcaaaagacgcagttgccattacacctgaacttggccttttgattgacacgagccagtcttcggaacgttggctgccctacatgaacccatatatggagttggcaatacattcttgtctatcagatttacgaggtcagttgaataatttataatattaattttaataaatctctataattaatttattattcaaaggcttcctacccttggagactcaaataagtactattacgccatacaatgttggatatatattatgaaaatatttaaaaatcacagctaaacgattaccataaaatttaaatttcatttaaaagaaatcataagcctattttttaattgtattgtattgacaacattactccacaaatatacatttacagagggtatttgcaattttactataaggtagaagggatgacagtgaaaaaggggtaataaaataaccgactctcccactgtctccagcatccagttaagattcttgaaatttcttacttgcttaatctgctaataaataattaaaatggttttttaaatgcagcaactgccggcgacgagctgctttgccgcggataagataaaacgccattcatggctctgaggcgtcagttggcaatccgagcttcgcaaggaggttgactattgttgaccagtggttgctctgagtttttctaagttggcgttgactcaatagcttggctcgattgcatgggacggctgtggtggaatggtggatgcttcccaaccggtttcca

SEQ ID NO: 7769 - DNA, 983 bp, DROSOPHILA
gtggaagctgtcgagaacggactcgaagggatcggaaactagctctccaaaatgcgtgccacagtgttttttctcggcctcttggctatcagttactgggaggagtcccatggtcatgttgtgcccgtgggtcttcctgcagtcggaacctatctgctgtctccacccgttgtcttgctagtccagccacctcctcctccgccggaagacgatggctcctacaagccgccttcgccccccgaagatggctcgtggcagccacagcctggtctggagggagagtactcggacccggaactaagccagagtggcagtggaagcattacagccagtgacgcaggagctgctgccctgagtttggttgcctcacaatctgtagacgcccaagatgcccctgctccggcggaggccggtggagcaggaggtgccggacaagcgggacaggctggagcacttctaggcggagcgggaggagcaggtggagctggtggtggaggcagcgctggaggcggtggcggcggaggaggcggcggcggtggcggaacggccacatccggccagagcggagacagtggccagcccggagcgccgagtccagcgggtcctcagcccgatggcgaagatggcgctgatggagccgatgggccagacggtccggatggctccaagggtggaaaaggcggcaagggtggaaagggagcacgcaatggagccggaggcggtggtggagctggaggagctgctccccagccggcgccggcagcgattcctgttcaggcggctgtcctgattcccgcacccgtttgggctgatccagagccaaatgcgattcacgttgtgtaaacgcccggtgacctttgtgccatttgccttaaccccctttgatggtcatttaagttagtcctaaagctagtcaatgtttttggagctcacatttaccctaagctaaggcaagcgaatattaaaattcgatcacacagtaa

SEQ ID NO: 7770 - protein, 263 aa, DROSOPHILA
MRATVFFLGLLAISYWEESHGHVVPVGLPAVGTYLLSPPVVLLVQPPPPPPEDDGSYKPPSPPEDGSWQPQPGLEGEYSDPELSQSGSGSITASDAGAAALSLVASQSVDAQDAPAPAEAGGAGGAGQAGQAGALLGGAGGAGGAGGGGSAGGGGGGGGGGGGGTATSGQSGDSGQPGAPSPAGPQPDGEDGADGADGPDGPDGSKGGKGGKGGKGARNGAGGGGGAGGAAPQPAPAAIPVQAAVLIPAPVWADPEPNAIHVV

SEQ ID NO: 7771 - DNA, 12505 bp, DROSOPHILA
tttctttaaaaccggaaatgttatttccacacattccattccctttttatttccccgctgaagctttgatggaagcccgggaaaaatttcagatattagctttaaaatgtgactcacgtttcgtttgataagctggcaaacgcagagcgggcgtaaaaaatataacgaaaatcaaattatctgccataaagtgcgattccccaaagctggggaccaatccagaaaaaatatcgattttaggagcggaacttaaacctaagccaatctacgtaccgccgaatgcaatctgaatttatgcttctaagggccagcgaaagacatcatatattttttattaacttgacctttaggactgagcatgtgggtggcttatgtggaggtcagggaatgcctgttagcagctgtctgcagcctagaagccgataaagttgagccacggggataatgttcgcatgtcggggtgacagcatcgcaccgaggatctcgcaggtctaactttgtatgctttacatggaatgccttgccaggacacacatgtatcgcccacacatcctcatgttcgcatcctcgcaacgcacacacacgcttgtcaagtgaaataaatgtcatggtcaatttaacacaaagacagacacacttgttgtcctgtgtggcacgcttctcaatggagtgtttttcgtccttttgactgtgctttgctatcatttttccgccttcactgatgattccgccgcccaaggatgtgccaccaatcgccacaaatccgtgccacaactgcatgccgcatctttgtcgctctcaaatgttggttcgctcatcgacattctcgccaccattcggatcagagcacttgattgattaagtgtctatatgctatataaatacttatatataaatatattttgtattctttcttcttctctcttttgcgcgctcttaaaacgtatatttggtgccaacaaccaactctgtattatattattacgaaatataaatctatatatgtaaagtttgcatactgcacggatattgtaagtgctaaggatccagccgccaagagcccagaatcctaatttgaatagacaacaaaatccttttctcgctcgccgctcgaaagtatgctatatacgatttttgcttaacttttgcagacgatgcacagcctaaaatgcgttttagcctctcaccaccgccgcagaaagccattaccagtgcccgcctaacctcgcccactaaaaacagcctcagcagcaacaacaccatcaccacccccggcagcaataatagaagccccagcagcaccaaaaccaccatgctgacccgcaatggcggaggccacgggaccagccccactgcctccggatccggacacgccccctccgccaccgccgctgccgacgatgaagccacctcggattacaaccagtggctgcatgccatgaaactggtggcccgcctgcccggaggcactccacccgagttccgacgcaaggtgagatttcatctagtttgtttgttttttttttttgatttagacagcataaggtcacaggatatgggggatatttattatttataactacattcctcttaaagtatatatcaaagatgggcttaccaaattggcatcctttaaaatatatttccaccatggattactaaatatatgtatatataattttaaagaaaaatcccttcactcgttgaattatttctttcagttgtggctctcgctggcggacaagtatctcaagtcgaagaacgtggactgggcgcagcagagggagaagtgcttttgcgaggagtggcgcgaggacgacgaggagctgggcatacaaatcgtcaaggtgagctccagtcacggacaggtgatcctccagggaatcataaatgactcgtcttcgtttaggacctgcatcgcactggctcgaatctgtgcaccggtcccgcgggctccataaaccaggccaagctgaagcgcatcctactgggctatgcccgttacaaccccgaggtgggctattgccaggtgagtgctccttcaaggatctttgtctgctgtgtgcactttacacatataattcagggattcaacatgctgggcgccctcatattgcaagtgatggacaaggaggaggaggagtccatgaaggtcatgatctacctggtggagggcgttctgcccacgggctacttttacggctcgatgggcggcctgcaggcggacatgggcgtcttccgggagctgatgcagacgcgactgccacgattggcgaagcacctgcaacgcctgcagggacccgtcgagaatgcattcgaaccgccgctaaccaatgtcttcacaatgcagtggtttctcaccatgttctgcacctgcctgcccatgtcgtgcgtcctgcgcgtctgggacctggtccttatcgagggcagtgatgtccttcttcgcaccgccctcgtcctttggagcctgctagaagagtaagttattattttcattttaaataaaagtactagagtatgaataccgagcaccttccaacctttggtacacaacttgttactttcccaattttacggaattgagttaaaaacccatctgaaatgcattaccaggaatagcaaggttttttaatgtaattgagtgcaagagtacgattatatcagtgtgccacccagtctgcatagaatgttttgggttgggccggtttttggtgggtggttggccaaacaatcgccgcagcgcaaggcgagaatttgtgtcaaggcttctggaattttggcatgggtttttcttgcttgccaaatgcaatttagcaattccgctcggtctttacccaccaggaatttcatgttcagacgttgtggaactttttatggttttgtggaaaacaagtttagtaaatatcaacgacattgaactatgctaaatgtaagctagaaatgggttatatgggaggaggtcaaggtcatgagttgaatcggaaaattgaaaaaattagctcttgaggctaaagctcaaaataacatgtactttcttaattgttatttaaattgtatgcgatttatatttcagacgtgtgatcagtgtccgatctgcagatgagttctatggcaagatgggatcttattccagtgaactcctcaatggccatcttgtggactccaatggtctcattgagcgtgtggtaaagctaggacccattgaggatttgcgacaactgcgggataagcatctctacaacattgccccactgcgtcacaaacaaggattgcagtgagtatcacacaatataaatgtatctacacatataacagccttactatctgtaggctctactacgacgaggaggacacccattcggatgaggagcgcttggcggtggcaactgtatttggcttgaattggggtagacgtggatcggtgggtcctgcggcggcaggaaagcagcaagtagaacagaaggatcgcctcgctttagatatttccctgctaaagaagcagtacgataggctgcgcgagcgccagaagcaggcacatgtcatcctaaccaccgcctgttcgacggcagcgcgccaaggatcgggtccagcgagcagctcccagccggcggttccagtgaaccagttacttctcggtcgccctgcaatagtaactaacaagggaaagcgggttggagcaccattgggcgccattccacctgctcgaaagccctcacttcccgctgtcctccataccaaaccaacttcagagaaacagttgcgaaggggagagactctgctctggagggacaccgatccaagccgcagaaggcgagatagtttgacctggaaggagatcaaagcagatcgagctgcaatgatacgagagggcgttgatgtcagctccgtgagaacgcagaagctgcgcacgcgatttggaaagagcgatagctcctcatacagcgaggatagtgatggtgagcaggagtctgggacaggaggcggaggaggttccagcacggacaccagcctgtgtgatgacgatgatccaaagtccacggagaagagtcccaagcagaaggctaaactagcacgcaagctcaaggagcagaagcaattggccggttccagggagacgagcttggagcggcagagacccaaatcttgggctccaagcagccatgagattcccttcatgctgatgggtacggatagtggcgacgagaaggaggataagtctacgaaagaggggccgattactggagatcaagcggaggatagtgccacggaaagcggtcactacgaatttgacagagagttgcatttggtcagctccaagatggagccactcaagcttcctttcgatcccgaattcacaggcatgacttccgttagtcccataccgacgccccgagaaaagagtgaagctgaagaggatttgctggatgagcgaaagccattcgatgtgagcgatgatggagtgacaaatcagtatttcgagagggttaacagcgtggagcggcctaatcgtctggaattgacctactcgcttaacgaagaagaaacggatactaatgccatttacctagaggagcgggaaaaggttgaggggcatagtggtgatagggaatataattccctaccccctttctacccgagagagaacgatgatggtgtacagggtggtggcaaggtgccacagattcgtgatgataacattccaggtgagaacaaggacgattacaaggagctcctgagcatgacgatagaggaaaatactgtatacaagccaccaacccccacagccagcacattgagtaatgccagccgaaagagacgagatcctcgccgaaaaactttgacccgctcatcgaccattgaaatcgaggaacggtatcaggccctggagcgcaggatcagtcaggatcagccaagtggagatcggcaagccaagtatattcctagcacagctgctctagaggaacggtttaacaccctagaaaagcaattgagtgctgaaaagcaacgcaaggagctgtccgaaatggaggctgaatatccaattaaatccgagcgaattccatctaccgccgacctggaatcacgcttcaattccctaacaaaacaaatgagttccagcgaatctagttccaaaactcccattgatctcaaggacgaggaccgacccagtggcagcagctccaagaaccagaaggatagcgaaaaaactagcaagctgcacaaatcagaggaacctgaatctaatacgaaggaaactacaggggaaacagaagccagcgatagcaatgatagtaaaattggtgaaaaggaaacggagcaaccacgcatcaagaaacttccatcaactgcagagctggaagatcgttttaatgccttagaacgcaaaatgagtgttcagaagagcagcccatccaagaacaagaaagaaccacccgatgaagaagaatcgaaatctacaaaggagccagaagagccagaggagtccgaaaaagcaaatgagaaaacttcgggcaggcaaacacccattgctaaaaaggattccaaagatagtgatcagaaaaaatctgaaactaaggagaaccaatcaccaactaaaaaccaagacgaaaaagtcaaggtcaaatccccaaaaagtgaggagatgattgaaaaagaaacctcttcgaatccgaaagaggattcacacgaatcggaagccgctacaaataaaaaggtggaaggcaatcgcgagcttagctcagaaaaaggtgatcacaaaataaaagaaaagagtgaagaagctccagggaaagccggaaaagaaactgcggaaaccaaaaatgcaaatgttaaagactcgtcaaaaaaaggtgattctcaaaaaaacgaagccgctaagacgtcggtttcacaaactgagtctgacttaaaaccaagttctaaagaaaactcaacttccaaggatgcggaacaagaaaagacccctcgaaaatcaccaccctccacagaagaattagaaaaacgttttaatgccttagaaaagcagatgagtaccaccaacttggaaacaactaaagaacctgatcaaactaaaccagcaactaaaagtcaatctacgagtgccgaagtaaagacgcagaaatccatgaaatcttttgacgacaagatcaaagaagttaatgtggctatcgaaaaggagcagagcagagttgaggtggaggttaatgctgaaaagaagcgcaaaaacgttgaagaagccccaaaaaacaaagaaggggattctcagcaaccagaagaaagtcaacacaagggtaagaatcagcgaagagcatctgagccaccgtcaactgaggatcttgagaagcgttatgaaaccttgaagcgtcgcatgagtagcaagaatcaatttagcgaaaccgtggacgaagctctcgagcgaatccagcaggaggtaatctcggaagcagtggaggaaaagaagccaccgccatcgacggaggatctggagagccgctttgaggcactgcatggggataagaaaaatgtggaatctaaaatggatgaaactaaacacgtagatgtggccattgaggcgcatattccatccccacctccgccgccaccaccaccaaaggaacgtcctgtcctggccgaaccagttctccaccagcaacaggctctgatcgaggagctgcagagcaagatgcgaggccaatcacccggcgaggagaacctgaagcccagcgagataaatccgcagaggaggcagaaaaagctactgcaacgacccacgcccatgggcgatgagacctcggaagcacctgcaaacacggcttactacagagcggcaaaccacgaacaatggcagcagcgcatggtgcgtcggttctctgatttaccctcccgggccgatctggagaaccgattgcagttcctggagaggcaactctacaagaagttctacaagcagcgctgtgcaagtgattccgaagttgcatcgagggtcaaactcccgcccgaggaccagccgagcacctctcggcaggccaggaaacaggaagccgaaggacagctggagcagcgtgtcctggcgttggagaaacagctgagcgagaacagtctcaagttgctggaagcgatgagggagcgccacaggtcagcagatgacagtggctcccctaggcgattgagcacggagacaatcgacgccaccggcaaggaacttgttagatacacccagaacattggggagctggaggaagtcgacgcccacaagcccatcaacataagcatcaatatcaagatgatggtcaacaaagacagtgagtccaagcagccaaagggtgagtccaagcccacaacagaagatctgactcgccgcctggagcaattggagcagcaactgttggaggaacgggccaaaaatggctcgatcccaccagaaaatgaagtacttgaggagaaaccagaaaagctcgaagaaaaggattcctgcaaaaagcaggagaagaactgccacaatcagcacgtcaaaggtgatgaagttgagaaaacagaaattccggctgatagaaaaattgaacctgcatcggctaaggagactaaaacccttgaaaatgtagagaaagctcaaacccgagcgaaagttgtggatactgaaaaatcggttaaagatcagaacgcagtgacggatgaaaaatctgttcaagaccagaatgtagtggttgataagaaagcagataggaaaattttggataaaaaagataaatctcctgctgcggggaaatcagaagacacaaaacagacgtcagggaaaaaggagaaatcagaagacataaaacaggcgtcagaggcccccaaagctggagcctctaaagaaacatccacgcgagggaaaccttccgaaactaagttggaaaaacccacaactaaagagtcggttcttaaggaaactttccccaaaaaggagaatcttgaaagtgagaaacccaaatccaaagaaaacgaagctacaaaaacggaaacacaaaaatcaaaggaaacccctacagttgcggtcagccctaaagaaagcaaagtatcgagcaaacaaatgacagagaaaaaagaaacaatcaaagactcttcttccaaagaactgcccgagaaaatggttatcaattccacagatgtgggacccatggatccaaacggaaaaacagtggtgctgttaatggacaacgaacacagagcttcgaaggttagaagattgaccagggccaacacggaagaactggaagacctcttccaggccttggagaaacagctcaatgatcgaaatcttgtcaaatccgaagatggtcgcctgatacgagtagatcccaagccaagcgctgagcaagtggagcagactcaggctatttctgatctcaccaaggaaatcgaggactttaccagcgccaaaccggaggaggagaacccgaaggaggcggccaaagaagacaaaccggagcccgaagagccggaggacttcgactggggacccaacactgtgaaacatcacttgaaacgcaaaacagtctacctgccctccacaaaagagctggaatctcgcttccgctccttggaacgtcagataaaactgcttgaggatgtggaaaagatcgatgtggagcagcggctgaatgaaattgagcgtaaaattaaactgcagtactcgctatcccacgaaaaagatttgaacaagtacttggaactgtgtgaaggtaagggactagatgacgatgaacctgtgcctgtggaaactccaacgaaggaggcggaaattaccacagctagagatcgttctcgtagtcctgggcgcaaagcattggctaccaaatctccatatacctctccatcgcgaaaggccaccattaaaactccacatacttctcccacccggaagcctatcattaaatctccctatacatctccttcacggaagtcggccaagtccccttatacgtcgccctccagaaatcgacagagatcaccttctccaactcgatcgccggagaggaagtcaaagaaaagtccctacacttcaccagcccgtcgcaagccgcatcctaacgatcttcccatctcagatgatttagaatacaaatatcgagtacttgatttggtaagatccaaatctaaggagaacttggccaagcgaatgaacgatcccaacagaaaaccggccattcatcccttggaaatgattctcagtcccagtccggatgcagatgcaatacctacaacaggagaactagagcatagaatacgtgtcctggacgaaaagctcaaatcgccagccaaaacccgatcaaagtcgcgctctcgatcgccaaccatcgaagacataaaacgtcaaaagatgagagatgagaaaaagcccaggactcctgttcacaatctggaaaggattgtcagttcgcctggtagaccagaaccacccactgccgaagagctcgaggagcgtatacgcatcctggagcaggagcataagtttgactttaagacccagaaggactacaaggcattcaatcaaaagctcaaggacgtcatctcaccctcgctctccttcgacgaattccgggcagccaagtcacgcgagcaaagtccccgccgccatggacccactacgcccaagtctgccctgcgtcgcgatgatttcgatgaaggctactgtggcggtacccacacatccactctctaccgccccaccagcccgaaggtcattcggttccgggatgaggacgaggatgaggaccagtttgaggaagcacccagaccgaagtcgcgtcagaccagcgatcgaatggtgggcaccactcatgacgttttggactgtttaacggagaatactaaaattcttcaacgtattcttaagaagactcttgcagatcaaccatcggccactcgcagctacgccagcagcacggagggtctggatgccttgggtagtcgtctaatgagggtaagtgctgctcattgaaacacataaaatacagtaaaatatttaatcatacctactaggaaacctctccgattacccgaaccggaacccacacgggtgtaccactgcgaacgggggagaacatcaacgaccgcctgagttcgatcaagaactctatcaagtcgatcgacacactgtgcgaggagaagccgtaccagaaggagaagtgccagcggtacattgactcactgttcacggactcactgcactttgccagcaagaagagctccctggaggacctcagtctcagcaggagtcttagtcgcagcgagagcaggggaaggagtattcatagatctggagactatgcaccttcgattagggtcacctccgagcaccgatctttgggctcggcggattctcgaaggagtcctttgggcaaccgggacaccagtcccttgcaccacagatcgcatagggatattagccgggaactgtcccctcgacgaagacgcttggaggaggaggatgaggagcgtaaggatcgggagagcagtagggtaagacgtgataacttgttgccaaattattttgctgataatcgtagcgaactaagtagcgggagtagtttaaccgggtttaaccacaaagtagatagacaactagaagagacgtgcgccaaatatgcggacgatcgacgctcggcctgtcgcacaccgttgagccatccgtacgagtcccgcaccacagccacacgccacagccacacagatccagtccagatcccaaccaacccagcaggatcagctactgcaacagatagtttcccccggcccgtgtcgccatatcgccagccgtacgatccctaccatcggtcccctggtggtgccggtggcacacccctctatcagcccggcaagctggagatccgccacaccaccgtcacctcaaccttctacgatcggttcctcactgagaagcagatcgagcggcagacccactcccgtccgcccagtcgttcgccagtggtttcaccctcggtgccagccaaaagctatgtcgaattgtgcagcacctcaggcacatccagcaccaccgctaccagcacctccacctcctcattcatgtccagcagctatgcaggcccctccttttcgctgccctcggccagcaacttttcctatttgaatccgggttcgggctcgggttcgggcatctcgtcaatttcgccgcgcgccagttgctcggatcttcgttccaccaccagcggccctacatccaccagtaccacctccgtaaccacctcttcatatgtaccctacaatttcaccagctctttcacatctcgcttaaacgatcccattatcacttccactaccagtgcagttagcactagttcccttacccattccacgggggtctacaatcccatgatgtcgttcacactgagggaaccactagccagcagttccctgggtggttcaagtgcctctccattgctaccgtttcagtttaacagaactttcacttccaacttcgacaaggaacagaacaaacaatagaaggatgcacatcaaacattaaccaaaggttgtccatacacattacaaagctcccattgaagattcaaaacattgaaaagaaatcaagctcaaagcactgagagaaaaatctgtctaaaacaatttaattattctactcctattcgaattttttcatttttgtggttctgaaaatattaaataatcaacaattatcttaaagttaacaggttgccactttcccaactgttcttataccatgtttgctgattttagttaggtttttatctcagtcagcctaactttcgctaagcaatataaatatagtaaatataattaacagttttaggcaaataaatacctaaacacatatatatctacaaatatatacaaaccttgcaaatcggatatttattcttcaagcaactcttgcaccaaaccattttggcttcttgcaacttacctcatctacattgacagcaccagcaactcaactaatcataacttagcaaagatttttatacaatatatatctacgtatatacaaagaatatagctatcgaaaccgtaaccgaatgcgacgaggagggcaaggcaagatgttaatatccaactttttttcagcgttaacaaaagtttagcctctaattccttgaacaactttaactttagaacactcaattaaccttaaacttttccttaaaatgaactaatcaattaacatggtttacactagccaacaaaaacccaagaaaacaatatacaaacacacacacacactttgaaacggtgtaaaactttaagtgcatttttgggccgagttagtcgaggatgctaaacataatgattattcataactgactgacacaagccgtaaaattagtttaacaacattgttaaatacacacgcagccatatatgatgtacctataccaattgaacgatatatattgtatttaattaaataccaattgcagttgttgaatttcaattatgcaaaagacacaataacgactatgaa

SEQ ID NO: 7772 - DNA, 9373 bp, DROSOPHILA
atatgtaaagtttgcatactgcacggatattcctaaaatgcgttttagcctctcaccaccgccgcagaaagccattaccagtgcccgcctaacctcgcccactaaaaacagcctcagcagcaacaacaccatcaccacccccggcagcaataatagaagccccagcagcaccaaaaccaccatgctgacccgcaatggcggaggccacgggaccagccccactgcctccggatccggacacgccccctccgccaccgccgctgccgacgatgaagccacctcggattacaaccagtggctgcatgccatgaaactggtggcccgcctgcccggaggcactccacccgagttccgacgcaagttgtggctctcgctggcggacaagtatctcaagtcgaagaacgtggactgggcgcagcagagggagaagtgcttttgcgaggagtggcgcgaggacgacgaggagctgggcatacaaatcgtcaaggacctgcatcgcactggctcgaatctgtgcaccggtcccgcgggctccataaaccaggccaagctgaagcgcatcctactgggctatgcccgttacaaccccgaggtgggctattgccaggtgagtgctccttcaaggatctttgtctgctgtgtgcactttacacatataattcagggattcaacatgctgggcgccctcatattgcaagtgatggacaaggaggaggaggagtccatgaaggtcatgatctacctggtggagggcgttctgcccacgggctacttttacggctcgatgggcggcctgcaggcggacatgggcgtcttccgggagctgatgcagacgcgactgccacgattggcgaagcacctgcaacgcctgcagggacccgtcgagaatgcattcgaaccgccgctaaccaatgtcttcacaatgcagtggtttctcaccatgttctgcacctgcctgcccatgtcgtgcgtcctgcgcgtctgggacctggtccttatcgagggcagtgatgtccttcttcgcaccgccctcgtcctttggagcctgctagaagaacgtgtgatcagtgtccgatctgcagatgagttctatggcaagatgggatcttattccagtgaactcctcaatggccatcttgtggactccaatggtctcattgagcgtgtggtaaagctaggacccattgaggatttgcgacaactgcgggataagcatctctacaacattgccccactgcgtcacaaacaaggattgcagctctactacgacgaggaggacacccattcggatgaggagcgcttggcggtggcaactgtatttggcttgaattggggtagacgtggatcggtgggtcctgcggcggcaggaaagcagcaagtagaacagaaggatcgcctcgctttagatatttccctgctaaagaagcagtacgataggctgcgcgagcgccagaagcaggcacatgtcatcctaaccaccgcctgttcgacggcagcgcgccaaggatcgggtccagcgagcagctcccagccggcggttccagtgaaccagttacttctcggtcgccctgcaatagtaactaacaagggaaagcgggttggagcaccattgggcgccattccacctgctcgaaagccctcacttcccgctgtcctccataccaaaccaacttcagagaaacagttgcgaaggggagagactctgctctggagggacaccgatccaagccgcagaaggcgagatagtttgacctggaaggagatcaaagcagatcgagctgcaatgatacgagagggcgttgatgtcagctccgtgagaacgcagaagctgcgcacgcgatttggaaagagcgatagctcctcatacagcgaggatagtgatggtgagcaggagtctgggacaggaggcggaggaggttccagcacggacaccagcctgtgtgatgacgatgatccaaagtccacggagaagagtcccaagcagaaggctaaactagcacgcaagctcaaggagcagaagcaattggccggttccagggagacgagcttggagcggcagagacccaaatcttgggctccaagcagccatgagattcccttcatgctgatgggtacggatagtggcgacgagaaggaggataagtctacgaaagaggggccgattactggagatcaagcggaggatagtgccacggaaagcggtcactacgaatttgacagagagttgcatttggtcagctccaagatggagccactcaagcttcctttcgatcccgaattcacaggcatgacttccgttagtcccataccgacgccccgagaaaagagtgaagctgaagaggatttgctggatgagcgaaagccattcgatgtgagcgatgatggagtgacaaatcagtatttcgagagggttaacagcgtggagcggcctaatcgtctggaattgacctactcgcttaacgaagaagaaacggatactaatgccatttacctagaggagcgggaaaaggttgaggggcatagtggtgatagggaatataattccctaccccctttctacccgagagagaacgatgatggtgtacagggtggtggcaaggtgccacagattcgtgatgataacattccaggtgagaacaaggacgattacaaggagctcctgagcatgacgatagaggaaaatactgtatacaagccaccaacccccacagccagcacattgagtaatgccagccgaaagagacgagatcctcgccgaaaaactttgacccgctcatcgaccattgaaatcgaggaacggtatcaggccctggagcgcaggatcagtcaggatcagccaagtggagatcggcaagccaagtatattcctagcacagctgctctagaggaacggtttaacaccctagaaaagcaattgagtgctgaaaagcaacgcaaggagctgtccgaaatggaggctgaatatccaattaaatccgagcgaattccatctaccgccgacctggaatcacgcttcaattccctaacaaaacaaatgagttccagcgaatctagttccaaaactcccattgatctcaaggacgaggaccgacccagtggcagcagctccaagaaccagaaggatagcgaaaaaactagcaagctgcacaaatcagaggaacctgaatctaatacgaaggaaactacaggggaaacagaagccagcgatagcaatgatagtaaaattggtgaaaaggaaacggagcaaccacgcatcaagaaacttccatcaactgcagagctggaagatcgttttaatgccttagaacgcaaaatgagtgttcagaagagcagcccatccaagaacaagaaagaaccacccgatgaagaagaatcgaaatctacaaaggagccagaagagccagaggagtccgaaaaagcaaatgagaaaacttcgggcaggcaaacacccattgctaaaaaggattccaaagatagtgatcagaaaaaatctgaaactaaggagaaccaatcaccaactaaaaaccaagacgaaaaagtcaaggtcaaatccccaaaaagtgaggagatgattgaaaaagaaacctcttcgaatccgaaagaggattcacacgaatcggaagccgctacaaataaaaaggtggaaggcaatcgcgagcttagctcagaaaaaggtgatcacaaaataaaagaaaagagtgaagaagctccagggaaagccggaaaagaaactgcggaaaccaaaaatgcaaatgttaaagactcgtcaaaaaaaggtgattctcaaaaaaacgaagccgctaagacgtcggtttcacaaactgagtctgacttaaaaccaagttctaaagaaaactcaacttccaaggatgcggaacaagaaaagacccctcgaaaatcaccaccctccacagaagaattagaaaaacgttttaatgccttagaaaagcagatgagtaccaccaacttggaaacaactaaagaacctgatcaaactaaaccagcaactaaaagtcaatctacgagtgccgaagtaaagacgcagaaatccatgaaatcttttgacgacaagatcaaagaagttaatgtggctatcgaaaaggagcagagcagagttgaggtggaggttaatgctgaaaagaagcgcaaaaacgttgaagaagccccaaaaaacaaagaaggggattctcagcaaccagaagaaagtcaacacaagggtaagaatcagcgaagagcatctgagccaccgtcaactgaggatcttgagaagcgttatgaaaccttgaagcgtcgcatgagtagcaagaatcaatttagcgaaaccgtggacgaagctctcgagcgaatccagcaggaggtaatctcggaagcagtggaggaaaagaagccaccgccatcgacggaggatctggagagccgctttgaggcactgcatggggataagaaaaatgtggaatctaaaatggatgaaactaaacacgtagatgtggccattgaggcgcatattccatccccacctccgccgccaccaccaccaaaggaacgtcctgtcctggccgaaccagttctccaccagcaacaggctctgatcgaggagctgcagagcaagatgcgaggccaatcacccggcgaggagaacctgaagcccagcgagataaatccgcagaggaggcagaaaaagctactgcaacgacccacgcccatgggcgatgagacctcggaagcacctgcaaacacggcttactacagagcggcaaaccacgaacaatggcagcagcgcatggtgcgtcggttctctgatttaccctcccgggccgatctggagaaccgattgcagttcctggagaggcaactctacaagaagttctacaagcagcgctgtgcaagtgattccgaagttgcatcgagggtcaaactcccgcccgaggaccagccgagcacctctcggcaggccaggaaacaggaagccgaaggacagctggagcagcgtgtcctggcgttggagaaacagctgagcgagaacagtctcaagttgctggaagcgatgagggagcgccacaggtcagcagatgacagtggctcccctaggcgattgagcacggagacaatcgacgccaccggcaaggaacttgttagatacacccagaacattggggagctggaggaagtcgacgcccacaagcccatcaacataagcatcaatatcaagatgatggtcaacaaagacagtgagtccaagcagccaaagggtgagtccaagcccacaacagaagatctgactcgccgcctggagcaattggagcagcaactgttggaggaacgggccaaaaatggctcgatcccaccagaaaatgaagtacttgaggagaaaccagaaaagctcgaagaaaaggattcctgcaaaaagcaggagaagaactgccacaatcagcacgtcaaaggtgatgaagttgagaaaacagaaattccggctgatagaaaaattgaacctgcatcggctaaggagactaaaacccttgaaaatgtagagaaagctcaaacccgagcgaaagttgtggatactgaaaaatcggttaaagatcagaacgcagtgacggatgaaaaatctgttcaagaccagaatgtagtggttgataagaaagcagataggaaaattttggataaaaaagataaatctcctgctgcggggaaatcagaagacacaaaacagacgtcagggaaaaaggagaaatcagaagacataaaacaggcgtcagaggcccccaaagctggagcctctaaagaaacatccacgcgagggaaaccttccgaaactaagttggaaaaacccacaactaaagagtcggttcttaaggaaactttccccaaaaaggagaatcttgaaagtgagaaacccaaatccaaagaaaacgaagctacaaaaacggaaacacaaaaatcaaaggaaacccctacagttgcggtcagccctaaagaaagcaaagtatcgagcaaacaaatgacagagaaaaaagaaacaatcaaagactcttcttccaaagaactgcccgagaaaatggttatcaattccacagatgtgggacccatggatccaaacggaaaaacagtggtgctgttaatggacaacgaacacagagcttcgaaggttagaagattgaccagggccaacacggaagaactggaagacctcttccaggccttggagaaacagctcaatgatcgaaatcttgtcaaatccgaagatggtcgcctgatacgagtagatcccaagccaagcgctgagcaagtggagcagactcaggctatttctgatctcaccaaggaaatcgaggactttaccagcgccaaaccggaggaggagaacccgaaggaggcggccaaagaagacaaaccggagcccgaagagccggaggacttcgactggggacccaacactgtgaaacatcacttgaaacgcaaaacagtctacctgccctccacaaaagagctggaatctcgcttccgctccttggaacgtcagataaaactgcttgaggatgtggaaaagatcgatgtggagcagcggctgaatgaaattgagcgtaaaattaaactgcagtactcgctatcccacgaaaaagatttgaacaagtacttggaactgtgtgaaggtaagggactagatgacgatgaacctgtgcctgtggaaactccaacgaaggaggcggaaattaccacagctagagatcgttctcgtagtcctgggcgcaaagcattggctaccaaatctccatatacctctccatcgcgaaaggccaccattaaaactccacatacttctcccacccggaagcctatcattaaatctccctatacatctccttcacggaagtcggccaagtccccttatacgtcgccctccagaaatcgacagagatcaccttctccaactcgatcgccggagaggaagtcaaagaaaagtccctacacttcaccagcccgtcgcaagccgcatcctaacgatcttcccatctcagatgatttagaatacaaatatcgagtacttgatttggtaagatccaaatctaaggagaacttggccaagcgaatgaacgatcccaacagaaaaccggccattcatcccttggaaatgattctcagtcccagtccggatgcagatgcaatacctacaacaggagaactagagcatagaatacgtgtcctggacgaaaagctcaaatcgccagccaaaacccgatcaaagtcgcgctctcgatcgccaaccatcgaagacataaaacgtcaaaagatgagagatgagaaaaagcccaggactcctgttcacaatctggaaaggattgtcagttcgcctggtagaccagaaccacccactgccgaagagctcgaggagcgtatacgcatcctggagcaggagcataagtttgactttaagacccagaaggactacaaggcattcaatcaaaagctcaaggacgtcatctcaccctcgctctccttcgacgaattccgggcagccaagtcacgcgagcaaagtccccgccgccatggacccactacgcccaagtctgccctgcgtcgcgatgatttcgatgaaggctactgtggcggtacccacacatccactctctaccgccccaccagcccgaaggtcattcggttccgggatgaggacgaggatgaggaccagtttgaggaagcacccagaccgaagtcgcgtcagaccagcgatcgaatggtgggcaccactcatgacgttttggactgtttaacggagaatactaaaattcttcaacgtattcttaagaagactcttgcagatcaaccatcggccactcgcagctacgccagcagcacggagggtctggatgccttgggtagtcgtctaatgagggaaacctctccgattacccgaaccggaacccacacgggtgtaccactgcgaacgggggagaacatcaacgaccgcctgagttcgatcaagaactctatcaagtcgatcgacacactgtgcgaggagaagccgtaccagaaggagaagtgccagcggtacattgactcactgttcacggactcactgcactttgccagcaagaagagctccctggaggacctcagtctcagcaggagtcttagtcgcagcgagagcaggggaaggagtattcatagatctggagactatgcaccttcgattagggtcacctccgagcaccgatctttgggctcggcggattctcgaaggagtcctttgggcaaccgggacaccagtcccttgcaccacagatcgcatagggatattagccgggaactgtcccctcgacgaagacgcttggaggaggaggatgaggagcgtaaggatcgggagagcagtagggtaagacgtgataacttgttgccaaattattttgctgataatcgtagcgaactaagtagcgggagtagtttaaccgggtttaaccacaaagtagatagacaactagaagagacgtgcgccaaatatgcggacgatcgacgctcggcctgtcgcacaccgttgagccatccgtacgagtcccgcaccacagccacacgccacagccacacagatccagtccagatcccaaccaacccagcaggatcagctactgcaacagatagtttcccccggcccgtgtcgccatatcgccagccgtacgatccctaccatcggtcccctggtggtgccggtggcacacccctctatcagcccggcaagctggagatccgccacaccaccgtcacctcaaccttctacgatcggttcctcactgagaagcagatcgagcggcagacccactcccgtccgcccagtcgttcgccagtggtttcaccctcggtgccagccaaaagctatgtcgaattgtgcagcacctcaggcacatccagcaccaccgctaccagcacctccacctcctcattcatgtccagcagctatgcaggcccctccttttcgctgccctcggccagcaacttttcctatttgaatccgggttcgggctcgggttcgggcatctcgtcaatttcgccgcgcgccagttgctcggatcttcgttccaccaccagcggccctacatccaccagtaccacctccgtaaccacctcttcatatgtaccctacaatttcaccagctctttcacatctcgcttaaacgatcccattatcacttccactaccagtgcagttagcactagttcccttacccattccacgggggtctacaatcccatgatgtcgttcacactgagggaaccactagccagcagttccctgggtggttcaagtgcctctccattgctaccgtttcagtttaacagaactttcacttccaacttcgacaaggaacagaacaaacaatag

SEQ ID NO: 7773 - protein, 3111 aa, DROSOPHILA
MRFSLSPPPQKAITSARLTSPTKNSLSSNNTITTPGSNNRSPSSTKTTMLTRNGGGHGTSPTASGSGHAPSATAAADDEATSDYNQWLHAMKLVARLPGGTPPEFRRKLWLSLADKYLKSKNVDWAQQREKCFCEEWREDDEELGIQIVKDLHRTGSNLCTGPAGSINQAKLKRILLGYARYNPEVGYCQVSAPSRIFVCCVHFTHIIQGFNMLGALILQVMDKEEEESMKVMIYLVEGVLPTGYFYGSMGGLQADMGVFRELMQTRLPRLAKHLQRLQGPVENAFEPPLTNVFTMQWFLTMFCTCLPMSCVLRVWDLVLIEGSDVLLRTALVLWSLLEERVISVRSADEFYGKMGSYSSELLNGHLVDSNGLIERVVKLGPIEDLRQLRDKHLYNIAPLRHKQGLQLYYDEEDTHSDEERLAVATVFGLNWGRRGSVGPAAAGKQQVEQKDRLALDISLLKKQYDRLRERQKQAHVILTTACSTAARQGSGPASSSQPAVPVNQLLLGRPAIVTNKGKRVGAPLGAIPPARKPSLPAVLHTKPTSEKQLRRGETLLWRDTDPSRRRRDSLTWKEIKADRAAMIREGVDVSSVRTQKLRTRFGKSDSSSYSEDSDGEQESGTGGGGGSSTDTSLCDDDDPKSTEKSPKQKAKLARKLKEQKQLAGSRETSLERQRPKSWAPSSHEIPFMLMGTDSGDEKEDKSTKEGPITGDQAEDSATESGHYEFDRELHLVSSKMEPLKLPFDPEFTGMTSVSPIPTPREKSEAEEDLLDERKPFDVSDDGVTNQYFERVNSVERPNRLELTYSLNEEETDTNAIYLEEREKVEGHSGDREYNSLPPFYPRENDDGVQGGGKVPQIRDDNIPGENKDDYKELLSMTIEENTVYKPPTPTASTLSNASRKRRDPRRKTLTRSSTIEIEERYQALERRISQDQPSGDRQAKYIPSTAALEERFNTLEKQLSAEKQRKELSEMEAEYPIKSERIPSTADLESRFNSLTKQMSSSESSSKTPIDLKDEDRPSGSSSKNQKDSEKTSKLHKSEEPESNTKETTGETEASDSNDSKIGEKETEQPRIKKLPSTAELEDRFNALERKMSVQKSSPSKNKKEPPDEEESKSTKEPEEPEESEKANEKTSGRQTPIAKKDSKDSDQKKSETKENQSPTKNQDEKVKVKSPKSEEMIEKETSSNPKEDSHESEAATNKKVEGNRELSSEKGDHKIKEKSEEAPGKAGKETAETKNANVKDSSKKGDSQKNEAAKTSVSQTESDLKPSSKENSTSKDAEQEKTPRKSPPSTEELEKRFNALEKQMSTTNLETTKEPDQTKPATKSQSTSAEVKTQKSMKSFDDKIKEVNVAIEKEQSRVEVEVNAEKKRKNVEEAPKNKEGDSQQPEESQHKGKNQRRASEPPSTEDLEKRYETLKRRMSSKNQFSETVDEALERIQQEVISEAVEEKKPPPSTEDLESRFEALHGDKKNVESKMDETKHVDVAIEAHIPSPPPPPPPPKERPVLAEPVLHQQQALIEELQSKMRGQSPGEENLKPSEINPQRRQKKLLQRPTPMGDETSEAPANTAYYRAANHEQWQQRMVRRFSDLPSRADLENRLQFLERQLYKKFYKQRCASDSEVASRVKLPPEDQPSTSRQARKQEAEGQLEQRVLALEKQLSENSLKLLEAMRERHRSADDSGSPRRLSTETIDATGKELVRYTQNIGELEEVDAHKPINISINIKMMVNKDSESKQPKGESKPTTEDLTRRLEQLEQQLLEERAKNGSIPPENEVLEEKPEKLEEKDSCKKQEKNCHNQHVKGDEVEKTEIPADRKIEPASAKETKTLENVEKAQTRAKVVDTEKSVKDQNAVTDEKSVQDQNVVVDKKADRKILDKKDKSPAAGKSEDTKQTSGKKEKSEDIKQASEAPKAGASKETSTRGKPSETKLEKPTTKESVLKETFPKKENLESEKPKSKENEATKTETQKSKETPTVAVSPKESKVSSKQMTEKKETIKDSSSKELPEKMVINSTDVGPMDPNGKTVVLLMDNEHRASKVRRLTRANTEELEDLFQALEKQLNDRNLVKSEDGRLIRVDPKPSAEQVEQTQAISDLTKEIEDFTSAKPEEENPKEAAKEDKPEPEEPEDFDWGPNTVKHHLKRKTVYLPSTKELESRFRSLERQIKLLEDVEKIDVEQRLNEIERKIKLQYSLSHEKDLNKYLELCEGKGLDDDEPVPVETPTKEAEITTARDRSRSPGRKALATKSPYTSPSRKATIKTPHTSPTRKPIIKSPYTSPSRKSAKSPYTSPSRNRQRSPSPTRSPERKSKKSPYTSPARRKPHPNDLPISDDLEYKYRVLDLVRSKSKENLAKRMNDPNRKPAIHPLEMILSPSPDADAIPTTGELEHRIRVLDEKLKSPAKTRSKSRSRSPTIEDIKRQKMRDEKKPRTPVHNLERIVSSPGRPEPPTAEELEERIRILEQEHKFDFKTQKDYKAFNQKLKDVISPSLSFDEFRAAKSREQSPRRHGPTTPKSALRRDDFDEGYCGGTHTSTLYRPTSPKVIRFRDEDEDEDQFEEAPRPKSRQTSDRMVGTTHDVLDCLTENTKILQRILKKTLADQPSATRSYASSTEGLDALGSRLMRETSPITRTGTHTGVPLRTGENINDRLSSIKNSIKSIDTLCEEKPYQKEKCQRYIDSLFTDSLHFASKKSSLEDLSLSRSLSRSESRGRSIHRSGDYAPSIRVTSEHRSLGSADSRRSPLGNRDTSPLHHRSHRDISRELSPRRRRLEEEDEERKDRESSRVRRDNLLPNYFADNRSELSSGSSLTGFNHKVDRQLEETCAKYADDRRSACRTPLSHPYESRTTATRHSHTDPVQIPTNPAGSATATDSFPRPVSPYRQPYDPYHRSPGGAGGTPLYQPGKLEIRHTTVTSTFYDRFLTEKQIERQTHSRPPSRSPVVSPSVPAKSYVELCSTSGTSSTTATSTSTSSFMSSSYAGPSFSLPSASNFSYLNPGSGSGSGISSISPRASCSDLRSTTSGPTSTSTTSVTTSSYVPYNFTSSFTSRLNDPIITSTTSAVSTSSLTHSTGVYNPMMSFTLREPLASSSLGGSSASPLLPFQFNRTFTSNFDKEQNKQ

SEQ ID NO: 7774 - DNA, 8164 bp, DROSOPHILA
tccactgcacatttggcgggtggacaccatttccttctgcttccagtggcgtttcggtgctaaatggacagaattcgtttgcagcagcgttttgaagttgctgcaatagcggaacacacacagaaaacaacgtatatacgcattaattcgactatatacatatatatgtagcgtctctatgctgctttttctcccccctttcgaaatttctttgaaattttgtgctacgcactttgcgactcgatttcgagatggcttcgtacccgttttagtaaatggaactattgcgattgcattgtttttggacgcgcttcgccgtggtccaatatgtctagttctttgagacgcagttcatccacgctgacatccactttaacgcagtttttcgagcacaattaaaactacatacacaatccgtggcaaaaaaagtcaaagtgtctagggctggaagcgcatcgatggcaccgacaatcgattgcgccgatagcttgcaagcagtgaagttgctgcagaaacatcgattattataggctgattccactgaaacattgctgttccaattgcgcccagcaagccatttcaaaaaataaatgtttttttcttaaccaaaagtgaaattcaagctcaattcccacataccactgaacaattagaaaacaaacgacgaataaattgtgccaacaggtgtttgaatatgtatttagcacgtcgttacaaatagatcattgcttcgttcgataacaatactcgaaaaacagtttgcagatagaatttgttcctttgactgggtaaattgtctaaatactttaacatttaatttagttgggctgaagaaccaacaattacgataatatacgaaacgttttccgctaataggtcgccagactcttcggaacggctgcaatgtagaatgaactattaacgttattcagtattcgagattcaaaattcaagaatacacgatatttggaaaaatcataagaaagaatcgactggcgagcaatataaataagttatgtatttgtgcttttttatgcgtctgtagattatgaaatactttcgtatgtgctgctgtcatgggcctcttcgtctgatcttggtaaaaaccataaaacggatcggatgcggtgccaaaacaacttaaaaagcgaacacagaaactgattcgagggtgcggataggtggacattgatgcttcgatgcagcgatggtggtgataagcggaagtggggatcagagtccggatccgagtccgcttaggcgacggcgtcagtgtcacactcctcctcgacggtgatgtacataccctcctcctcgtaggcggaatcgtgcttggccaggatgcgcagcaggggacgcaggcgcagccaccactgcttcttcgggatgcgttgactggaagaggagtgggttatgccaagagcttaaagggaattcatagtcccctttgtggtgaccatcgggttaaacttactcgaagttcgtctctgcaatgaggtcgaccagcggtgagaagcggtactgccgcgacacgattcccagcagcgtggcggtgtccggggacttgcagttgactacgccgttggcgtcgatgttcgccttgatctgggcggccagccagtcgacacacttggcggccattttggtgcccatgttgcggtcgaagggagtgggtgagccgccctgctgcatgtgacccaggatgttcatacggcaggtgaagaggcccttgccctcctccgagtacaggcggtaaatgaagtccgtgctgtagttctcgctagccttctcgtttcgcaggattagaccgcgggagacgccctcggccatcttggaggccatgtggtagacatcctgctgcaggtctttgatggagaacttctcctcgtagatgtaggcggcatcagctccgccggccaagccggccaaggtggccaaatagccacagtagccacccatcgtctcaatgacgaacactcggcgcttggttccctgtgccgactgacggatacggtcgcaaatctccgtaatctcatttaaaccggtgtcgcatcccagagaaaattctgtgccgggcacattgttcgaaatcgtcgatggaataaccacaatggggatgcagaactgtgggtagttgtcccgctgatcggcgatctgtccggcggcatggtaactctcaaagccaccaatgatcaggagaccctggatcttaaactccttgagacgagcggcgatctccttgaacttgccctcaggcagtgtgcgtttggtacccaagtaggcgccaccctgaccaacccatcctgagacatccgacctgaaattgaattgcattaagcacagatttagagtgatcccttgtcggattacttaccagcccagctcgcggacatttccggcaatcagaccctcgacaccgtcgttgattccataaaccacatcaccgcggtagatggcattgcgcacgaagctgcgcacagcggcattcataccgcaagccggagcaccaatatgcatcacagctaggcggtatccttcgattcccttgccatcggcgtcgaagttctccttgggcggcttcaagcgcgtcagcatcttgtaggtctccagattccgctcgaaggagcgtccgcgcagcttgacggcatccgcccagcgtttctccgccatggccttggccacagcctgggtgcgctctacgcactccatcagcggcacgcgaaccgcctggttgccgtccagagagatgaccactggcaccgagtccttggtggcctccatcagggccaaagtggcctcagctcccatgcggcaagcctatgcgggttagaagcattaactctcaagtcaaaaatagtgtaattatatcttaataagtatatcttattttggtaactttagtgttttaaatcggatttacagcgcttcttaatataagtatgctatacaaataaaacaaaaatagctggcattgtaaattactaattaaaattaaattttgaggtgatctttggataattacttaccaaaatacgatcgaaggcactgggattgccaccgcgctgcacgtgacccaagacagtgatgcgggcatcgtgcttcagacgctcgtcgatcaccttctttacatcctcggctgtgatgggatgaccctcgcgatccatggctccctcggccacaatcacgatgttcagacgctggccagcagatcgctcctgttggtcaatggtgaagggattcacttaagcatatatgtaagatactaatcgtgaatgatacagaaactacaaaagcacaaacgaattatgaagaggcatgatgagtagacatcatcataacaaaaaaaatgtagtttacatatgctttgctttacaatgttgaaatagtgtcaccaaatgtgtatcagcaagcgaatgagtgcagtgcgtttcataaagttaactcacgttattctgtgatattcatgtatttcagtttgcatcattaaaatggctgtgtgcacgttcttttcaatgtatttaagtatttaaatcagttttgaaactttgaaatgcactgcaactgaattggtgttttgaaatatgaagaatggacgcacaagtcaaagtcgatgaatagaaaacattgatgaagatttactgatcgattaaacgaggatggacgttagtggatttggaaaagttagtaagggaactcagtgagatcatcgtgagtacataaaacagagactcaaaacccaaacaagtaaatcaaatagctgttaaagctgtttatcgccatggaaatttcggcacatcgaatagtccaaaaacaatgcagaataaaatttagaaattcaaaaatttgacaaaagagtaactagaaattaattggatagcgaaggactctggacctgacctggtggagcttgacacagatctcgtccttccaattgactgacaccggctcctcgggtatgaacataaaatcagcctctgtggctatggctgccgatatggctaagtaactaaaaaaacaagagattaggtacaaaaataaaagatggttcacaaatgtcggggagataattatccggggattgggagtatctggggtaaacttaagattagttacaatatgatttcggtatgctggtacagacaaaaactgtgcgtaattcattccgtatctccggtttgtgtttaaagatacattcgtgtgcagtaagcagaaaataagaacaagcgtttgtatggcaagtgtcgctcttaaaatgtgtctttcaaaaaattgtgtacaggtgtactacttaagcatcaagcaacgacaactgcactgaagtatacaactctatctaaaacaggaatattatctcgacagctaactggctatattaataagaataatatcctaaaatcctatacaagctgtcgagaacatatttccgatgctttgcgacttctcgcagtgctgatggaatggaaatggagctgcatcttgcctgggccagctgagagcagagcctgtctggccaatcgaccttgggcggcatttcgggaatgaatatgaaatccgcctcgcacgccagtccacccacaagagctaaatagctgcaaaaatatatattacaaaatattagtcaaaagggggatgggattttggaggatatggggatcgatcgacatagtactgcggccatagaaacagaaatgtgcgaaatgagtcgacgacattcaacagatttccgttttgggcttgcctgttccaatttaaggacaagtcgatcgggccaatcggcctgcggaggagactcgggcagaaagacgtagtctgcctcggagataatgccagctaccaccgaaagatagctagagatagtcgttccaggcattagctaaaatcccaattaatcactgacacttaggctaatacagaggcatcccaacttttcctcgcaaatatccgctcagagatcaacttacccgcaatgacgacccatgacctccatgatgaaggtgcgctgatgggagtaggctgtactggagatggcatcgattgcctcgatgatgcgatgtagtgccgtgtccgtgccgatggtcatgtcagtgccacagaaatcgttgtcgatggagccaacctacaaaaagattcatccataagaaaatatatccaaggaatactctgtgtagcataccaatccaacgatgtgcaggacattgaacttctcctgctgctcggtggtaatggtcttgttcttgaccagctcgtccaacaggctggaccactcctgacggaacagattggcgcccgtgagggagccatcgcctccaatgaccaccagattggtgattcctcgctgaatcaggttgttagcggctttcaagcgaccctgacgctcacggaagtcctggcaacgggcggagccaatgatggtgccaccacgatggataatggatgagactgaggcccagttggcttcctggatgcagtcgccaccatccaccatgccctggtagccttcacgaatgaagtagaccttgccgaaggtaaacacgaatcaattgtagatatggtgtaaaacagtttggtatagagtttggtatcttcatggcacatgacatcattagcacaattaaaaatgaatcaccgaattcgagtataaattattttaatttcattttcactctgccaaagtcgtaatattttaataggaagcagtaaagaacagtcaatagaaattaatatgatatgacttatctcatatactttctcaacttttactgaataagtttaagttttaaacaacaaaacatttgcatattcaaaataccgttacaggtaattacaatgtaatcgatgttaaatcgatactttttaagcaactcacataaccaagaattcaaattttataacgctcttaatttgaaaagtgaaaaaataacataaacaataatgatgccaaggcactagtagattaaaaacaaaggttagattacttgaactgatttggaaccatttgtttagcatactcatgatatatttattaattttgttcaatttattgaacatatcaagcgctgtcatgcaaagcgtggcaataactttacttttattgacccccaagaaattgaaatcaaatgaatagattttaatcaatttaaattggctagcaattgacacattttttgcatattttcgagggaccaacggccggccagaagttccctaacaaattaaagaactcatttaaataaaccgaatagaaaccaagagcgacaacaaaaaaacgaaacaaattagccgaaatcgaaatcgcatgtgagggacccgaaaataaacccaatgtcaatgtgcatgtacacatatattcttgaatttcttttcgcaccgattggagattatctaactggctttgcggcccaatagtcgtggtttaacggctgctgataagcaaattaccaggtgttttacgtaaatttctgggttcacatgggtttgttgcctgtgcctgggggtcggggtcaccggacgcgatgctgcgtgggcggaaagtacttgacagaggtcaccaactcaccttgcagcccaaatagatggccatacggacacaggctcgcacggcggcattcatgccctgggaatccccgccgctggtgaagaccgccagtcctttgtccttctgcgagccgcgggccaggaatcgttgattaatctcggaattcatttttcaatcttttgcactatatgtaaatcaaactggggtcgtaacggatatcgcacaaagcacacactatgaaccactattgtactcggtagggagtttccctgttttgcaactatgcgagcagcgccgctggagctgggttatatccaagtgggctataaatactactactgctccttgccgtggcttttcagttactagcaatatgtacgctcgcaggcggtattcacaagtttcgcttttgcttttgacgtttcaaggtgaccttcaggccagagacgcatacacaacacacacggacacacgcacacagccacgggctttctgtaagtgcgtactgatgcaatgcaaacttcggatggctaaatccgcccaagagttcgctccaacgcgattgccctaacttggtttgatttaggtcgaaaatctgaggattctgtctgttatgaacggacttttcgcgactagcaacgagcggaaaatagcgtttaaccaatttgtttatgttcgacccacaatcgttcagctgttgatcagctggttatcactgggcgagtaaaagctttcgcgagctttcaccgctgggaatggggaaattcgggagcagtcatcggttgtgtgtgggtgcgattgccgttatcgttatcgtttatataatacgttattctgatattcaaaaaaccggaaaatgtatcctcagattcgaaaatgtttatgaaacgccaattattatgctatatctcaagtgttcaactgatgttctaccctatctacaactatccgcgtaaagtaacgaaatgtaagagcttttatcgttgaatattagtgctcgtttaagtgcgtaattatttaaaaaactgtaaaaagcgagacaaacttacaaaaggcttgactggatgtacaaaatcaataacatcctgcatggttcttaaacactttcgcagctcatccaccgatttgccacatttcctttttggtgcactctttttctttttcaccgcattcttttcagaatagttcacagcattaagaaatccgttgtgcagattgtttattggttttccacatcgttgcgcagacttgtctttttgtatgtttttttcaccaggactatcattcttttgatcaccagaatcactgcgcaactttatacaatgtcgtttgcaattaaattttacacttaaaagagtatttcctctaagcaagtaaaaggaagaagtgttataatataaagtcaaactatataagcacatacgaaatatctcgaggacaacacaaatgatgacttcgtgtgcattggatgccgatgtttggaaatgtgagctaaagtaaaacaaagtcttataaattgatcaaaattaaattcgatttttaccttttgcctaatcggaggtgttttgtttgagatttctaagcgaaatgttgtaggaccatgaaaatggcggcaaatgggtatccgtc

SEQ ID NO: 7775 - DNA, 3084 bp, DROSOPHILA
cgaaaagtccgttcataacagacagaatcctcagattttcgacctaaatcaaaccaagttagggcaatcgcgttggagcgaactcttgggcggatttagccatccgaagtttgcattgcatcagtacgcacttacagaaagcccgtggctgtgtgcgtgtgtccgtgtgtgttgtgtatgcgtctctggcctgaaggtcaccttgaaacgtcaaaagcaaaagcgaaacttgtgaataccgcctgcgagcgtacatattgctagtaactgaaaagccacggcaaggagcagtagtagtatttatagcccacttggatataacccagctccagcggcgctgctcgcatagttgcaaaacagggaaactccctaccgagtacaatagtggttcatagtgtgtgctttgtgcgatatccgttacgaccccagtttgatttacatatagtgcaaaagattgaaaaatgaattccgagattaatcaacgattcctggcccgcggctcgcagaaggacaaaggactggcggtcttcaccagcggcggggattcccagggcatgaatgccgccgtgcgagcctgtgtccgtatggccatctatttgggctgcaaggtctacttcattcgtgaaggctaccagggcatggtggatggtggcgactgcatccaggaagccaactgggcctcagtctcatccattatccatcgtggtggcaccatcattggctccgcccgttgccaggacttccgtgagcgtcagggtcgcttgaaagccgctaacaacctgattcagcgaggaatcaccaatctggtggtcattggaggcgatggctccctcacgggcgccaatctgttccgtcaggagtggtccagcctgttggacgagctggtcaagaacaagaccattaccaccgagcagcaggagaagttcaatgtcctgcacatcgttggattggttggctccatcgacaacgatttctgtggcactgacatgaccatcggcacggacacggcactacatcgcatcatcgaggcaatcgatgccatctccagtacagcctactcccatcagcgcaccttcatcatggaggtcatgggtcgtcattgcggctatttagctcttgtgggtggactggcgtgcgaggcggatttcatattcattcccgaaatgccgcccaaggtcgattggccagacaggctctgctctcagctggcccaggagcgatctgctggccagcgtctgaacatcgtgattgtggccgagggagccatggatcgcgagggtcatcccatcacagccgaggatgtaaagaaggtgatcgacgagcgtctgaagcacgatgcccgcatcactgtcttgggtcacgtgcagcgcggtggcaatcccagtgccttcgatcgtattttggcttgccgcatgggagctgaggccactttggccctgatggaggccaccaaggactcggtgccagtggtcatctctctggacggcaaccaggcggttcgcgtgccgctgatggagtgcgtagagcgcacccaggctgtggccaaggccatggcggagaaacgctgggcggatgccgtcaagctgcgcggacgctccttcgagcggaatctggagacctacaagatgctgacgcgcttgaagccgcccaaggagaacttcgacgccgatggcaagggaatcgaaggataccgcctagctgtgatgcatattggtgctccggcttgcggtatgaatgccgctgtgcgcagcttcgtgcgcaatgccatctaccgcggtgatgtggtttatggaatcaacgacggtgtcgagggtctgattgccggaaatgtccgcgagctgggctggtcggatgtctcaggatgggttggtcagggtggcgcctacttgggtaccaaacgcacactgcctgagggcaagttcaaggagatcgccgctcgtctcaaggagtttaagatccagggtctcctgatcattggtggctttgagagttaccatgccgccggacagatcgccgatcagcgggacaactacccacagttctgcatccccattgtggttattccatcgacgatttcgaacaatgtgcccggcacagaattttctctgggatgcgacaccggtttaaatgagattacggagatttgcgaccgtatccgtcagtcggcacagggaaccaagcgccgagtgttcgtcattgagacgatgggtggctactgtggctatttggccaccttggccggcttggccggcggagctgatgccgcctacatctacgaggagaagttctccatcaaagacctgcagcaggatgtctaccacatggcctccaagatggccgagggcgtctcccgcggtctaatcctgcgaaacgagaaggctagcgagaactacagcacggacttcatttaccgcctgtactcggaggagggcaagggcctcttcacctgccgtatgaacatcctgggtcacatgcagcagggcggctcacccactcccttcgaccgcaacatgggcaccaaaatggccgccaagtgtgtcgactggctggccgcccagatcaaggcgaacatcgacgccaacggcgtagtcaactgcaagtccccggacaccgccacgctgctgggaatcgtgtcgcggcagtaccgcttctcaccgctggtcgacctcattgcagagacgaacttcgatcaacgcatcccgaagaagcagtggtggctgcgcctgcgtcccctgctgcgcatcctggccaagcacgattccgcctacgaggaggagggtatgtacatcaccgtcgaggaggagtgtgacactgacgccgtcgcctaagcggactcggatccggactctgatccccacttccgcttatcaccaccatcgctgcatcgaagcatcaatgtccacctatccgcaccctcgaatcagtttctgtgttcgctttttaagttgttttggcaccgcatccgatccgttttatggtttttaccaagatcagacgaagaggcccatgacagcagcacatacgaaagtatttcataatctacagacgcataaaaaagcacaaatacataacttatttatattg

SEQ ID NO: 7776 - protein, 788 aa, DROSOPHILA
MNSEINQRFLARGSQKDKGLAVFTSGGDSQGMNAAVRACVRMAIYLGCKVYFIREGYQGMVDGGDCIQEANWASVSSIIHRGGTIIGSARCQDFRERQGRLKAANNLIQRGITNLVVIGGDGSLTGANLFRQEWSSLLDELVKNKTITTEQQEKFNVLHIVGLVGSIDNDFCGTDMTIGTDTALHRIIEAIDAISSTAYSHQRTFIMEVMGRHCGYLALVGGLACEADFIFIPEMPPKVDWPDRLCSQLAQERSAGQRLNIVIVAEGAMDREGHPITAEDVKKVIDERLKHDARITVLGHVQRGGNPSAFDRILACRMGAEATLALMEATKDSVPVVISLDGNQAVRVPLMECVERTQAVAKAMAEKRWADAVKLRGRSFERNLETYKMLTRLKPPKENFDADGKGIEGYRLAVMHIGAPACGMNAAVRSFVRNAIYRGDVVYGINDGVEGLIAGNVRELGWSDVSGWVGQGGAYLGTKRTLPEGKFKEIAARLKEFKIQGLLIIGGFESYHAAGQIADQRDNYPQFCIPIVVIPSTISNNVPGTEFSLGCDTGLNEITEICDRIRQSAQGTKRRVFVIETMGGYCGYLATLAGLAGGADAAYIYEEKFSIKDLQQDVYHMASKMAEGVSRGLILRNEKASENYSTDFIYRLYSEEGKGLFTCRMNILGHMQQGGSPTPFDRNMGTKMAAKCVDWLAAQIKANIDANGVVNCKSPDTATLLGIVSRQYRFSPLVDLIAETNFDQRIPKKQWWLRLRPLLRILAKHDSAYEEEGMYITVEEECDTDAVA

SEQ ID NO: 7777 - DNA, 8200 bp, DROSOPHILA
cttttcaccgaataccacacaaagctgacgacgggatgtttcgccacccgtacttctcccttaggggtggtttcctgtcacgagcacagggttgctaaatgcgcggcaaaggcggccgaaagtcctgtgctcggcttgagagctccactggcgaaatgtttgtttttattgatattaatttttcttctgcttctcctcctccttcagctgtttctccctgagcttttcctccttcttcagctgtttctcccttagcttccgctctttctcccgcttcttcacgattgcgggatcatcgctgtcctcattggggtccttctcctccttcttcacctcttcatcgggaatttgttcaagaccctatagagaaagaagctttacacctgaggcagcaaaaaaaaatctgtaaggaactacaggaaaaaccaaaaacgaccatttcaactatcacttccgaactgcacgtttcgtttattcacttttgcacttaagcttaaacggaaaactttacttaattaaaattagttcgttttctcatccggtatggcatccagaccctgcaagaagattggttcggttttttgtaaatgatttaagcttataactcttcgaataagcgtaaaaaaatggatggtatgaattcgtaggaaataaagtaacattaactaccgccaccaatgatcaataaacaataaaaacgaaattaaccaagaaaactaagattttaaatgcaattaccttataatatagaaaactttaaaactaatattttattagtgaagaaagctagttcataacaccaaaaacaatctatttaacatacttcagagaaaaacataaacaacgaaaccaaaatgagcgtgcataataatgaagtgcgtgctgtgagataacaaaactgctgccaaaaatagggtaaaaacgtgatggttggcctgccgcacaaaaatcagttgtaggcaggccagactatagcacaacacttacgttcatcttgtagggattgtcggtcagtcggaaatcgcgctggtacataactcggctgaaacgctcgtccatgttgcgccggaaagcctgttgagcaaacgattagcaaacaattagtaactccgtagtgttccgtcgaactcgttgcgaaaagcaggcggttaaataatgtttaacagattccgattggtgcacaaacagctgcggttatataagaatttcgggctgctgggccagaaggccagcgtgggactcacattgccgatcatcagcttgtccaggccgtacatggcgtatatgggcaccgagaggagcgtggtgatgatcaccgcaccaggtaggatttcgaaccacatattgtcaatggaaatagattgttatgatatttactgcaagacgacacccagtgtgaccgtggatagtccgttccaatatacaggtagccttacaaaatataccaaaaacttgaatgttgaactagaggtgggccagtaacgataagaaagtaacggtgactgaattctattctgctactgcgtttagaaaaacgtcaatgttgatttgaaaatagtttttgaccaatagttggcttaaataatttgtaaatagatctgatatatctagtagagctgataaatgtacgcaatgtttataatcaatttcaaagctcgaaagtatatagaaaacaaattccagtgtaaagctgcgtgaccgttttacgctctattcgggttggtatttttcccaatgcacttttcgtacatccagctggaccatttttttgcactcagatctcggtcttaccaatccgattcttcattgaacagctacgaaggaattcgcagagagttctgagcgcagcaatagcagcaagaagactaccaacaaagagcagagcgacaaatcagcggagagcaggatggccaccagcggtattgtcgagtcatttcccacgggcgcactggtgcccaaggcggagacgggagtcctgaactttctgcagaagtacccggagtacgatggacgcgacgtcaccatagccatcttcgattccggcgtcgatccccgggcaacgggactggaggtgagttggcactttttcgcactctctataccggttacaaagaacttgtacagttattcttccaatatttacaatatttcgtcttacctattctattacgatttaatccttctactgtgtcacgactgcttcttactcccgtttctcattataaccgatccaatttcaatctgctcctacgcaacagacgctgtgcgatggaaagaccgttaaagtaatagagcggtacgactgttccggatgcggcgacgtggacatgaagaagaaggtgacgccggacgagaacggcaacattaagggcctgtccggaaactcgctcaagctgagtccggagctgatggctctgaacacagatccggagaaggcggtgcgggtaggcctcaagagcttcagcgatttgttgccctccaaggtgcggaacaacattgtggcccaggccaagctgaagcactgggacaagccgcacaagacggccactgcaaacgccagtcgcaagattgttgaatttgagtcacaaaatccaggtgagctaagtgattgattacttgaggcaaaattaccaacaacatatgtatctttgcaggagaagcctcaaaactgccctgggacaagaagatattgaaagagaatctagactttgagctagagatgttgaatagctacgagaaggtgtacggcgacattaagacctcctacgattgcatcctttttcccacggccgacggatggctgacaatcgtcgacaccacggagcagggcgatctggatcaggctctgcgcattggcgagtattcccgcacgcacgagacccgcaatgtggacgactttctttccatatcggtaaacgtccacgacgagggcaacgtactggaggtggtcggcatgagctcaccccacggcacccacgtatcgtctattgccagcggcaaccatagctcccgggacgtggatggcgtggcgccgaatgctaagatcgtttctatgaccatcggtgatggtcgacttgggtctatggagaccggcacggcactagtgcgtgccatgactaaggtgatggaactatgtcgcgatggcagacgcatcgatgtgatcaacatgagctatggcgagcatgccaattggtcaaattccgggtaagcaagtgcgaaaggccggcggaactaatcccaaagttggtgatgtcttttagtgtgtctgggtcagggtctgggtcggatgaaatgcgtcgcagaagaaagatgtgtgcgtctaggtaaatttcatgagaaatccaaatattcacacagtccaatcctcttgtcttcgacacgttccagccgacacacacctaactgataaccatcaaaattcatgaaaaaatacctaatctatatctctaatctcttgcagccgcattggggagctcatgaacgaggttgtcaacaagtatggcgtggtgtgggtggcatcggccggcaaccatggtccggcactttgtactgtgggaactccgccggacatcagccagcccagtttgatcggcgtgggcgcgtacgtatcaccccaaatgatggaggccgagtatgcgatgcgagaaaagctgcccgggaacgtgtacacctggacatcgcgagatccctgcatcgacggaggtcaaggcgttaccgtatgcgctccgggcggagccattgcgtccgtgccacagtttactatgagcaagtcccagctgatgaacggtaccagcatggcggcacctcacgtcgccggcgcagtggcgctgctcatctccggtctgaagcaacagaacatcgagtattcgccgtacagtattaagcgagcgatcagcgtcactgccaccaaactgggctatgtagatccctttgctcagggccatggcttgctcaatgtcgagaaggcattcgagcatttgacggagcaccgccagtccaaggataatatgctcaggtgagtgctgtggaacgccagatctcaggatctctaaacaaaaaacgattaaatttcgcgttcgcattcacactagctgagtaagggctaacttgttttataatttagtaggtatatcgttaagatgaccgaatagtaaacaattgtcaaagcaatcttgtaaaattccaaccaaataataaatttctttcgttttaatcttataggttctccgtgcgcgtgggcaacaacgcagacaagggcattcatttgcgtcagggcgtgcagcgtaactccatcgattacaacgtttatatagagcccatcttctacaatgacaaggaggcgggtgagtagagactatagagacccaattccagctcttaccgttccaattttacagatcccaaggacaagtttaacttcaatgtacggctaaatctgattgcctcgcagccgtgggtgcagtgtggagctttcttggatctcagctatggcacccgctccattgccgtgcgcgtcgatcccactggactccagccaggcgttcacagcgctgtgtaagggactcttgagccaaaaacgcttccccttctaatcgcatttataaaaatttatccaggattcgggcttatgacactgactgcgtacagaagggttctctctttgagattcctgtcacggtggtgcagccccatgtgctggagtcggatcagaacacgcccgtcttcgaacccgcctcttccaagggagacaacagcgtggagtttcagccaaacaccattcaaagagacttcatcctggtgccagaacgtgctacttgggcgggtgagtgttattccctgaaatatgttcacaaagtgagtcacacttcatccttatgcagagttgcgtatgcgtataaccgatcccaatcgtggcgaggacattggaaagttctttgtacacacgaaccaacttcttcccaagcaatcctgtcgtaagcttgagaccatgaagatcgtatcggttggctcggaaaacgaatctataatggcttttaaagttaaggttggtaaatcgattgaaacctttccaagtcattatactgattaaaacccacatttgtatgacagtctggcaggattctggagctatgcattgccaagtactggtccaactacggccagagtcacctgaagtacagcttgcgtttccgtggcgtggaagcgcacaatcccaatgcctgtgagtcatttgtaaaatggtaatagcttttgttgaactaaagaaaccattgttttgtagacgtcatgcatgcgggcaggggaattcataagctggagattgaggccctggttgccgaggatgtgcagccccagctacagctaaagaatgccgaagtggtgctaaaaccgaccgaggccaagatctcgccgctaagcgccacacgagacgtcatcccagatggacgtcaggtgtatcagaacctgctggcctttaacttgaacgtggccaaggccgcagatgtgtcgatatacgcaccgatctttaacgacttgttgtatgaagcggagtttgagtcacagatgtggatgctttttgatgcaaacaaggccctggtggccaccggcgatgctcactcccacacttccttcacaaagctcgataagggcgaatacacaatcagactgcaggtgcgtcacgagaagcgcgacctgctggagaagatctcggaggcaaatctggtggcctcattcaagctgactagccccctcacccttgatttctatgagaactacaatcagtgcatagtgggaggtcgtaaatacgtctcgagtccgctaaggctgtccactcgggtgctttatatcgctcctattacccaagagcgacttaccaaggccaatctgcccgctcaatgcgcctggctgagcggcaatctggtattcccgcaagatgaggtcggacggcgagtggctcagcatccatttacttacatcctcaatcccgctgagaaaaagtcacacacgaatggctcgagcaacggttccagcgctgcaggatccacagctacggcagctgctgtcaccactgctaatggcgcaaaaccgaaagctccggcgactccacaagcggccacctcagtgaccaatcctgcggccggcgatggaatttctgttcagaacgacccgcctgtggacagcagtgggagtcccgcctcacccaaaaagggcaaggccaatgccgacgattatgccgaaagttttcgcgactttcaatgttcgcagattgtcaagtgtggtaggattttaaaaaatagagcactattttctgattagtttaacatacgatcctcttacagaactggaaatggcagagaaaatctataatgatgtagtcgctgcccatcccaagcatttgcaggcaaacctgctacttatccagaacatcgagtccaatcagctgaagtcgcaactgccgctgactttcgtcaatgctcaaaagacatcgccaccagaggcaggcgagagcgccgacaagcaaaaggaggatcaaaagaaagtacgaagcgccctggagcgaattgttaagctggccgacaaggtgatccaggagaccgattccgaggcactgctctcctactacggtctgaagaacgacactcgtgccgatgcagccaagataaagacgtatgttgtttaattgggttaggcattccagtcagaaatgaattcttttcttctttagcaacatggacaaacagaaaaacactctcattgaggcgctaagcaagaagggcattgctgtggcaaagctggctgtattagacgactgtatcaaggatagcctggctgagatcaacgagctgtataccgagattatcaagttcgtggacgccaacgactccaaggccatccagttcgctctgtggcacgcctatgcccatggccactacggtcgcatgtacaagtatgtggttaagctaatcgaggagaagcgaacccgcgatcacttcgtggagctggccgccatcaacggcgccctgggtcacgagcacatccgtactgtcatcaaccgtatgatgatcactgcctttcccagcagcttccgtttgttctgagcactttccgacagaatacgcaacaaatattcacgcttcgaagcgatcattgttttgtataactaatgtaatccatatgtatatgaataaatgctattaactgaaattcaatattgttagtcatttcattaaaactaaattattaaatttaactaagattaatgatcgattgattttccggtaagaaaaaaggaaatgagaattgaacaattttattaaggagtgaattttaaaatcccgccaaaccgttacgatgttgaacatagcattttccagcactggtgcctggtaattgagccgactccgcgtgacggtcatacttattgcagcaaaaaaacaaaaaacaatgcagacgcacacgagagtgtaaaatgggtaagtttgacagaaaaagagctgtttaaaactggaaaattgtcttattgtgcggctaataatatgaactcgtgggtgacatgtgaaaagtgcaagaataacgacttccaactgcagtttcctgctacgtagttgcgatgaggcttccgcctgcgtgtgcaagtgtgtgtgtgcgtgtatgtattggccgatcgattttattttgcatattcaaggacagcgaagtcctgcgggaaagtgcggccgggattagaggaaacgggaatcggggcggcgccggaaactagagcgagctcccgttcccaagccgaatgactcagtaatcgcccatgaaatccccggaacgatatcagcttacaatctgtgtacatgcatttgttgcttaagttccaccccgcatcccagtcccgctttcactcccactccaacctaccccttgcccacccactgtgtcaactccggagaggacaaacaatggccccttgcagccggatgacaaatgcgggtgcagcgacatcaagaaagaaccttcgaatttggtgacgcgactatcagatactcttactttcttcgtttgcctatgaagttcattatcatttttgtgtcattaaagcgatttataattagatcaatcagactaattcaacgtattgtgacttataaatcagtataacctatgaaagtttttttaaccacccattaatttctggttaggattcaattgaagt

SEQ ID NO: 7778 - DNA, 4584 bp, DROSOPHILA
ggattgtcggtcagtcggaaatcgcgctggtacataactcggctgaaacgctcgtccatgttgcgccggaaagcctgttgagcaaacgattagcaaacaattagtaactccgtagtgttccgtcgaactcgttgcgaaaagcaggcggttaaataatgtttaacagattccgattggtgcacaaacagctgcggttatataagaatttcgggctgctgggccagaaggccagcgtgggactcacattgccgatcatcagcttgtccaggccgtacatggcgtatatgggcaccgagaggagcgtggtgatgatcaccgcaccagctacgaaggaattcgcagagagttctgagcgcagcaatagcagcaagaagactaccaacaaagagcagagcgacaaatcagcggagagcaggatggccaccagcggtattgtcgagtcatttcccacgggcgcactggtgcccaaggcggagacgggagtcctgaactttctgcagaagtacccggagtacgatggacgcgacgtcaccatagccatcttcgattccggcgtcgatccccgggcaacgggactggagacgctgtgcgatggaaagaccgttaaagtaatagagcggtacgactgttccggatgcggcgacgtggacatgaagaagaaggtgacgccggacgagaacggcaacattaagggcctgtccggaaactcgctcaagctgagtccggagctgatggctctgaacacagatccggagaaggcggtgcgggtaggcctcaagagcttcagcgatttgttgccctccaaggtgcggaacaacattgtggcccaggccaagctgaagcactgggacaagccgcacaagacggccactgcaaacgccagtcgcaagattgttgaatttgagtcacaaaatccaggagaagcctcaaaactgccctgggacaagaagatattgaaagagaatctagactttgagctagagatgttgaatagctacgagaaggtgtacggcgacattaagacctcctacgattgcatcctttttcccacggccgacggatggctgacaatcgtcgacaccacggagcagggcgatctggatcaggctctgcgcattggcgagtattcccgcacgcacgagacccgcaatgtggacgactttctttccatatcggtaaacgtccacgacgagggcaacgtactggaggtggtcggcatgagctcaccccacggcacccacgtatcgtctattgccagcggcaaccatagctcccgggacgtggatggcgtggcgccgaatgctaagatcgtttctatgaccatcggtgatggtcgacttgggtctatggagaccggcacggcactagtgcgtgccatgactaaggtgatggaactatgtcgcgatggcagacgcatcgatgtgatcaacatgagctatggcgagcatgccaattggtcaaattccggccgcattggggagctcatgaacgaggttgtcaacaagtatggcgtggtgtgggtggcatcggccggcaaccatggtccggcactttgtactgtgggaactccgccggacatcagccagcccagtttgatcggcgtgggcgcgtacgtatcaccccaaatgatggaggccgagtatgcgatgcgagaaaagctgcccgggaacgtgtacacctggacatcgcgagatccctgcatcgacggaggtcaaggcgttaccgtatgcgctccgggcggagccattgcgtccgtgccacagtttactatgagcaagtcccagctgatgaacggtaccagcatggcggcacctcacgtcgccggcgcagtggcgctgctcatctccggtctgaagcaacagaacatcgagtattcgccgtacagtattaagcgagcgatcagcgtcactgccaccaaactgggctatgtagatccctttgctcagggccatggcttgctcaatgtcgagaaggcattcgagcatttgacggagcaccgccagtccaaggataatatgctcaggttctccgtgcgcgtgggcaacaacgcagacaagggcattcatttgcgtcagggcgtgcagcgtaactccatcgattacaacgtttatatagagcccatcttctacaatgacaaggaggcggatcccaaggacaagtttaacttcaatgtacggctaaatctgattgcctcgcagccgtgggtgcagtgtggagctttcttggatctcagctatggcacccgctccattgccgtgcgcgtcgatcccactggactccagccaggcgttcacagcgctgtgattcgggcttatgacactgactgcgtacagaagggttctctctttgagattcctgtcacggtggtgcagccccatgtgctggagtcggatcagaacacgcccgtcttcgaacccgcctcttccaagggagacaacagcgtggagtttcagccaaacaccattcaaagagacttcatcctggtgccagaacgtgctacttgggcggagttgcgtatgcgtataaccgatcccaatcgtggcgaggacattggaaagttctttgtacacacgaaccaacttcttcccaagcaatcctgtcgtaagcttgagaccatgaagatcgtatcggttggctcggaaaacgaatctataatggcttttaaagttaagtctggcaggattctggagctatgcattgccaagtactggtccaactacggccagagtcacctgaagtacagcttgcgtttccgtggcgtggaagcgcacaatcccaatgcctacgtcatgcatgcgggcaggggaattcataagctggagattgaggccctggttgccgaggatgtgcagccccagctacagctaaagaatgccgaagtggtgctaaaaccgaccgaggccaagatctcgccgctaagcgccacacgagacgtcatcccagatggacgtcaggtgtatcagaacctgctggcctttaacttgaacgtggccaaggccgcagatgtgtcgatatacgcaccgatctttaacgacttgttgtatgaagcggagtttgagtcacagatgtggatgctttttgatgcaaacaaggccctggtggccaccggcgatgctcactcccacacttccttcacaaagctcgataagggcgaatacacaatcagactgcaggtgcgtcacgagaagcgcgacctgctggagaagatctcggaggcaaatctggtggcctcattcaagctgactagccccctcacccttgatttctatgagaactacaatcagtgcatagtgggaggtcgtaaatacgtctcgagtccgctaaggctgtccactcgggtgctttatatcgctcctattacccaagagcgacttaccaaggccaatctgcccgctcaatgcgcctggctgagcggcaatctggtattcccgcaagatgaggtcggacggcgagtggctcagcatccatttacttacatcctcaatcccgctgagaaaaagtcacacacgaatggctcgagcaacggttccagcgctgcaggatccacagctacggcagctgctgtcaccactgctaatggcgcaaaaccgaaagctccggcgactccacaagcggccacctcagtgaccaatcctgcggccggcgatggaatttctgttcagaacgacccgcctgtggacagcagtgggagtcccgcctcacccaaaaagggcaaggccaatgccgacgattatgccgaaagttttcgcgactttcaatgttcgcagattgtcaagtgtgaactggaaatggcagagaaaatctataatgatgtagtcgctgcccatcccaagcatttgcaggcaaacctgctacttatccagaacatcgagtccaatcagctgaagtcgcaactgccgctgactttcgtcaatgctcaaaagacatcgccaccagaggcaggcgagagcgccgacaagcaaaaggaggatcaaaagaaagtacgaagcgccctggagcgaattgttaagctggccgacaaggtgatccaggagaccgattccgaggcactgctctcctactacggtctgaagaacgacactcgtgccgatgcagccaagataaagaccaacatggacaaacagaaaaacactctcattgaggcgctaagcaagaagggcattgctgtggcaaagctggctgtattagacgactgtatcaaggatagcctggctgagatcaacgagctgtataccgagattatcaagttcgtggacgccaacgactccaaggccatccagttcgctctgtggcacgcctatgcccatggccactacggtcgcatgtacaagtatgtggttaagctaatcgaggagaagcgaacccgcgatcacttcgtggagctggccgccatcaacggcgccctgggtcacgagcacatccgtactgtcatcaaccgtatgatgatcactgcctttcccagcagcttccgtttgttctgagcactttccgacagaatacgcaacaaatattcacgcttcgaagcgatcattgttttgtataactaatgtaatccatatgtatatgaataaatgctattaactg

SEQ ID NO: 7779 - protein, 1354 aa, DROSOPHILA
MATSGIVESFPTGALVPKAETGVLNFLQKYPEYDGRDVTIAIFDSGVDPRATGLETLCDGKTVKVIERYDCSGCGDVDMKKKVTPDENGNIKGLSGNSLKLSPELMALNTDPEKAVRVGLKSFSDLLPSKVRNNIVAQAKLKHWDKPHKTATANASRKIVEFESQNPGEASKLPWDKKILKENLDFELEMLNSYEKVYGDIKTSYDCILFPTADGWLTIVDTTEQGDLDQALRIGEYSRTHETRNVDDFLSISVNVHDEGNVLEVVGMSSPHGTHVSSIASGNHSSRDVDGVAPNAKIVSMTIGDGRLGSMETGTALVRAMTKVMELCRDGRRIDVINMSYGEHANWSNSGRIGELMNEVVNKYGVVWVASAGNHGPALCTVGTPPDISQPSLIGVGAYVSPQMMEAEYAMREKLPGNVYTWTSRDPCIDGGQGVTVCAPGGAIASVPQFTMSKSQLMNGTSMAAPHVAGAVALLISGLKQQNIEYSPYSIKRAISVTATKLGYVDPFAQGHGLLNVEKAFEHLTEHRQSKDNMLRFSVRVGNNADKGIHLRQGVQRNSIDYNVYIEPIFYNDKEADPKDKFNFNVRLNLIASQPWVQCGAFLDLSYGTRSIAVRVDPTGLQPGVHSAVIRAYDTDCVQKGSLFEIPVTVVQPHVLESDQNTPVFEPASSKGDNSVEFQPNTIQRDFILVPERATWAELRMRITDPNRGEDIGKFFVHTNQLLPKQSCRKLETMKIVSVGSENESIMAFKVKSGRILELCIAKYWSNYGQSHLKYSLRFRGVEAHNPNAYVMHAGRGIHKLEIEALVAEDVQPQLQLKNAEVVLKPTEAKISPLSATRDVIPDGRQVYQNLLAFNLNVAKAADVSIYAPIFNDLLYEAEFESQMWMLFDANKALVATGDAHSHTSFTKLDKGEYTIRLQVRHEKRDLLEKISEANLVASFKLTSPLTLDFYENYNQCIVGGRKYVSSPLRLSTRVLYIAPITQERLTKANLPAQCAWLSGNLVFPQDEVGRRVAQHPFTYILNPAEKKSHTNGSSNGSSAAGSTATAAAVTTANGAKPKAPATPQAATSVTNPAAGDGISVQNDPPVDSSGSPASPKKGKANADDYAESFRDFQCSQIVKCELEMAEKIYNDVVAAHPKHLQANLLLIQNIESNQLKSQLPLTFVNAQKTSPPEAGESADKQKEDQKKVRSALERIVKLADKVIQETDSEALLSYYGLKNDTRADAAKIKTNMDKQKNTLIEALSKKGIAVAKLAVLDDCIKDSLAEINELYTEIIKFVDANDSKAIQFALWHAYAHGHYGRMYKYVVKLIEEKRTRDHFVELAAINGALGHEHIRTVINRMMITAFPSSFRLF

SEQ ID NO: 7780 - DNA, 3067 bp, DROSOPHILA
gcttgaagagggcgccgatgatagcggattagcgtgtcgcaggaaggcaccatttccctgatcggcaaaatccgtatttccactagattccgcgggtcgcttccgcaccctttcgccattcccgcccaggcgtaccatcgtctcatgggcttcctcccagtcgccatttatagcggatccaaaggtttcgtcattgagggcatcgtattccgcctcgacgatgcgtccatcgccaccatcttcgtcctggagaaacaattgaagcaagtaaattagacattcctactttttctgcccccggtggccttcgatgcccccttatttgccgagtgaaaagtgtgcgttgggcatttgccgacccctgtgcggcccgctatcccggatattgcagccgcaatgtcgggaccgctgcttaccggtagattcgtgtcaaagccgaaaaacgagtcatccatggcgataaatctattgctttacaaaaaattatcatgacttgtcagtgacaagttgtcacctcagcagtatagctgtcaaaatatcgatggtactatcgatagtctgacgtcgatggttttctgactatcgccacaatacatcaatttcgctcgcatataaatattatcatattacaaatgttggaattaacatgcaaatttaaaatatatatttttttcatacgttttttttcaataggtgaacgactgaagatttgtctaaatttataagtttgcattttgctacagtgatgttagaaaaaaatgatgatttaaccactgccaaatttcgtatgttgcatatttatttattcagtttgggacttaccacgactggttaataagtcaacaacattagattttactgatcaatgaaaaatctgccctaattaaggtgcatttgcactccttcaatgtattcgatattttgaactagttcgaaacttgaaatcagcgcccgcaagctcatccctaaattactagttcttgaactattgctttggacggaactacgagcctgtttccttttccaaaacaacttagtcgaaatgaagcggaaaacgagcgagatctggtgctttttccgggcggtggacgacacgtttgcggtgtgtaatatctgcaaggcgaagctctcttacaagacgaccaccacgaatctaagcaagcacatgaacaggatgcaccccacatcgggactcaaccggaactccaagtacaaattccagccgcagaccaccatcgccatcgaccggaacaaagccaagccgcgcaactcaacgcaagagctgatattgttagaattcgtgaagaaacatccgcgtctgcttcagaatccgacgtgggaaacacggggcaatctggagtcgctgtgggaggaactgtcatccgaacttaatagccacggtccgccgcgaaaagatatagccacctggagaagggtattctaacttactttttttctaaccgcttgcattataagttgatttgtttgtaggccttaaaggactggaagaggtttatcctgagaaaggtggaaaagaatgagatgcagaacatgccttttggcaccagtcttacttcgtcggaggaaacaatagccacactgtgtagattaaacgaggatgtaagtcagattattatgaaggtctccgacgatgaaatgcatgagaattccaccacggaatttgatgtggacgaagtagaggatgtggtcccggaagaagatggtggcgcccttcagacttccgccgagtacgtttacgaaccggaggagaacaaaacggacattgacccgctttacctgcaatctaacaaacgggccgcattggccagcagtcgactggcggaggaggagaccacactgcttgacaagattagcaataacctagaaatggtgcacgataccgccaacagcgttcaacttgcactcaatgaattttttgtcctgtacaagcagaagctgtacgaggacaagcgacatcacttggcaattgaacagttaatggctgagaaaatagaactgaaaaagaaactattggaaatcgagcaaaaaaagctgtcgctcaaataacgggatatgcacaaaattaagtaatatcttggtagtcttaataacctaatctttaaataatctaagttattcaatattttgattaattttatcacatttcttttagcttggcccaagcccacttaatatacaaatttaatttaatttttttggttttattttataaatatttagataatatggcgttgttcatcatagacttgctttagaatctctttaaattccaggggataagatgcgtcgtccataacagcatcgtaaacatactctaaattctgtgggaaagatggttgaataaaaaaacaaagcaaagtattaggcacatcacttactgatttggattcatctgaggaggaagtcttgccctcttcgggatcactcaacccatttaagtctccacaggctataaaaggaactagacgacggtttacttccgaccctgttttctgtgccagtagccgtatatcatcgcgagcagggttaatcacttgaggaatgtagccctcgggaaggcaaaaatcggagcaaaccacaaaagcttcaatgctcgaaggacgcgaactcggtggcttgtagatgtcgaattttttgaaaaatatctgcatctgggagctcaatagcgatgtggcatttcccttaaaaatcttggccacaaaagttccgccagtttccagcacacaggtggcaatgctgagagcagccacaagtaactggtgctgcatgtactcgtccatttcatggaccccggtgacatcgggggctccatcgcagaccaccagctgggctttttcatttccaccaaagtgaccgatgattgcttcggcggtcgactgctttgtgatatctccctggagctggagtattccacggatcggggccatggcctgcagatcaacggctatgatcttaacagcggacttttcatcgtccgtttcgcaggtatcgtagagtttccgagagagcacctgggaccagctgccaggagcagcacacagatcga

SEQ ID NO: 7781 - DNA, 1011 bp, DROSOPHILA
gaactacgagcctgtttccttttccaaaacaacttagtcgaaatgaagcggaaaacgagcgagatctggtgctttttccgggcggtggacgacacgtttgcggtgtgtaatatctgcaaggcgaagctctcttacaagacgaccaccacgaatctaagcaagcacatgaacaggatgcaccccacatcgggactcaaccggaactccaagtacaaattccagccgcagaccaccatcgccatcgaccggaacaaagccaagccgcgcaactcaacgcaagagctgatattgttagaattcgtgaagaaacatccgcgtctgcttcagaatccgacgtgggaaacacggggcaatctggagtcgctgtgggaggaactgtcatccgaacttaatagccacggtccgccgcgaaaagatatagccacctggagaagggccttaaaggactggaagaggtttatcctgagaaaggtggaaaagaatgagatgcagaacatgccttttggcaccagtcttacttcgtcggaggaaacaatagccacactgtgtagattaaacgaggatgtaagtcagattattatgaaggtctccgacgatgaaatgcatgagaattccaccacggaatttgatgtggacgaagtagaggatgtggtcccggaagaagatggtggcgcccttcagacttccgccgagtacgtttacgaaccggaggagaacaaaacggacattgacccgctttacctgcaatctaacaaacgggccgcattggccagcagtcgactggcggaggaggagaccacactgcttgacaagattagcaataacctagaaatggtgcacgataccgccaacagcgttcaacttgcactcaatgaattttttgtcctgtacaagcagaagctgtacgaggacaagcgacatcacttggcaattgaacagttaatggctgagaaaatagaactgaaaaagaaactattggaaatcgagcaaaaaaagctgtcgctcaaataa

SEQ ID NO: 7782 - protein, 322 aa, DROSOPHILA
MKRKTSEIWCFFRAVDDTFAVCNICKAKLSYKTTTTNLSKHMNRMHPTSGLNRNSKYKFQPQTTIAIDRNKAKPRNSTQELILLEFVKKHPRLLQNPTWETRGNLESLWEELSSELNSHGPPRKDIATWRRALKDWKRFILRKVEKNEMQNMPFGTSLTSSEETIATLCRLNEDVSQIIMKVSDDEMHENSTTEFDVDEVEDVVPEEDGGALQTSAEYVYEPEENKTDIDPLYLQSNKRAALASSRLAEEETTLLDKISNNLEMVHDTANSVQLALNEFFVLYKQKLYEDKRHHLAIEQLMAEKIELKKKLLEIEQKKLSLK

SEQ ID NO: 7783 - DNA, 2563 bp, DROSOPHILA
cctccgactggaagggtctgaagatcaccgtctgcctgaccatccagaaccgacaggccgccatctccgtggttccctccgccgcctcgctgatcatcaaggctctgaaggaacccccacgtgaccgcaagaagcagaagaacagtgagtattgcccggcaatcctggactggacttccaatgcctgtgccgggctgtggtggataatgaggagctttgcttccaccgcactgtgcccacatgcactggatggttctgtgcttgatcccccgattaacagcagatattcttaatttacagtcaagcacagtggaaacattggcttcgaagacattctggccatcgcccgcgtgatgaggcccaggtccatggcccgtgagttgaagggaacctgcaaggaagttctgggaaccgcccagagcgtcggctgcaccgttgacggaaagcaccctcacgatgttattgacgaactgaacgagggctccattgaagtccccgcggaataaacagttttttaaacagaattaataaattgtacgcgatacagtctgtaataattgacccaatcggacagaattttactttcgagctcaatgcggccgtgaatgcgatttcagataggctagctaaatgttaaacaagaggaaaactagaagtgcataatattgcatcaattcagcagagtagatttgccaattaagcaacgcaataggaaaatctttcttagttcggtttaacagttgaattcctattaggcagaaaacaatgtgcagaactcttgcattgttaaaacaattatatatttggaaggtctttccattaaatgagaagtaaacaattcgcacatgccccgcaaaaagcacatgcttgataagaaagtgttcagttttcgttactggagaatgctttcggtcacattttccgcctgggtttcctgcgttgcatttacgaatgcatgtatgccacccctttcccaagatacaaataaaaagagagtatatttaatccgcaaattgtagacgaatttattatttcatattctcgaaaagatcttcagcattccacaaaattgcggaactcctggaatcaacagcttacagcttcaacttggtacgcctccagtgacggcgcttagcgttgtaactgaaagaaaaagcggaaagttgaagttaatattagaataagattatgttgcaccaatgatctttatgttattaagaatattaaaaataaggtagtgacagtacactcaacaattaaacgcacttgcgttgggatactttgcccttacaaaacttttgccactgcaatactaaacatttaaatggaaaaccaacaccgaacttaccgaatagtgttgccagtacgtaggcgaacccattggggaacggatctgttctgcttcagcttcttagccagcttctgctttattctgaacgacttgtgtgcagcctggtggagaaagaagtaacgaacgtttagtatctcgatatattcaaaacatttgatcaaaaacacaaataagaaaaatttcccaccatttcgtccaatcttttcaacgagccacaccggaaagaaagaaccagaccggaaaagaatacgcgctggtggtgggtttatatcgataagttcacttatcacaatttcatgcaatacggaatgatgaaatagaacgaaaaatatttgaggcattacaaaaaattataatataatatttaagactttttttttatagcaagggtggttcttataaaattacataaaaactaagtttgtttcgttcaattactactggtttcttgagttaaatatgtttccgaaagaaccagtatcagctatttagcgtaagtgagcgacgaaatcaaattatattttgcaattagaattcagctatcttgttttatatattttttttatatacaatttatataaagttgttatgttatcggtatattttttacttaagttacaatcttaatgtatattgcaaatacatcaccaaaatataatcaatgtaaacataaagctcgccatgattcaatatgaaagtgtaattatggtaagtctgttttaattcgatcacgttgttttcttattcgtatcggaaatacattttaaaaattaagatccctagttaaataactttataaaaatattttttctttgacattccgataggcctctatcgataacagtttcaattgtcgtgtgtatctgcccctaacgtttttgttctaaaaccattatttcatttcttctatacatcgttccattttcccataagtgtcagtgtcatcatttatcaattatcatttgattattatattttacaatataatatgtgtttaagaaaagccaaaaacgcttcctgctgaggacgaggcacaaacagagcgcagttttgtcaccgaacttccgtgcattacgtgcgaatcgaaacgcaatgtcaacccatacataatattttgctttgtaaacggtttttgagttgaaatacatacacacagtggtgttaaatataaacacgtacagaagactcatttgcatctatattgcacgcatc

SEQ ID NO: 7784 - DNA, 272 bp, DROSOPHILA
ctcgttgaaaagattggacgaaatggctgcacacaagtcgttcagaataaagcagaagctggctaagaagctgaagcagaacagatccgttccccaatgggttcgcctacgtactggcaacactattcgttacaacgctaagcgccgtcactggaggcgtaccaagttgaagctgtaagctgttgattccaggagttccgcaattttgtggaatgctgaagatcttttcgagaatatgaaataataaattcgtctacaatttgcggattaaa

SEQ ID NO: 7785 - protein, 51 aa, DROSOPHILA
MAAHKSFRIKQKLAKKLKQNRSVPQWVRLRTGNTIRYNAKRRHWRRTKLKL

SEQ ID NO: 7786 - DNA, 4808 bp, DROSOPHILA
ctgttgcttttgtttttctgtttttgcgcgttttttttttttgtcacttgccaatttgcagtgaaagtgaaatgcgctgagcgcaggcggttggaaaagcgggcggggttatgcggggtcacgagggggtgatgagcggtgtgggaatggtgggcggcagatggaaagagggcaacggccagcctaaacgggaaaaaaattgagttgaatgcacacgtgcgatttacctgtaatcgcccaattcggttgcaagttcgctgccactgatcaaaccgatttgcccaatgcgttttattctaaactgtaattgccttttgatgcttaatttataagcttaaaaattgcgacatatgtacatatgtatataatctataaatcgatcaaaaaacgttcatacattgcttttaatctatccgcgttttttgttttggattttctttgtttttattagtgtttttcgccctcttccccctttttctttacctctttccgctatttccagctcccctattcgttgtggttgtttttgttggcaaccggccggcggaagaagacttgcaacattttttctaagcttttcgcttttttccaattcatttcgctcgacggtcgcgcgacgttgccgtttttcagtgcgaaataaatcgagcagcagggcacacaaaagccgtaacgtcgcaacatgttcgaagcgaactgaaaagtgacaacgtcgcgcacgcttgacggcataggagagcaacaaaaaaaaagaagaaaacaacagcaagcaaatgctggaacagtgatattttttttttttttttttgctaacaaacatacgtaaataacaaaagagtcacaagccgatggagtggacataaaaaacaggctcgcacacgttgcacttgcatgacacgccgcatcatacagcaaacaagcgaaatgaacaatcatcataccgaaaattgtataatacccattgcgactttgtcattctctatcattcaacgtcagaccgtcgaatcgagcgtgaaaacgtgcaataaaaccaaagttaacaaaaacaaaaaaaaaaaaaccagactacttaatgtcccagatgggcggcacatgcttgtacgatgagcccgaaatcatggaggagttcatcagctgttatcagtatttcaccgccctgtgggacagcagcagtcccgattatctatcgaaacagaaaaaggagcccggctatcaggagctattgaagatactgcgacgcgttaatagcaactgttcgattcaggatgttaagcgaaagataaactcgctgcgttgctgctatcgtcgtgaattcaaaaaggtacaggaatcggtcaatggctaccagacgcgtctctggtggtttcatctgatggatttcctcaagccggtactcaacatacaatcgccggccagggtgaaatccgagaacgtggacgatagtctcgacgagaccagcattcaggtgagttacgaccgcaatgcgtgagtgtttacatagtccttggacttctttattggataaatttcaaatttaagtaattttcatataaataggtagataaatatatttgtatatacataggcaatataggtaacataggaaatatatttattattattattatttgtattatttgttggttttcataaagtatgcatgcatgcatatgcatgtaggatatgaaatgatcatatgttaagtctggcagttctgtaaaattaagcgtatgtatatgtatagaatctggttgaatcgcgtttgacgtggtttgacggcgtttgacggcgttcgcaggacaaatgaaacgccggtcgtacgaccaatttacgatgcaagcttcagtcgcgcgacggacgttagacagacatgtcgcacacgcacacggcgatcgatttttggaagaaattcctcgggttgtaccgttcgatgcccgaattgtggctggtgcgcagtaaactgtatcgcgatcgccagctgaagctcgaatcctatagccgattattagagctgctacgcacgaccgatagctatgccaatatccatacgctcaaacgtaagatcaacaattttcggacctcgtatcgccgggaattgcgaaaggtgctggatagtgggaacacatataagccaacgctttggtatttcaaagaactagactttctctatgaactggaaaccggtgaactgcaattggagggcatagtggccgccgatcgggatttggttcgaaattcgaaagtcctgcagaatgagtcaaataaaacgataacattcggagcgcaattggcggaacaggaggtatcaatgagctttattgtgaagcgagaaattgaagttgatgagaatataaccgaggatatgcagcaattggagaccgaagtaagtgatctatgaaggaattttatggaacttcattatgtagggcatatatgtatatatgtaggtaccagagatcggcaccggtgcctgatttgagcactacaagtatattcgcataaaaagcggtggcggtttaagtaacaaccgcatcaaatgcgtttgcggtgttttaccaccgcattgtctgtgtgtggaacacagacaatacacaaaaatatgcgacggaataggacacactcaaaaatgtattctgtgtcttttacgcgcggaagtcgcacaccgcgtagcagaatacacatgcctaaaatcgaccaaggccaatgtcacacacttagaagaatgacaatgtgcaagaacaaaaaaaaaaaaaacattaagtttacagttgcttttgcatatttcctttttgtagccttttttaagcccggtgcattggttttgcaatatttctattcactgactttattacttgtgagagtcttcagtcgttgcgaatgtagcagaatgtcggaccacgcatttatcgccgagcagattgcaagtggcctttactccttggagcccaagctcaagggaaagagtttcgtctggaatgttttaagcgggattattaaggatgatggatcaattttaaacgacttggtttactgccgctcatgtcgaaaaattcctaaaatgtgttggcaatcaaacttcaaatttagccaggcacaaatgttgtcaatcttttcggcaaccaactgccctacggattgtgtctgctccagacaaaaaggaggcgttgaatgcagtttccaagtggattgcggaggactgccggccgttttcggctgcggtgtacttgtagttgcggtgaactaatgcagatctctagtacatatgtagatctgtgtattgtggatttagtattatccattatatacttatagtattagtatagtaatacagttaatcaaaaaaaagggatactgatatatttaatttaatttatctactttcaggatgttgacattatgtctgatgcctttccacacgaagaggatatgctacgtcttgatgccgtgggtgatggcgatgttgaaccggaacccgagcctgataacgatcccgaattggataacatggatgatcatgttgatgattatcgtaacaattcatcggctgggagcattaagaacaatggctatcagcagcacaccgtatcttcgcaccagcagcataacggtgaatcgcagacttcggataaatccggacgtcgcatccgtaaccgacgaagacgcagtagcaatgacaccgattacgttgaagcggcgagaaagcgtagaaatgtggagacttcgaatagagatagagactggcatagagagcgggatagggagcgagacagaaagcatgaaagcgacagcgagtacgagtgcgagctgatcggaaaacggatggccagccacttccggcgtatgcgtccggatcagcgacttttcgccgaacggatcattagcgaggtgttggtctacggccgaatgaatcgcctttcgttcgagacccaatttagtatgggtcataaataagtgaaactaaactaaaactcatttcgcatatgaaaatgcgattgaaaacgtatgaacgacaatttaattatttcaaattctatctttaacgatcatttcatttggcattacggtttaaaaaaaaagcataatattgaacgacaaaatgcactatgtccgttatagcaataattaatattgcataagaaacaaaaatgtaattaagttaagctgaaaactcgacaatatttttaagttttcgtagtttaagtggaaaaatagatagaaccgaaatgaatgatatttttagccgcctgcaacgctaagcaaaaaaaaaaccaaaaaaaaaaatgcagaaatggcaaatgtaaagcgaaaacggctaaaagcgaaaatgcgatgcaaaagggaaggagaagaaaagggcaaaaacaaaaaggatgaaagcaaataaaggaactggttgttattcatttaaaatttgactaagtggttctgcatgcggatcccttcccctcttcatccccgccccctttccccgacaagcagccagcacatcttgttttgtcagcctgccttcttctttcttctacttcttcatctcctccgccttcttcccgttttgctaattttctgctgctgtgctgcgattcttttatttcaggtttctttgccttgccgctgtgttctcttttccttctttactccttttcttttctacacactcccaatcttttcctttgccgtttcctttgctttagtaactttaatttgttggcattgccattgccgttatactggcgttcgtctctttctcgaaatctatcgcgccctctcgcactgtcttgccctttcactcattgctctattatcgttac

SEQ ID NO: 7787 - DNA, 889 bp, DROSOPHILA
tcgaatcgagcgtgaaaacgtgcaataaaaccaaagttaacaaaaacaaaaaaaaaaaaaccagactacttaatgtcccagatgggcggcacatgcttgtacgatgagcccgaaatcatggaggagttcatcagctgttatcagtatttcaccgccctgtgggacagcagcagtcccgattatctatcgaaacagaaaaaggagcccggctatcaggagctattgaagatactgcgacgcgttaatagcaactgttcgattcaggatgttaagcgaaagataaactcgctgcgttgctgctatcgtcgtgaattcaaaaaggtacaggaatcggtcaatggctaccagacgcgtctctggtggtttcatctgatggatttcctcaagccggtactcaacatacaatcgccggccagggtgaaatccgagaacgtggacgatagtctcgacgagaccagcattcaggatgttgacattatgtctgatgcctttccacacgaagaggatatgctacgtcttgatgccgtgggtgatggcgatgttgaaccggaacccgagcctgataacgatcccgaattggataacatggatgatcatgttgatgattatcgtaacaattcatcggctgggagcattaagaacaatggctatcagcagcacaccgtatcttcgcaccagcagcataacggtgaatcgcagacttcggataaatccggacgtcgcatccgtaaccgacgaagacgcagtagcaatgacaccgattacgttgaagcggcgagaaagcgtagaaatgtggagacttcgaatagagatagagactggcatagagagcgggatagggagcgagacagaaagcatgaaagcgacagcgagtacgagtgcgagctga

SEQ ID NO: 7788 - protein, 257 aa, DROSOPHILA
MEEFISCYQYFTALWDSSSPDYLSKQKKEPGYQELLKILRRVNSNCSIQDVKRKINSLRCCYRREFKKVQESVNGYQTRLWWFHLMDFLKPVLNIQSPARVKSENVDDSLDETSIQDVDIMSDAFPHEEDMLRLDAVGDGDVEPEPEPDNDPELDNMDDHVDDYRNNSSAGSIKNNGYQQHTVSSHQQHNGESQTSDKSGRRIRNRRRRSSNDTDYVEAARKRRNVETSNRDRDWHRERDRERDRKHESDSEYECEL

SEQ ID NO: 7789 - DNA, 5373 bp, DROSOPHILA
aggcaagatgttaatatccaactttttttcagcgttaacaaaagtttagcctctaattccttgaacaactttaactttagaacactcaattaaccttaaacttttccttaaaatgaactaatcaattaacatggtttacactagccaacaaaaacccaagaaaacaatatacaaacacacacacacactttgaaacggtgtaaaactttaagtgcatttttgggccgagttagtcgaggatgctaaacataatgattattcataactgactgacacaagccgtaaaattagtttaacaacattgttaaatacacacgcagccatatatgatgtacctataccaattgaacgatatatattgtatttaattaaataccaattgcagttgttgaatttcaattatgcaaaagacacaataacgactatgaataagcaagagaaagcaagcccgaatgcaaatggttatagaaaaaattatcaatctcggctgaggagccgaaagttaatcaaaacgattaggaaaattttatgacaagtatttcgattcgaaaacggcaagataccaggatactaccaaatgcaattgttacgtagacaaaatgacgataacggcttcagtttatataaccataaattaaatattaattaatgttctcttcaattttgttacccaattttgttgtgatgcttttcctgttattaagacacgtttgtacgccatttatgttattgtttaaaatcaaacacaatctaattaattggtaatacaaaaaaaaaagtagtaagaatatttttattacaaattgttgaagagttttaagttttgaaataaaaagaaaatatttaaaatcgcacttgactttgtatttgggagggttaaacatttctatcaatcggagagaacaactgataagccgagatgatcgtcacactcgccttatcatctgaaatggaaaaatctttccagccagagatcagtcatctattgaaaaccgcgtggagtggacgtgccttagtttattggattaaaccttaccatgcagcgatttttgggaaggagcagccaaagccttttgctaagatgtggtcatcgctatctggccaccactcctgtggaggaggtcatatttcccaccaaatcggattttcccagtcgtcatattgggcctcgaaagacggatgtggtggccatgttggatactttgggcttcaaggtaggaaggtcaccaaaaagcttagtttagatcatatttcatagcagagcggttgaacaaaccattttggaatccgaaatttccagatttggatcaagccaagtttaatttttaccaccattatcattttagtccctggcggagctcacagagaaagctgtgccccagagcattcaactgaagagggaactcgacctggacaaacctctgagtaagtagcgctacgtttgaatcctaaaatagctgaaaaacaaggcagtaaggcaatggaccccctggcgtgttcgcagccgctgataaccggggtgataagcccggttcagcgaggtctctcccagttatcagtgttttgactgccgcttgatcttcgatttttcgtctgcgtctggctgacaacaattttccattctgcagatgagcacgagctaatccgccgaattcgcgacatctcgctaaagaatcaactgtggcgctcctacatcggaatgggttaccacaactgccatgtgccgcacaccattatccggaatatgttcgagaatccgggttggaccactcagtacaccccgtaccagccggaaatcgcccagggacgcttggagtcgctgctgaactatcagaccctggtaaccgatctcaccggcttggatgtggccaatgcctcgctattggacgagggaaccgctgctgccgaggccatgtgcctggccaccaggcacaacaagcgcaaaaagctctacctgtcgaacagggtgcatccccagacgctgtccgtagtcaagacgcgaacggaagccttggagctggaaatcgtggtgggacctattgaacaggcggatctgccaagccgcgaattggctggcattcttctccagtatccagatacttatggtgatgtcaaggacttcgaggatatcgcagctttggcaaagaaaaatggggtaagttgaaatatttatttatacataagaatatacaacaaaaaaatcagaaaacttgaacttgaacttgactatagcgttctcttctgtttttattaagaccctcgtggtggtggcgaccgatttgttgtcgttaacccttctgcgtcctccggcggaatttggagctgatattgcagtgggaacctcccagcgattgggagttcctctgggatacggtggcccccatgccggattttttgcctgcaagcagagcttggtgcggctaatgccgggaaggatgattggcgtgaccagggatatggacggaaacgatgcctatcgtctggccctgcaaaccagggagcagcatatccggcgggataaggcaacaagtaacatttgcacggcacaggctcttctggccaacatgtcggccatgtacgccatctaccacggtccggagggtctgaaagccatggccaatcgcatccaccatttcacgttgacccttcaaacgggtgtcctgggagcgggtcacgaagtgatcaacaagaacttcttcgacacacttcacattagactgggtggaggtcaatcccttgaggatctcaaagagcgtgccgagcacaagcgcattaatctccgatatcttgaagatgacactgttggcgtggcccttgatgaaacggtcagtgtagccgatgtggacgatctgttgtgggtcttcaaggcagaggcatctgtggaacacattctggcgcgtaaagatgtccttaagaactcgattgagaactccaagttcctgcgcacttcgccctatctgcagcaccctattttccagagctatcacaggtaaatgattaataaactctagaaatcattcaactttaatgcgcttccttcgccacagcgagtcccgcatggtgcgctacatgaaaaagctggagaataaggacatctccctggtgcactccatgatccccctgggatcctgcactatgaagctgaactccaccaccgagatgatgccttgttccttccgccacttcaccgatatccatccttttgcgccggtggaacaagcccagggattccatcagatgttcaaggaactggagcatgacctatgcgagattacaggatacgatcgtatctccttccagccgaactcgggggcccaaggagaatatgccggactgagagccatcaggagctaccatgaacaccgaaatgaaggacacagaaatatttgtctgattccaatttctgcccacggcacaaatccagcttctgcacaaatggcgggtatgaaggtggagcctattagaattttgtcgaatggttccatcgacatggcacacctaagagctaaggcagaggagcacgcccacgagttgtcctgcctaatgattacctatccatcgacaatgggcgtgttcgaggaaacggttgccgatatttgcaccctgatccacaagcatggcggacaggtgtacctggatggagccaacatgaatgcccaggttgggctgtgtcgacctggagattatggcagcgatgtttcgcatctcaacctgcacaagaccttctgcattccgcatggtggtggtggtcctggaatgggtcccatcggcgtgaaagcccatttggcaccataccttcctggtcatcctgttgtcagtccgttgagcagcgaggagcacagttttggagtcgtatccgccgctcccttcggaagctctgccattttgcccatatcctggtcgtacattaaactcatgggcagcaggggtttgaagagagctacccaggtggccattctcaatgcaaactacatgtccaagaggctggagcagcattacaagactctctacaaggcacccaactctcagctggttgcgcatgagttcattttggatatacgcgacctgaagaaatcggccaatatcgaggcagtggatgtggccaagcgactcatggattacggcttccatgcaccaactatgtcttggcccgtcgctggaaccctgatgatcgagcccactgaatcggaggataaggaggagttggataggttctgtgatgccatgatttccattcgagaggagattgccgagatcgaggcgggtcgcatggacaaggcagtcaatccactgaagatgtctcctcacacccaagctcaggtgatctcggataagtgggatcgaccatatacacgggagcaggctgccttccccgccgtaagtccattgcattattgaataattattctatttaactgtatttcaatttttattacagatctttgtaaaaccagatgccaagatctggcccactgtgggcaggatcgatgatgcctatggtgacaagcaccttgtgtgtacctgtccgccaatactgcctgatttataaggcacttcagttctaagaccaaacaatcaatttatattacactactttttaaataaaccccttgaacgtatcttttatataagaaggttctttatttttcgttgataaattaattatctaaaaaaatcatatatggtacatttagcaatcaataaagcttcacatttatttaaaactaattaaaattaacttataaaatacctcaaagtaatgaagtaattgcgtgctaaatgcattgtgtttctaacgagctttttagatattagtaactttaaacatttgacttacgtgtactttgttttcttagctttagattcaatttttgagtcttttacatactttttgttgttggggagccccaggatgggtgccatccattaaaatctcccgtaattagagagggtgtttgttgtatgttaaatgtgttatggagtgtctggttagttatgtttttggtcggagaaatgtatgtggaaaatatgtttaatttaagtttagattctatatttatggctattgcttctatatcgattgttatgttgaggacagtgtgttgtattgacttatgcactagtagtgctacgcccccaaatctgttggtggcaatatttgttaatagtttgtagtttattggggttggaatgttattagtgtattgtatatgggtttcttggagggaaattatgtggggggagtattttttgattagaataaggagatggctgtagttgtttagatatccttttagattccattggattatagttagggacatttgtgagaaaattaaagcttataacttacttaaaggtagtgtaacggta

SEQ ID NO: 7790 - DNA, 2995 bp, DROSOPHILA
agtggacgtgccttagtttattggattaaaccttaccatgcagcgatttttgggaaggagcagccaaagccttttgctaagatgtggtcatcgctatctggccaccactcctgtggaggaggtcatatttcccaccaaatcggattttcccagtcgtcatattgggcctcgaaagacggatgtggtggccatgttggatactttgggcttcaagtccctggcggagctcacagagaaagctgtgccccagagcattcaactgaagagggaactcgacctggacaaacctctgaatgagcacgagctaatccgccgaattcgcgacatctcgctaaagaatcaactgtggcgctcctacatcggaatgggttaccacaactgccatgtgccgcacaccattatccggaatatgttcgagaatccgggttggaccactcagtacaccccgtaccagccggaaatcgcccagggacgcttggagtcgctgctgaactatcagaccctggtaaccgatctcaccggcttggatgtggccaatgcctcgctattggacgagggaaccgctgctgccgaggccatgtgcctggccaccaggcacaacaagcgcaaaaagctctacctgtcgaacagggtgcatccccagacgctgtccgtagtcaagacgcgaacggaagccttggagctggaaatcgtggtgggacctattgaacaggcggatctgccaagccgcgaattggctggcattcttctccagtatccagatacttatggtgatgtcaaggacttcgaggatatcgcagctttggcaaagaaaaatgggaccctcgtggtggtggcgaccgatttgttgtcgttaacccttctgcgtcctccggcggaatttggagctgatattgcagtgggaacctcccagcgattgggagttcctctgggatacggtggcccccatgccggattttttgcctgcaagcagagcttggtgcggctaatgccgggaaggatgattggcgtgaccagggatatggacggaaacgatgcctatcgtctggccctgcaaaccagggagcagcatatccggcgggataaggcaacaagtaacatttgcacggcacaggctcttctggccaacatgtcggccatgtacgccatctaccacggtccggagggtctgaaagccatggccaatcgcatccaccatttcacgttgacccttcaaacgggtgtcctgggagcgggtcacgaagtgatcaacaagaacttcttcgacacacttcacattagactgggtggaggtcaatcccttgaggatctcaaagagcgtgccgagcacaagcgcattaatctccgatatcttgaagatgacactgttggcgtggcccttgatgaaacggtcagtgtagccgatgtggacgatctgttgtgggtcttcaaggcagaggcatctgtggaacacattctggcgcgtaaagatgtccttaagaactcgattgagaactccaagttcctgcgcacttcgccctatctgcagcaccctattttccagagctatcacagcgagtcccgcatggtgcgctacatgaaaaagctggagaataaggacatctccctggtgcactccatgatccccctgggatcctgcactatgaagctgaactccaccaccgagatgatgccttgttccttccgccacttcaccgatatccatccttttgcgccggtggaacaagcccagggattccatcagatgttcaaggaactggagcatgacctatgcgagattacaggatacgatcgtatctccttccagccgaactcgggggcccaaggagaatatgccggactgagagccatcaggagctaccatgaacaccgaaatgaaggacacagaaatatttgtctgattccaatttctgcccacggcacaaatccagcttctgcacaaatggcgggtatgaaggtggagcctattagaattttgtcgaatggttccatcgacatggcacacctaagagctaaggcagaggagcacgcccacgagttgtcctgcctaatgattacctatccatcgacaatgggcgtgttcgaggaaacggttgccgatatttgcaccctgatccacaagcatggcggacaggtgtacctggatggagccaacatgaatgcccaggttgggctgtgtcgacctggagattatggcagcgatgtttcgcatctcaacctgcacaagaccttctgcattccgcatggtggtggtggtcctggaatgggtcccatcggcgtgaaagcccatttggcaccataccttcctggtcatcctgttgtcagtccgttgagcagcgaggagcacagttttggagtcgtatccgccgctcccttcggaagctctgccattttgcccatatcctggtcgtacattaaactcatgggcagcaggggtttgaagagagctacccaggtggccattctcaatgcaaactacatgtccaagaggctggagcagcattacaagactctctacaaggcacccaactctcagctggttgcgcatgagttcattttggatatacgcgacctgaagaaatcggccaatatcgaggcagtggatgtggccaagcgactcatggattacggcttccatgcaccaactatgtcttggcccgtcgctggaaccctgatgatcgagcccactgaatcggaggataaggaggagttggataggttctgtgatgccatgatttccattcgagaggagattgccgagatcgaggcgggtcgcatggacaaggcagtcaatccactgaagatgtctcctcacacccaagctcaggtgatctcggataagtgggatcgaccatatacacgggagcaggctgccttccccgccatctttgtaaaaccagatgccaagatctggcccactgtgggcaggatcgatgatgcctatggtgacaagcaccttgtgtgtacctgtccgccaatactgcctgatttataa

SEQ ID NO: 7791 - protein, 985 aa, DROSOPHILA
MQRFLGRSSQSLLLRCGHRYLATTPVEEVIFPTKSDFPSRHIGPRKTDVVAMLDTLGFKSLAELTEKAVPQSIQLKRELDLDKPLNEHELIRRIRDISLKNQLWRSYIGMGYHNCHVPHTIIRNMFENPGWTTQYTPYQPEIAQGRLESLLNYQTLVTDLTGLDVANASLLDEGTAAAEAMCLATRHNKRKKLYLSNRVHPQTLSVVKTRTEALELEIVVGPIEQADLPSRELAGILLQYPDTYGDVKDFEDIAALAKKNGTLVVVATDLLSLTLLRPPAEFGADIAVGTSQRLGVPLGYGGPHAGFFACKQSLVRLMPGRMIGVTRDMDGNDAYRLALQTREQHIRRDKATSNICTAQALLANMSAMYAIYHGPEGLKAMANRIHHFTLTLQTGVLGAGHEVINKNFFDTLHIRLGGGQSLEDLKERAEHKRINLRYLEDDTVGVALDETVSVADVDDLLWVFKAEASVEHILARKDVLKNSIENSKFLRTSPYLQHPIFQSYHSESRMVRYMKKLENKDISLVHSMIPLGSCTMKLNSTTEMMPCSFRHFTDIHPFAPVEQAQGFHQMFKELEHDLCEITGYDRISFQPNSGAQGEYAGLRAIRSYHEHRNEGHRNICLIPISAHGTNPASAQMAGMKVEPIRILSNGSIDMAHLRAKAEEHAHELSCLMITYPSTMGVFEETVADICTLIHKHGGQVYLDGANMNAQVGLCRPGDYGSDVSHLNLHKTFCIPHGGGGPGMGPIGVKAHLAPYLPGHPVVSPLSSEEHSFGVVSAAPFGSSAILPISWSYIKLMGSRGLKRATQVAILNANYMSKRLEQHYKTLYKAPNSQLVAHEFILDIRDLKKSANIEAVDVAKRLMDYGFHAPTMSWPVAGTLMIEPTESEDKEELDRFCDAMISIREEIAEIEAGRMDKAVNPLKMSPHTQAQVISDKWDRPYTREQAAFPAIFVKPDAKIWPTVGRIDDAYGDKHLVCTCPPILPDL

SEQ ID NO: 7792 - DNA, 4449 bp, DROSOPHILA
ctttgctccacaggatatttctagtatgaaaaatgtgatcactcgagtgaaaggaagtcagccagcacccatcctactagtcgcgaacaaattcgatttagattgccaaagagaggtatccaccgctgaaggtaggcatcatccatatccctccccagacgagactgctcttatttacgccactgttttcctcgtcctcacaggtaatgccttggcacaactgtgggactgtccatttatcgaggcatctgcaaaggatcggataaacgtaaacgaagtattcgccaccatcgttcgagagatgaatttgacgcaagagaatcggcaaaaaaaaaattactgttgttgtacgcttttatagaaattttgtaaaattgtaagattattatagttaaaaataaaattactaatatttaatagataacgaaaacttggcgaatttttatttttcatttccttgaaacaaagctgtggtgaaaaacccaagtccaactcttatcatctatgaaagctgttgaaagaattcaaacgatgactagcttgacatcacgaaaataagtaattcatgctaaattagaagaatatttgcaaaagtgactcatgggtaagcattgataaagagcgaacgcgaacagattcgcaagcgaatgacaccgatgagcatggatgtctttggctccacgtaaagctgaatctgctgggtcggtcacagatcgaactcaatgaagctcatgaatcgcgtgcattctggtccaaatgcacgccgcattctggttacttggttacttggcttgcactttacaatagtcggggtattcgggtttcggcatgagtcatcgctgctgaccacacctttcatccacctgaactctctcttcggcgttcgaaagtcatctgaatcagatatcttcttttcaatcagtgcgttcactgatcgtcggaagctttaaaacccagaaacaaggcgcccagtaataatgataaacacacaaattcgtttatgtaaagaaatactataaaatttgaaaaatatttaatttagaataatacaaaatataaaacttttaggtctaatacagatgtatacattgaattaattaattttataccattccaaatcgtcaggtttgtgggaagacggcggatttacaatggcctgtgcgtcattgaacaagttactgcaaagattatcctcaatctgaaagcgtaaagtgggcaaagtgaggtagtggcgtggaactcggttcgccaactcggcggtcggcaactgcgaatgcttacctggagggaagacactaagttatctgggcagtcgagcacgctaagcccagattctgcaaagatacacggtaagggaaggcgttaagttagtaaaggcgaggcatggagcgataaggagtgtggagtgttcggcctctatctcaagatcagtactatactatatagtgaaagcagagatgccatgggaattacgtgatcggccccccgcccactgcgcactcaatgttatctagcgatatcgctacgatatctgtgtgtctcgttgtcttacgctagtcggggtggtggaacgagacttacgcattctgggatcattccatgaagtcgttcgatcaatgtgatttataaagtaaagatctccggactcggtaactgcctgctcccaaccatccggcagtggacccaaattgttagcaatggtcgatgtggtagtttgttttgtagtttgcaaaacatctatcgaacaaaaacaatgaattacaaaccaaagtaaataaaaacaaattaaaatatgtcttcaacgtaatgctgcagtgtgtaagcggatgagaacggaggggcactggcgcccagcatgcagcacatatcaaaatcaattggagtatgctcaaagcaaatccaatcgagctcccacttccgaatgccaaaatgatcagactccaacccaatcccgaaaagtgcattggcgcgctcaaaatggacggaatggactccctgaaatcggttgtgtactgtgctgttcatgcgttagttggaatgagttagagcctatcttatccctgcctggtctctagcattaattagtcctctgatggctgatttaagtgggttaacaatgagacgcagccacaggcagttaacgacttgcttatctaaggcattacatctaagatagaacctaccattctgctttattcgctcggccatcaagatttgctgctgctggcgatattggattctgggatcctcccactgcgtagattttgtagtatgactgcaagtagagagaacaccattgttgagattgctgttttgggtattagttgagctagtaatgattaagagataaacttgaaagacatccaacgaagccaatgagatttctgtgactcacaagaatattttagttttcataagttcataaagaagacacgtattaaataaagcttcatgcatatcatttttaaaatctgcccaaactcacttcaagtagtagatctggccatcattggtcttggcttgctcccatcccggcggcaaggcgcctagttggcggttcaactgaatggggctgatgacgtcgtaggagcgctgcttcttgtgcactgtctgcatggacatgggaatgtcctgcgacatgcaggtgttcatggcgtccagatcaatggccgagctggccggggcgccgctggggaactcttgggcactgttctctgggaaagtgggcccagcgggctgctgttggctgctcggattggcattcggattgttggctgctgctgcgtcgctccgggcgcgcacattgtagttctgctgcagcgaggcggggctgctgcgggctcgggagtgatgtatcgccaggcggctgtgctggggagacggctgaatctggagctgggggatggcggcgatgggcgactggccatctggctgctggacgatggacgccttgttcccgatgttgatgctcgactgggagcccgcgtcgtaggtggagtcggcgctgttggcccgcgagtgcgagggcgccgggggcgtgaagaaggagttgggcagcttccgcatgcgcaggggcagctgcagcgggcgcttggcgtcacccggattcaggacgctgtcgaatagcgcctgcaggttgtcgtccgtgtcctggttgacccgcaccaccaggttgttggacttgatcggcgaaagcatgtcctcgtcgtcgatctccttctcgatcaggctgtttgtattgctgctggctgacatcgtcgttaacatataaaaggcacttattgtatacaaacgaaaactacatagaattatcttagcgattaggcacgcgcacatatatgttcttccatatacgtatcactccatcgcgctgcgcgaaactataacattaaggtgttaaaaactaaacttcgttgcaataaataatagtaataataataattacggaactgccaacataaaataaatttatcccagtgttgccagatggctatccccgtccacttgtccattccgatactagcgttcctcatgtaatcggcttcgtggctgcacctgcggaatgccaggggtattccgcaagccgattacgacttttgtcgatttcctttagctatagctaaagatttattctatattttgtaattaataaggcacaaaacaaagtagatattaaattatggtgtgtgtatagcccacacacttgtgttccataatatcagactataaattattagactaacaattattatttattggtttataacattttgtttagtgaaaataagtacaggcaaaggtctgtcaaaaacacacccaataacaatataaactgattgtaaatgtgccttgttgatttaagtaataagtgcaggtaaaggtctgtcaaaaacacatacccaataacaatataatctgaatgtaaatgtgcctttttgttttcagtgcacgttcattcaacccttttcaaaacgattggcagtggaacaagaagccgttccgtctcctgcccgaccggaatcgtcccctttccgtttgttccccgtagagatgagcgcgggccaggtctgtgagcacgagacaggtttttgacacagtcaaggtccatcgctagttcggtctacagcaaaaagtattttaacattgtatatattggcacgacacaattcggaggcatttttcgcttaacaataactaatgtcgcatgacacaaatgtaaaatgatcgccgtgctgttggacatattctggatccccatcgggggcttcctctcatttctcatatttatttccgccataaacaaatcaatcggcgtccgaaaagcgtacgtgaacctcctcctaaggatattcgaggtaaatattgcttgctttcgttcctcagatgagtaagcaccgatttgaggtgctccactgctgcggtggctttgcaaatggtgctgtcttacca

SEQ ID NO: 7793 - DNA, 1307 bp, DROSOPHILA
ttccgtaattattattattactattatttattgcaacgaagtttagtttttaacaccttaatgttatagtttcgcgcagcgcgatggagtgatacgtatatggaagaacatatatgtgcgcgtgcctaatcgctaagataattctatgtagttttcgtttgtatacaataagtgccttttatatgttaacgacgatgtcagccagcagcaatacaaacagcctgatcgagaaggagatcgacgacgaggacatgctttcgccgatcaagtccaacaacctggtggtgcgggtcaaccaggacacggacgacaacctgcaggcgctattcgacagcgtcctgaatccgggtgacgccaagcgcccgctgcagctgcccctgcgcatgcggaagctgcccaactccttcttcacgcccccggcgccctcgcactcgcgggccaacagcgccgactccacctacgacgcgggctcccagtcgagcatcaacatcgggaacaaggcgtccatcgtccagcagccagatggccagtcgcccatcgccgccatcccccagctccagattcagccgtctccccagcacagccgcctggcgatacatcactcccgagcccgcagcagccccgcctcgctgcagcagaactacaatgtgcgcgcccggagcgacgcagcagcagccaacaatccgaatgccaatccgagcagccaacagcagcccgctgggcccactttcccagagaacagtgcccaagagttccccagcggcgccccggccagctcggccattgatctggacgccatgaacacctgcatgtcgcaggacattcccatgtccatgcagacagtgcacaagaagcagcgctcctacgacgtcatcagccccattcagttgaaccgccaactaggcgccttgccgccgggatgggagcaagccaagaccaatgatggccagatctactacttgaatcatactacaaaatctacgcagtgggaggatcccagaatccaatatcgccagcagcagcaaatcttgatggccgagcgaataaagcagaatgaatctgggcttagcgtgctcgactgcccagataacttagtgtcttccctccagattgaggataatctttgcagtaacttgttcaatgacgcacaggccattgtaaatccgccgtcttcccacaaacctgacgatttggaatggtataaaattaattaattcaatgtatacatctgtattagacctaaaagttttatattttgtattattctaaattaaatatttttcaaattttatagtatttctttacat

SEQ ID NO: 7794 - protein, 343 aa, DROSOPHILA
MLTTMSASSNTNSLIEKEIDDEDMLSPIKSNNLVVRVNQDTDDNLQALFDSVLNPGDAKRPLQLPLRMRKLPNSFFTPPAPSHSRANSADSTYDAGSQSSINIGNKASIVQQPDGQSPIAAIPQLQIQPSPQHSRLAIHHSRARSSPASLQQNYNVRARSDAAAANNPNANPSSQQQPAGPTFPENSAQEFPSGAPASSAIDLDAMNTCMSQDIPMSMQTVHKKQRSYDVISPIQLNRQLGALPPGWEQAKTNDGQIYYLNHTTKSTQWEDPRIQYRQQQQILMAERIKQNESGLSVLDCPDNLVSSLQIEDNLCSNLFNDAQAIVNPPSSHKPDDLEWYKIN

SEQ ID NO: 7795 - DNA, 3691 bp, DROSOPHILA
catttcgaggtcgttttcgggaagatcgtgctcccagtccagaacgttatcgtataggattcccgatctacagctacgacctttgctatccattgaagacttgcaggcacgttgcagggatttttgacccactgtttccacggcagatgggctcacaaattgccgtctgcatttcttacactgttcgatgtaaatgttgccgtgcaattcggaaagatacttccgatccagtccggatttcaagtggagaccatcaatattctgtgagattacgtactgcacatagccactttcaatcagggctatgatagccatgtgggttttagttggtctggcttcatcgaaggaaacattgaagtccggcttctcgcccttctcctccagggtccaaacgcccttgggtccgcggaaatccggaattcctgcagacgtactgatcccagctcccgtgtggaggacaacgtgtcccgatttcttgatcaattcagccaattcctggcacttttcggccacaacctcatcgctgtcgaaactctctggtgctcccaaaattcccttgttgtcgtaggctgacaatccatccgcgtagttgcagctcatggtttgataaaagtttgatctacttcaaaagcgactattatgtctttttggtattaatttgtttatattttgtacggctaaatgagtccatcgagattttattgtttataatatgaccgtatccgtaacgctacaaaatactttaaaacgtgccaagtgaaattacactggtcattaaaaaaaagtataaggtgtaatataatttgcagcttggtaaaaactaaataaatctcaaatatcttagcttaccttgattaaatataaatgtaaagtattaactcaaaatatttgttattatatttaaaacatttattataaattattttattttctaccatgtggttcagtgtaccaagcaacatgcttggatttccaactcgcacggtcacactgtaaacaacggctgcggaaacaaagtgtgcttctaatttccaatcaaaacgccggcagaaaaacaaattttatccacggcaacgaaacaatagtttgtttgatcgttgcaacgcttgacttcacatttcctctccctcgggcgaaaaacagctgaaaccggaaacggatcagagtattagcatcaggcaggacacggatttagaggcgccatgaagatcgaggaagtcaagagcaccgtgcgcacccaacgcatcgcagcccacagccatgtgaagggattgggcctggacgaggttggagctgccgtgcacagtgcagccggactggtgggtcagaaggcggcacgcgaggcagccggcattgtggtggacctcatcaaatcgaaaaagatggccggacgagcgcttctgctggctgggccaccaggcacgggcaaaaccgccattgctctggccattgcccaggagctgggtaacaaagtgcccttctgtcccatggtcggatcggaggtattcagcaatgagatcaagaagaccgaggtgctaatggagaatttccggcgctccattggtctgcgcattcgtgagaccaaagaggtgtacgagggcgaggttacggaactcacgcccgtggaaaccgagaatcctatgggtggctatggcaagactatcagcaatgtcgtcatcggcttgaaaacagccaagggaaccaagcagctcaagctggatcccagcatctttgatgccttgcaaaaggaaaaggtggaggtgggcgatgtcatctacatagaggccaacagtggtgccgtaaagcgtcagggtcgcagtgacacctttgccactgagtttgatctcgaaaccgaggagtatgtgccgctgcccaagggcgatgtccacaagaagaaggaggttatccaggatgttactctgcacgatctggatgtggccaatgctcgtccacagggcggccaggatgtgctctccatgatgggccagcttatgaagccgaagaaaactgaaatcactggttagttgtgtaattttcttcccattcaaatttactaaaataccatttgatgagcagacaaactacgcatggagatcaacaaggtggtaaacaagtacattgaccagggcatagccgagctggttcccggagttctcttcatcgatgaaattcacatgcttgatttggagaccttcacctacctacacaagtccctggaatctcccattgcaccaattgtgatttttgccaccaatcgtggacgctgtgttattcggttagaaatacttagctcgtaaaacctattcgcattattaataagagttacctctttccagtggcaccaccgacatagtttcgccgcacggaattccgctagatctgctcgatcgtttgctgatcatccgcacactactctactccactgccgacatggagcagataatcaagttgcgcgcccagaccgagggactgcagctggaggagaacgcatttacacgtctcagcgagattggaaccagctccacgctgcgctacgccgtccagctgctgaccccggctcatcagatgtgcaaggtgaacggacgcaaccagatcagcaaggatgatatcgaggatgtgcactcgctcttccttgacgccaagcgctcctcgaagcatttgtccgaaaagaacaataagtttatgttgtaagtttgacgattcaagctgaattgtaattccatttgcacggatttcccagtaaaaatcaaataataagcaatttaatttattgtaatgatgtggtaatttgaaaacattcaaatgatcatttcaatggcgcttcaaacatcgacaagaaaagtgtgtacacacttcaactgaaagtaaatcggaaatttttggttggtgtcttagctagattagggcgaatcgtgaatttctttcaacggtttttttaattgatacgtagataagcatatttaaacgaactcggaggactaaccattttctttttataattcggttgtttgattgtaattattttgtctttcgttttccgcttaatcttccatatttgctgcttgtgatcgcagcgatatggcaacttccactcgcgccaccctcattttcccaccatgcgacatcagctgctcgcgttgtttggccaagaattccaattggtggtgagttcagttactcaacgagcgtcgagctgcgcactgccccaaaataaatagccagggagctccgctgaagtgcatgcagtgaatagtatatttaacgattcgattcgcggcgtgggcgtcttcttctttttcggcccgttcccctcgcgtcttgcatcttgcctctcgctcgctccaacaacgccggcaactgcacttggcgtgcgtgtgtgtgtgtaagtgtgagtgcgtttgtggttttccgaaagaatgtgaaatcataataaaagtcgcgatttgttgttgctattccgcgcaattagccactatttaacgcacatgtgtgtgtttcgagcttatttgtgtgtgaacaaagccaggcaacccgttttggcggaaataaatgcaatcctgatggcaggatcaaggtaaaatggaaacatttgggatctattgcatgaatgaaccaatgttgaagaagcagcacaagcagcagcagcaacaacaacacagcggcagctaggagagcgaaagagagcgaaggc

SEQ ID NO: 7796 - DNA, 1573 bp, DROSOPHILA
cggctgcggaaacaaagtgtgcttctaatttccaatcaaaacgccggcagaaaaacaaattttatccacggcaacgaaacaatagtttgtttgatcgttgcaacgcttgacttcacatttcctctccctcgggcgaaaaacagctgaaaccggaaacggatcagagtattagcatcaggcaggacacggatttagaggcgccatgaagatcgaggaagtcaagagcaccgtgcgcacccaacgcatcgcagcccacagccatgtgaagggattgggcctggacgaggttggagctgccgtgcacagtgcagccggactggtgggtcagaaggcggcacgcgaggcagccggcattgtggtggacctcatcaaatcgaaaaagatggccggacgagcgcttctgctggctgggccaccaggcacgggcaaaaccgccattgctctggccattgcccaggagctgggtaacaaagtgcccttctgtcccatggtcggatcggaggtattcagcaatgagatcaagaagaccgaggtgctaatggagaatttccggcgctccattggtctgcgcattcgtgagaccaaagaggtgtacgagggcgaggttacggaactcacgcccgtggaaaccgagaatcctatgggtggctatggcaagactatcagcaatgtcgtcatcggcttgaaaacagccaagggaaccaagcagctcaagctggatcccagcatctttgatgccttgcaaaaggaaaaggtggaggtgggcgatgtcatctacatagaggccaacagtggtgccgtaaagcgtcagggtcgcagtgacacctttgccactgagtttgatctcgaaaccgaggagtatgtgccgctgcccaagggcgatgtccacaagaagaaggaggttatccaggatgttactctgcacgatctggatgtggccaatgctcgtccacagggcggccaggatgtgctctccatgatgggccagcttatgaagccgaagaaaactgaaatcactgacaaactacgcatggagatcaacaaggtggtaaacaagtacattgaccagggcatagccgagctggttcccggagttctcttcatcgatgaaattcacatgcttgatttggagaccttcacctacctacacaagtccctggaatctcccattgcaccaattgtgatttttgccaccaatcgtggacgctgtgttattcgtggcaccaccgacatagtttcgccgcacggaattccgctagatctgctcgatcgtttgctgatcatccgcacactactctactccactgccgacatggagcagataatcaagttgcgcgcccagaccgagggactgcagctggaggagaacgcatttacacgtctcagcgagattggaaccagctccacgctgcgctacgccgtccagctgctgaccccggctcatcagatgtgcaaggtgaacggacgcaaccagatcagcaaggatgatatcgaggatgtgcactcgctcttccttgacgccaagcgctcctcgaagcatttgtccgaaaagaacaataagtttatgttgtaa

SEQ ID NO: 7797 - protein, 456 aa, DROSOPHILA
MKIEEVKSTVRTQRIAAHSHVKGLGLDEVGAAVHSAAGLVGQKAAREAAGIVVDLIKSKKMAGRALLLAGPPGTGKTAIALAIAQELGNKVPFCPMVGSEVFSNEIKKTEVLMENFRRSIGLRIRETKEVYEGEVTELTPVETENPMGGYGKTISNVVIGLKTAKGTKQLKLDPSIFDALQKEKVEVGDVIYIEANSGAVKRQGRSDTFATEFDLETEEYVPLPKGDVHKKKEVIQDVTLHDLDVANARPQGGQDVLSMMGQLMKPKKTEITDKLRMEINKVVNKYIDQGIAELVPGVLFIDEIHMLDLETFTYLHKSLESPIAPIVIFATNRGRCVIRGTTDIVSPHGIPLDLLDRLLIIRTLLYSTADMEQIIKLRAQTEGLQLEENAFTRLSEIGTSSTLRYAVQLLTPAHQMCKVNGRNQISKDDIEDVHSLFLDAKRSSKHLSEKNNKFML

SEQ ID NO: 7798 - DNA, 4246 bp, DROSOPHILA
aattcttactgatctgtgtcttctactcttccaatccaggtaatcgtatgatgggcatcgtgggcgtggcagctgtcactatagttgctctgatagcaggtcgtgttctatggtgaggtaagcgaaatcgaattgaaatctagctatctcccggcgacgggctaattgggtaatcatttttctatctcttccgcagacaatgtgtgccaaaacaagacgtaattgctactcaagtagtgtgattcccccctccgtgtttgtgcgtgtgttgtgaagtctgtagttgctaacgtttttcgttgagtgcggagattgcagtattagtttatcattatttggtagttgaagtgagagttgtatatactgaatttatatgggcatgcccgaaattgttattacgttttaatatttagcaaatacctataccaatcctagctcctcgcaaccaaatgaagacacaaatacaattgttaacaataatttacaaactcttttcttagcatttttaaataaacaagaacacaaactttatgttgcatggctcgcctttgaattaaacaactcaattcattactttgatatcaactctattgcaggcaaagttggttcaagtagagatgtgcggcgacaaacaacaaaaatttaattgtttttaatttgtatatttgctttgagttaaattcagttacgaaaacttacctacgacgaaagctaacatagacaactcatcgcttacgttatgtatagggccaaaataatggaacaacaaaatcggaaatagacattggcaaatggaaatgggcattggaaaggtttgacctcggatcgtaatcgtagtatcggagcacagaaatagagcaatagagttcaaggagataccaactaatcgtaatcgtacttcacacataatacacaatcacttgggcttggagcccaaacgcctagttggactgctgctgctgctgctggccttgctgctgctgcggcggctgtccctgactgaagtagggtgcggtgtttggcgtgagcagcgtgtgacagatatcacagactcgggccactcgcttccgtggtccagatggcaccgttttcgttagacacttatcgcagtagatgtggccgcagtgccggcaatggatcttgcgcaccatgaccgtgaagtaggcattgcacgtgggacagttgttcacatcgtcatcgtcctgccaacgcacctccgtgtcggcatgccgcagctcctccagcgacatctgtggcacaacacaatgtaattaattaagtgaataaaccatatatttttatatctcactcacctgaagcgtttgagatagtttgacaaagtccttttgaacagtctccatggtggagagttcctcctgtagtgtttttatcttcgtcttgtagtctgcatttgttttggcgtacttttcctgtaatgtgatctggttagcgaagaatcaagtgtgacaacaaaatatgatagcttacattggcctcttgcagctcaatgatctccacgcgacactcggagagctgcttgttcagctcagcctctttgcgctccagttgggttttggtagtctcgtacgcttgtaccgtgaccaagtgttccgtcacccgatccctgaaaattcatttaaaacgtgggccaaagtgaacaccaccatagacaagaggttgtaacttactgcagtgacttaatatctagttgcattttgcgcttgtaggcccgcctttcattgttgctctcctccagctgggcccgcaagatctgaatctcatcttcagtgctggtgcacttctgtcgctcgtattcgctgctgacgcgtgcttggattagctcgctttgctgtcgcagtatcagctcctggagctcgacgaccgtgttgggcagattgatatattggttgtcgatctcctcggacgtggccagatagcgaccggacagaaagtcgttgtccgcctgcaacgtctccagttgcttgttgacccgctctcggtcgtcggagacgcgctggatctgcttaataacctcgtccttggtctcgagaaacttttgctgcatgtccagcagtcgctgctcgttggttttggcctggtcacgcaggctttgtacttcgcttttgtgggcctcccgcttttcttgccactggtcctccagatccttgcgcaatgccgcctccttaaccagtgtctcccgggattccaccagctgcttttgcagcagatccacctgtttctgctgtttgtttatatgggcacccagctcttcggtcttcttttctgccaagctgcacgactcgcaggcgctctcggcgacgtccatggacgtggacttgtgcagggcggattcatcggacgccgacttggcctgcagttgctcgtcctgttcgcgcagcttcacttttagtgccttcatctcctcctgaagctgctcgacaattgagtgcatcatctccgcctcctcaggagcctgcaatataagctcagttaatttgatagttgaaagattagtcccgaaaacatacgtattgcttgccattgcccttgctcgatgcccgggtgtcctcgtcctgctgaaagctgctgttcagggagtcggtgcccagtttacgcacagagcctagtgtcttcttgacctgattgagcacctgcggcgctataccgccagatgactcggcctgcggttgttgagccatcgtctgctgttgaatctgctggtacttgcccagctccagcctgagccgttccacctcgcctttgtagtgcgcggtctcctcgatagtgtcctgcaccagctgctgcagcgaggagatctcctcctgcgccttgaggtccctcagctgcagctcgttctgcgacttaaggtccgccaccattaggtgtgtcttcagctcgtccagctccgcctgcagctgccgtcgctcctgctggctctggctgacctccgcctccttctggatgtacagctcccgcatcttcgcccgctgcgtgttgaactcgttctgcattttgcgcatctcgttctgcaggtgactgagtttgtgctggctggtcgcgtcatcctcacctgccgttggagttatgggttagttatcggctgttcaggcttcctgtggtgctgccttaccattgggcaggtccgtgggttccctggcctctgaccgggtctcgttttcttccattttctatattgtgtgatggccaatttattagtttatatgtacatatgtgagcgcaccaattagaacatatacatttgagcgattttcaacactgctcttggtgttaccatatttgaataataccgatagttaatactttagtattgcttggcagtgccgttaaaaaaggttttcaaaatctaactttattgagcttgataaacatcttttgggattaagttttctatagaagtatagaaagtttaaaatatttacttacagatacttggtaaaatagttttaataatttcccttcgccaatttgcaaatgtattcttattttatgtccttttaatgtgtcctttttaagaacccgttttattaagttaaaagtcggaatcctttaaaatcactcctttgtccttttatatcttagtctaaaatctaaatctagatattcctcgaattttttgttatcatcagccatcaggaactataaatagaaaaagaaaacaaatgggtaaggaatataaataaacaataccatataatttaaatttgtataatgtttataattgcatcttaatcgttcttaattatttaggattttcttaagcatttcctagaaagtgtttcaacatttgtgtgtaagccaaatgacaacggcagaatatattagacacaattctatgaaaaggtaaatgactgccgatcatgaatgactaataccgtcagttcttttaattttatgcaaattattaagcgccagaaacgcgagaaaacgctaagagctgataaattatgagaggaaaatgaatacttcaataatgcctagctaatgagaaaacatatttaaatataacaatatagcaaactatttgagataacaaaactacgcgttaaccagaacaaaactcgatttcagaatttcggcatcggctgaggaagccgaaaacttgactaattataaaattatcatggctgtacactaccagaaattggaaaacattttagtcgataggtaaaaaataattgtacgctgtaactaatgttaactttaaacatttgttaaccaccttata

SEQ ID NO: 7799 - DNA, 1944 bp, DROSOPHILA
aattggtgcgctcacatatgtacatataaactaataaattggccatcacacaatatagaaaatggaagaaaacgagacccggtcagaggccagggaacccacggacctgcccaatggtgaggatgacgcgaccagccagcacaaactcagtcacctgcagaacgagatgcgcaaaatgcagaacgagttcaacacgcagcgggcgaagatgcgggagctgtacatccagaaggaggcggaggtcagccagagccagcaggagcgacggcagctgcaggcggagctggacgagctgaagacacacctaatggtggcggaccttaagtcgcagaacgagctgcagctgagggacctcaaggcgcaggaggagatctcctcgctgcagcagctggtgcaggacactatcgaggagaccgcgcactacaaaggcgaggtggaacggctcaggctggagctgggcaagtaccagcagattcaacagcagacgatggctcaacaaccgcaggccgagtcatctggcggtatagcgccgcaggtgctcaatcaggtcaagaagacactaggctctgtgcgtaaactgggcaccgactccctgaacagcagctttcagcaggacgaggacacccgggcatcgagcaagggcaatggcaagcaatacgctcctgaggaggcggagatgatgcactcaattgtcgagcagcttcaggaggagatgaaggcactaaaagtgaagctgcgcgaacaggacgagcaactgcaggccaagtcggcgtccgatgaatccgccctgcacaagtccacgtccatggacgtcgccgagagcgcctgcgagtcgtgcagcttggcagaaaagaagaccgaagagctgggtgcccatataaacaaacagcagaaacaggtggatctgctgcaaaagcagctggtggaatcccgggagacactggttaaggaggcggcattgcgcaaggatctggaggaccagtggcaagaaaagcgggaggcccacaaaagcgaagtacaaagcctgcgtgaccaggccaaaaccaacgagcagcgactgctggacatgcagcaaaagtttctcgagaccaaggacgaggttattaagcagatccagcgcgtctccgacgaccgagagcgggtcaacaagcaactggagacgttgcaggcggacaacgactttctgtccggtcgctatctggccacgtccgaggagatcgacaaccaatatatcaatctgcccaacacggtcgtcgagctccaggagctgatactgcgacagcaaagcgagctaatccaagcacgcgtcagcagcgaatacgagcgacagaagtgcaccagcactgaagatgagattcagatcttgcgggcccagctggaggagagcaacaatgaaaggcgggcctacaagcgcaaaatgcaactagatattaagtcactgcaggatcgggtgacggaacacttggtcacggtacaagcgtacgagactaccaaaacccaactggagcgcaaagaggctgagctgaacaagcagctctccgagtgtcgcgtggagatcattgagctgcaagaggccaattacgccaaaacaaatgcagactacaagacgaagataaaaacactacaggaggaactctccaccatggagactgttcaaaaggactttgtcaaactatctcaaacgcttcaggtgaatgtcgctggaggagctgcggcatgccgacacggaggtgcgttggcaggacgatgacgatgtgaacaactgtcccacgtgcaatgcctacttcacggtcatggtgcgcaagatccattgccggcactgcggccacatctactgcgataagtgtctaacgaaaacggtgccatctggaccacggaagcgagtggcccgagtctgtgatatctgtcacacgctgctcacgccaaacaccgcaccctacttca

SEQ ID NO: 7800 - protein, 562 aa, DROSOPHILA
MEENETRSEAREPTDLPNGEDDATSQHKLSHLQNEMRKMQNEFNTQRAKMRELYIQKEAEVSQSQQERRQLQAELDELKTHLMVADLKSQNELQLRDLKAQEEISSLQQLVQDTIEETAHYKGEVERLRLELGKYQQIQQQTMAQQPQAESSGGIAPQVLNQVKKTLGSVRKLGTDSLNSSFQQDEDTRASSKGNGKQYAPEEAEMMHSIVEQLQEEMKALKVKLREQDEQLQAKSASDESALHKSTSMDVAESACESCSLAEKKTEELGAHINKQQKQVDLLQKQLVESRETLVKEAALRKDLEDQWQEKREAHKSEVQSLRDQAKTNEQRLLDMQQKFLETKDEVIKQIQRVSDDRERVNKQLETLQADNDFLSGRYLATSEEIDNQYINLPNTVVELQELILRQQSELIQARVSSEYERQKCTSTEDEIQILRAQLEESNNERRAYKRKMQLDIKSLQDRVTEHLVTVQAYETTKTQLERKEAELNKQLSECRVEIIELQEANYAKTNADYKTKIKTLQEELSTMETVQKDFVKLSQTLQVNVAGGAAACRHGGALAGR

SEQ ID NO: 7801 - DNA, 4333 bp, DROSOPHILA
gaggctttagaggaggcggctttcgaggctatggaggatatggcggatatggcggatatgcccgatatggcggctacgctggatacgcgggagttcttccggttcctcttcccgtaccctatcccgcaacctataatcgctgctactacgataattactattataattactactactgctgatatgatacggttatagatggtttatttatacaaattacaatcaacacgttgctttagttacaaagattatgtaaagttacccagaaattcgggctgtagacagttctctaaatattccatatctcatttaacttattgttttgatggtctccggtgtctggttcctgtttgtccacccagtgatcagcgatcagtgatcagcgatctttgtggagtgcgactgcgatggcagtgcttaagcctagtcaaaaatattcccattaaaatgcaatctacatatgcgcatatatatataaacttaatctacagactagatatggatacgagacgttgatgatgcgttcgttgtggcagactattcgatcgagatcgagagatcagagggtataagtgtatcaaaatagtttctgtatcgattaaagaaagttatgtgaggaagcatcgaatgaaagacttggtaacggagctatctcttaaagatatggagttgtcatttatactaacttaatcacaaaccagatgcccctctgatctcaccttgtgcaaaattgaattcaatatgcataagagctggggagactcaaaaaagatagtcaaggaatgccacctttatgcaattcagaactattttatatgacctaaaccaaaagcggcaatgctgagatacacaactaaagatccaaaagcttattatcaagtgttaagatgatggcattcccttctattgtttttccacccaacctggcgtattcatgcgcttctattgcttgcccccaaggacaacggacgatcgttctgttcgacaaggattatttcattcacttctccggcaatcccctagagcattgccttgcactcgctctcggcgatgctgtgctggatgcagtggttgatctcggcgaagccaggtcgctcactgggcttgcggttccagcagcgacgcatcagcgcgtagacggagagcggcgtgttgtccggacagccgagtacgttgccctccttgatgtatttgatcacctcctcgtgggttaacccaaagtagggctgcaaggcgaaggagaagacctcccacagacagatgccgtatgcccacacatccgactcaagcgagaacttgttgtacagtatgctctcaagtggcatccagcggatcgggatgaagtcgttctcatcgcctttgtaatagtcctgcaaatagatcttgtgcgagagcccaaagtcggcgatctttaccgccatgtgctcgttgatcaggcaattcctggtggccaaatcccggtggacgaattttctctccgaaagatacagcatgcccgctgcaatgttggccgccatctgcagcagatgtagctcgttcaactgcagacgatcctgtgtcggcgcctggtgtgtggcatatggggagcaggcgcgcaagaactcgcttagatcgccaggagccatgtactcgaagagcaggcacatgggtctgcccaaggcgcacacccccagcagcctcacgatattgggatgatcgaactcggccagcaaacaggcctcgcgctcgaaatccatctgcatctggtcgctggcgtcgtcctttagcatcttaacagcgactagtagatcttcctgatcgggaacaagtccaggagccctggcctggaagacgcgaccgaaggctccttgacccaatgatctcacatacactatatccccgcgtgggtactccaacttctccaggcgtgcattcggtttcgtgcccttcgcatcagacacattggtcaccgtagtaagggccacgcaattgctgtgtattgtggccgtgctcctgatggtgccccattttgccaaggtgttcgtgtttccattgcctccgagggtttctctactggtgttcagattgccgccacaatctcctcctccacgcatggaaacactgcattcggcagtggctgctcccgcaggctgagagtaatccttgtgcttggacaacttatagactagcaatatcatcaagtgcagggtcacaatggccacgaaacctattccagccaagagaaagatcatcgatggcgtgaagaacttctccatcttgatgggcgtgttcaaatcgacagcattggggtccacataatccgctaaaacagaagtgggtgaattacaaaaagtaaaagaggaaaaaattttatgatcttacgacacatgggtatatcgcagtgctgccagcgcactgattcatccacagtgtagcaccagggatgcggctcctcaccgccagcattccggcagtagttttcgccctccaggagctgatggaagaccagtggtggctggaagtgcttgtgcgggtactgagtgtcccagcgctggcagggaatgcccgacttggacacgttcattgtgcccatgtagaagcgtccgtttccattgcggcaatcgtctgtgaagaaaagggattctagcatcagaaagaccttcttgagggtttgtgataatgaagacttacagctcacttcggactccttgagttcggtgagaccgatgtaggagcagttgggtcgccgcatggaagcgttgtagtgcggcaaggaggagcagttgggtagccggaagtggccgcggctcttgatgaacatatttcgctccttcttctcctcgatgagcacccagtcgttgtagcagaactggagatgcgtggcctggcaatcctcgaagcagagaggagccttcaccgctcgaccgccctccatgtggcagttgggaaacgcataggcgcagagcattttctgtagcgaaaagagattaatgggatgagatgggatctctagatgtatcaatcgaaactcacctcggctgcttcgcgacacagacccgtaagatcggagataagctcgtcccagagcgccgtggtcacctgctcgttcttccacccgccagtgggatcctccagactgtaccacacctggccggtgaggtattccttgcacaccttgccgctgtacggggcgcagtagccgttctcctcccgctcgcgctcgtgatgccgctggtggtgtcgccgggtgacgggctcctcgatggcgttcagggagttcgcgtgcgtggcgctggcaaagagaaacacgcacagccccaggacagccaaattggccccccatttcagcaccattccccggagcacccgctcaaccacccccacccattgcccggcagccatggctgtgttttatgtatatgccttgtttagcgaaccgtttccaagcaaaatccttgcgagcactcataaactaaggcattttaccgccttacaccacaatattcaatctacccgaattttaaaatagattttaagaagtaagctcgaagtaagtcggcagaatatttgtttatttccgcgcacacagctcgacgacgccttttcaccgaataccacacaaagctgacgacgggatgtttcgccacccgtacttctcccttaggggtggtttcctgtcacgagcacagggttgctaaatgcgcggcaaaggcggccgaaagtcctgtgctcggcttgagagctccactggcgaaatgtttgtttttattgatattaatttttcttctgcttctcctcctccttcagctgtttctccctgagcttttcctccttcttcagctgtttctcccttagcttccgctctttctcccgcttcttcacgattgcgggatcatcgctgtcctcattggggtccttctcctccttcttcacctcttcatcgggaatttgttcaagaccctatagagaaagaagctttacacctgaggcagcaaaaaaaaatctgtaaggaactacaggaaaaaccaaaaacgaccatttcaactatcacttccgaactgcacgtttcgtttattcacttttgcacttaagcttaaacggaaaactttacttaattaaaattagttcgttttctcatccggtatggcatccagaccctgcaagaagattggttcggttttttgtaaatgatttaagcttataactcttcgaataagcgtaaaaaaatggatggtatgaattcgtaggaaataaagtaacattaactaccgccaccaatgatcaataaacaataaaaacgaaattaaccaagaaaactaagattttaaatgcaattaccttataatatagaaaa

SEQ ID NO: 7802 - DNA, 2146 bp, DROSOPHILA
atggtgctgaaatggggggccaatttggctgtcctggggctgtgcgtgtttctctttgccagcgccacgcacgcgaactccctgaacgccatcgaggagcccgtcacccggcgacaccaccagcggcatcacgagcgcgagcgggaggagaacggctactgcgccccgtacagcggcaaggtgtgcaaggaatacctcaccggccaggtgtggtacagtctggaggatcccactggcgggtggaagaacgagcaggtgaccacggcgctctgggacgagcttatctccgatcttacgggtctgtgtcgcgaagcagccgagaaaatgctctgcgcctatgcgtttcccaactgccacatggagggcggtcgagcggtgaaggctcctctctgcttcgaggattgccaggccacgcatctccagttctgctacaacgactgggtgctcatcgaggagaagaaggagcgaaatatgttcatcaagagccgcggccacttccggctacccaactgctcctccttgccgcactacaacgcttccatgcggcgacccaactgctcctacatcggtctcaccgaactcaaggagtccgaagtgagctacgattgccgcaatggaaacggacgcttctacatgggcacaatgaacgtgtccaagtcgggcattccctgccagcgctgggacactcagtacccgcacaagcacttccagccaccactggtcttccatcagctcctggagggcgaaaactactgccggaatgctggcggtgaggagccgcatccctggtgctacactgtggatgaatcagtgcgctggcagcactgcgatatacccatgtgtccggattatgtggaccccaatgctgtcgatttgaacacgcccatcaagatggagaagttcttcacgccatcgatgatctttctcttggctggaataggtttcgtggccattgtgaccctgcacttgatgatattgctagtctataagttgtccaagcacaaggattactctcagcctgcgggagcagccactgccgaatgcagtgtttccatgcgtggaggaggagattgtggcggcaatctgaacaccagtagagaaaccctcggaggcaatggaaacacgaacaccttggcaaaatggggcaccatcaggagcacggccacaatacacagcaattgcgtggcccttactacggtgaccaatgtgtctgatgcgaagggcacgaaaccgaatgcacgcctggagaagttggagtacccacgcggggatatagtgtatgtgagatcattgggtcaaggagccttcggtcgcgtcttccaggccagggctcctggacttgttcccgatcaggaagatctactagtcgctgttaagatgctaaaggacgacgccagcgaccagatgcagatggatttcgagcgcgaggcctgtttgctggccgagttcgatcatcccaatatcgtgaggctgctgggggtgtgcgccttgggcagacccatgtgcctgctcttcgagtacatggctcctggcgatctaagcgagttcttgcgcgcctgctccccatatgccacacaccaggcgccgacacaggatcgtctgcagttgaacgagctacatctgctgcagatggcggccaacattgcagcgggcatgctgtatctttcggagagaaaattcgtccaccgggatttggccaccaggaattgcctgatcaacgagcacatggcggtaaagatcgccgactttgggctctcgcacaagatctatttgcaggactattacaaaggcgatgagaacgacttcatcccgatccgctggatgccacttgagagcatactgtacaacaagttctcgcttgagtcggatgtgtgggcatacggcatctgtctgtgggaggtcttctccttcgccttgcagccctactttgggttaacccacgaggaggtgatcaaatacatcaaggagggcaacgtactcggctgtccggacaacacgccgctctccgtctacgcgctgatgcgtcgctgctggaaccgcaagcccagtgagcgacctggcttcgccgagatcaaccactgcatccagcacagcatcgccgagagcgagtgcaaggcaatgctctaggggattgccggagaagtga

SEQ ID NO: 7803 - protein, 708 aa, DROSOPHILA
MVLKWGANLAVLGLCVFLFASATHANSLNAIEEPVTRRHHQRHHEREREENGYCAPYSGKVCKEYLTGQVWYSLEDPTGGWKNEQVTTALWDELISDLTGLCREAAEKMLCAYAFPNCHMEGGRAVKAPLCFEDCQATHLQFCYNDWVLIEEKKERNMFIKSRGHFRLPNCSSLPHYNASMRRPNCSYIGLTELKESEVSYDCRNGNGRFYMGTMNVSKSGIPCQRWDTQYPHKHFQPPLVFHQLLEGENYCRNAGGEEPHPWCYTVDESVRWQHCDIPMCPDYVDPNAVDLNTPIKMEKFFTPSMIFLLAGIGFVAIVTLHLMILLVYKLSKHKDYSQPAGAATAECSVSMRGGGDCGGNLNTSRETLGGNGNTNTLAKWGTIRSTATIHSNCVALTTVTNVSDAKGTKPNARLEKLEYPRGDIVYVRSLGQGAFGRVFQARAPGLVPDQEDLLVAVKMLKDDASDQMQMDFEREACLLAEFDHPNIVRLLGVCALGRPMCLLFEYMAPGDLSEFLRACSPYATHQAPTQDRLQLNELHLLQMAANIAAGMLYLSERKFVHRDLATRNCLINEHMAVKIADFGLSHKIYLQDYYKGDENDFIPIRWMPLESILYNKFSLESDVWAYGICLWEVFSFALQPYFGLTHEEVIKYIKEGNVLGCPDNTPLSVYALMRRCWNRKPSERPGFAEINHCIQHSIAESECKAML

SEQ ID NO: 7804 - DNA, 4110 bp, DROSOPHILA
aacattctaccgataatattgtgcacttcgttgagttaaccgaaacggatgatattcattttaaaaatattgaaatatatcgtcaaagcctttgtgtaatcagatgcattatagaacaatatattaatatcatgtgagttgagatgtgtagctgtataacagtataaagatgtgacaatgtattatcttaacagggtgaattgtccagaagtcgactcggagtatcccaaaatggttcttgtcagctcttcctttattttaaaaagacttcagattcacgcggaagctttaattgataatgaagaggcttcatctttatacatggaatattgtacgcatcattataaatggaagacagtctttaattcatttttgacgatgccaccagaccttaaaaactttttggtaaaatcaaagaagtgaatgactttttcccattattttaatgcgaatggagtttttgtttatattttataagcattatttttaatataatcctgttaactcttggataaggaaacagaaaaccattccatttaatttatttgtgttgcagccagccaaactatttttataagtttagaatataacatatgttacacacatatctatgtaagaagcgatcttcggttattcaacaaaaacaaaaaaaaaaaaatacaaatgagtcagaattcattactgttcttcttaatggtttatctttatgcgttttcattcttcatgattactgcaaaaatggcactactggtaatctttttatatcagccacatttaataagaaccattgccttttttgtccgagcggtaaacacgttccagtcgacattatttgtttataaaattcgcccaccgtttgagcttccgaatattggaaattatgctcgcatatttctgcacgttcttcaatctggtcaatcataccaagaatttcgcgttgtattatcacgtctccagagctcgaagatcgtgcgggtcagcaactggcggagatctatatatgggcacccagctactggtgctgcattgtgctttgtggtgtcgtcggtgctatgagagtgtttttggtggtgttgagtgtgctgtctgtggcggtggccaccaagtgtccgtattcggcaatggaaccctccttgtccaggtccaaacggagttcttttgatattcgcccaggagttagtgacggaagtttggatgccttgattaaagaatttatgcccaagtacaatggcaacaatgttcacaatagttgggccgagccttctgcctcccaacaacctttaagatgtggagttccgcctcgcaactgcttgaatgatactcgaaatctgcactaccgaaccttggatggatcatgcaacaatctgttgtatccggagtttggaattgccgtttcgcgctatcgtaggcttttgcctcctcgccaagtggaacaggctccgaatgcccgtttgatctccttgtcgctgtacggcgagcagacgaggaacgataggttccgcaccatggcggccatgcaatggggccagtttgttgcccacgatatcagccaattgagcacacagggcgctcctcaagattgctgtgccgagccgcgtcatcctcgctgtctgccaatcaacctgccccgtggtggtcccatcgcataccatacgggcaagacctgtctgcactttgcacgcagtgtgtcggatgcggatgccatatgcccaaaggttgaggaaccccaaccggagaagctaacggtggcaactgcttacctggatctctcctccatctatggcaacaatccctcgcaaaacagaaaggtccgcttgttcaagggcggacttctgaagaccagctacacgaacggacaacactggctaccggtgagccaaaatgagaatggcgagtgcggtgccaagagtgagtgctacatcgtaccggacattcggaatcgtttctcgcccaccatcgccctattgcagactctgttggtccgagagcacaatcgtctggccgaaaatctagcgctgattaatcccgatcatagtgacgagcgcatcttccaggaggcacgcaagattaacattgcgcagttccagaagatcacatactatgactggcttccactgttcgttggtcgcacctatacctacttgaacggactgatttatccagtggagcccaccgagtatgtcaacgactacgacgagacggttaatcctgctgcctatgcggagttttctgctgccgcctttagatacgcccacacccaaatccccggatggttttcgtaagtatttggcttaattagtatttgtatatgtgtttataataataataatataactttcacagattggttgcccccaatcggagatctaatagaaccatgcgcctgagcgacttcctcgaccgtacagagactattcgtttactggacacatccgacaacttcgatgccctgttgagaggcttggctacccagttgcacaagcgatcggatgggaacattgatcgggagatcaagcactacttcaaccgcaaggagttcgaggaatacggttcggatctgaagtctatagatattcagagggcacgagacttcggattggcttcctacaacgatgtgcgagagttttgtggtctgcgacgagctgtcgattgggcggatttcgctcacgaaattcccggagaggtagattattgagatcaagattattgtagatcaaagcactaaaatttcattggtgtagaaaatatcgctgttgcgccgactgtacgccactccggatgacgtggaacttggtgttggcggtaccttggagtaccatgtcccagatgctctattcggaccaactttgttgtgtgtgattggaaaacagttccttaacacgcgacgtggcgatagattcttctttgagcgggagaacgaaggaggtttttcgcgcggtatgtggaaattataataatgtaataaaatgcaataataatatgcaattttatttttcacagctcaattggccgagatccggaaagtgagcctgtccagcttgttctgcagcaatgccaactatctgcatttaatccagccaaacgtatttgtcttcccgaattcacagtaagtatacaaatatctttatttttatatattattttaaattgatttccttttttagtaatctactactgaactgcaattttattcctcaaatcgatctaagcaaatggcaggatctcaggcctcagcttgttcactagtgtttttgctagcaaatgtatctgaaactaattgaactgctcaatttgttctttaagatgcaaacatttttgtttagttacatttttatcattttgggaaagaagaaagaaatggaatttgttttttatcatgtgacgcagttaaaaaagatatgacaccattacaaatatttatttgatatttacgaataagtttcggggtaataaaaagtattttaataaaatgtgtaccactttagttgtattttaaatctaacaaggtatgtttttgataaaaaaaaacccatttaaataagataatgcattcttctagttaatgttatttatttattttacttagacagtagagtttgcttgtgtaggcgtattatcaaatagaacagcaactgggattgcgaactcagtttcagtgggtgtgaaaggtaacctttgaccttctttatcgaaaagtagttcctctgtgggatatgtctctgccgtttctgttgtggtagtttcagtgtttggtgatcctagttcctcatcgtttctcagttttgatgtaacatccggcacaagagttgtgggttcttcagattcagttgatactcttgtcgctgggctttcggtgctcgatgtgggttccaatgtcgtgaaacctgaactcatctatctcatcattggacatattatatgtggtcgtttctcctaattcctcagttggaatttctgtggcttgtgcttcacctgcgttttcactcattaaagtctcattttgaactgttgttgtatgaatcgcatcgggcgcctcttcggtaatcgttattaatttgttaagatctagcttttcatctgttattttaatattattcggtagagtcgtct

SEQ ID NO: 7805 - DNA, 1924 bp, DROSOPHILA
atgggcacccagctactggtgctgcattgtgctttgtggtgtcgtcggtgctatgagagtgtttttggtggtgttgagtgtgctgtctgtggcggtggccaccaagtgtccgtattcggcaatggaaccctccttgtccaggtccaaacggagttcttttgatattcgcccaggagttagtgacggaagtttggatgccttgattaaagaatttatgcccaagtacaatggcaacaatgttcacaatagttgggccgagccttctgcctcccaacaacctttaagatgtggagttccgcctcgcaactgcttgaatgatactcgaaatctgcactaccgaaccttggatggatcatgcaacaatctgttgtatccggagtttggaattgccgtttcgcgctatcgtaggcttttgcctcctcgccaagtggaacaggctccgaatgcccgtttgatctccttgtcgctgtacggcgagcagacgaggaacgataggttccgcaccatggcggccatgcaatggggccagtttgttgcccacgatatcagccaattgagcacacagggcgctcctcaagattgctgtgccgagccgcgtcatcctcgctgtctgccaatcaacctgccccgtggtggtcccatcgcataccatacgggcaagacctgtctgcactttgcacgcagtgtgtcggatgcggatgccatatgcccaaaggttgaggaaccccaaccggagaagctaacggtggcaactgcttacctggatctctcctccatctatggcaacaatccctcgcaaaacagaaaggtccgcttgttcaagggcggacttctgaagaccagctacacgaacggacaacactggctaccggtgagccaaaatgagaatggcgagtgcggtgccaagagtgagtgctacatcgtaccggacattcggaatcgtttctcgcccaccatcgccctattgcagactctgttggtccgagagcacaatcgtctggccgaaaatctagcgctgattaatcccgatcatagtgacgagcgcatcttccaggaggcacgcaagattaacattgcgcagttccagaagatcacatactatgactggcttccactgttcgttggtcgcacctatacctacttgaacggactgatttatccagtggagcccaccgagtatgtcaacgactacgacgagacggttaatcctgctgcctatgcggagttttctgctgccgcctttagatacgcccacacccaaatccccggatggttttcattggttgcccccaatcggagatctaatagaaccatgcgcctgagcgacttcctcgaccgtacagagactattcgtttactggacacatccgacaacttcgatgccctgttgagaggcttggctacccagttgcacaagcgatcggatgggaacattgatcgggagatcaagcactacttcaaccgcaaggagttcgaggaatacggttcggatctgaagtctatagatattcagagggcacgagacttcggattggcttcctacaacgatgtgcgagagttttgtggtctgcgacgagctgtcgattgggcggatttcgctcacgaaattcccggagagaaaatatcgctgttgcgccgactgtacgccactccggatgacgtggaacttggtgttggcggtaccttggagtaccatgtcccagatgctctattcggaccaactttgttgtgtgtgattggaaaacagttccttaacacgcgacgtggcgatagattcttctttgagcgggagaacgaaggaggtttttcgcgcgctcaattggccgagatccggaaagtgagcctgtccagcttgttctgcagcaatgccaactatctgcatttaatccagccaaacgtatttgtcttcccgaattcacagtaa

SEQ ID NO: 7806 - protein, 623 aa, DROSOPHILA
MRVFLVVLSVLSVAVATKCPYSAMEPSLSRSKRSSFDIRPGVSDGSLDALIKEFMPKYNGNNVHNSWAEPSASQQPLRCGVPPRNCLNDTRNLHYRTLDGSCNNLLYPEFGIAVSRYRRLLPPRQVEQAPNARLISLSLYGEQTRNDRFRTMAAMQWGQFVAHDISQLSTQGAPQDCCAEPRHPRCLPINLPRGGPIAYHTGKTCLHFARSVSDADAICPKVEEPQPEKLTVATAYLDLSSIYGNNPSQNRKVRLFKGGLLKTSYTNGQHWLPVSQNENGECGAKSECYIVPDIRNRFSPTIALLQTLLVREHNRLAENLALINPDHSDERIFQEARKINIAQFQKITYYDWLPLFVGRTYTYLNGLIYPVEPTEYVNDYDETVNPAAYAEFSAAAFRYAHTQIPGWFSLVAPNRRSNRTMRLSDFLDRTETIRLLDTSDNFDALLRGLATQLHKRSDGNIDREIKHYFNRKEFEEYGSDLKSIDIQRARDFGLASYNDVREFCGLRRAVDWADFAHEIPGEKISLLRRLYATPDDVELGVGGTLEYHVPDALFGPTLLCVIGKQFLNTRRGDRFFFERENEGGFSRAQLAEIRKVSLSSLFCSNANYLHLIQPNVFVFPNSQ

SEQ ID NO: 7807 - DNA, 3867 bp, DROSOPHILA
acaaactatatttcttaatgtctcgactcgctagttcagtctgaaatagggctgctggtatctgcctatgggcatccgatccttggtcctcagtcgtcgcactgcctctcgtatgaatttgggctgcagggcaccggattcaccttgggcctccatcacgtcgagggcttcctccacaacctcgccgacgaagaccttcgcaatgccggacatggctatcacaacattctgggacacggaacagccggtgatagtttgcattagacgcttgacggcggccttgggaaaggcagagcgacgatacatttcgtagcgatccagctgttcttccgtaaagttggaaacgagaaccctggagtggaataaaatagtttttataggattaccccttcgaatcgctttaagctaacttactgcattcgttcgcgctcctcctcctccagttccttcttcgtcttgagctttttgtgcgccggctcgccagagtcaccatctccgtccgtgttcttgttgtcgttgtccccatccgcatccttgccatcacgatccgcatcgtttcccggatccgaggtgtcgctgtccttccgctcgccggaggccgactggaagaatttcaggtcgacatcgtcgccgtcgcttagggagttgcttttttgctgcgtgggaaagaggatttcgtccatttaaatgaaatttgaaaagcaccagcgaataataaacaaaatcaaccagggatggagttgcaccatattcgctttttgcaacactcaaaagttccgcaccacataatagatgaatataattcaaaatatcggattaaatatattaaaggtatatcatagttgtttataaggtggctttgagattttaataaataataaatatataaatatacaatattcgataaacttttatttttgtagtgttttttttttcttcaaattagtgctcaaagtcaaattatgtaaatttcaaattgaacattcactggttccgatagtccacagcacgttttacagcactggcctctgacacctcgtgtttttgttcttttctccgcatcgccatcgccaggcaagagtgcgcgctacattttcgtttatttcatcgttcagccagcaaccaaggcactgcgaaatgtctgcaaccgagactctgaatgtggaggcggcaacgcccgagatcggcgaggaggtcaagaaacaaaagaagcccaagccgaacaacaagaagctccgccaaggtgagtgacctcatgcgagcagtgcactgtggtaattgcatttgcacgaccctctccgcctcaaccacccaccacccactgaactaaccacttgcccacagaagcggcagccaaaatagcctccggagaaggcggcgacgaggagctgaccacaaacggagatgccaaaccggcaacaccggccgctcagccggcaaagaagaaggggaacaagggcaagaaaagcggtcagactgatccgcccaccatacccattgctaagctttatccggacggcaacttccccgagggcgagatcgtggagcaccccacgcccaaggatatgcccgacgatcgtacggccaaggaccgattcacatcggaggagaagcgtgctctggaccgtatcaacacggacatctaccaggaattgcgccaggcggctgaggcccatcgtcagacgcgtcagtatatgcagcgctacattaagccgggcatgaccatgatccaaatctgcgaggagctggagaacactgctcggcgcctgatcggcgaaaatggtctggaggctggtttggccttcccgactggttgctctcttaaccattgcgccgcccactacacgcccaatgccggagaccccactgtactgcagtacgacgatgtgtgcaagattgattttggtacccatatcaaggggcggatcattgattgcgccttcaccctgaccttcaacaacaagtacgacaagttgctgcaggccgtcaaggaggccaccaacacgggcatcagagaggcgggcatcgatgtgcgcctatgcgacatcggcgccgctatccaggaggtcatggagtcgtacgagatcgagttggacggcaaaacatatcccatcaaggcgattcgcaacttaaatggacactccatcagcccgtaccgtaagcaaaaatctatttattataaatattttaaatatgcttatgctttccttaatattttttgtttaaatttattgtgatttgtgcaaacacttaatgaagtctaaaattaaattctcaggcattcatgctggaaaaacggtgcccattgtgaaaggcggagagtccactcgcatggaggaggatgaattctacgccattgagacgttcggctcgacgggtcgcggtctggtccatgacgatatggactgctcgcattacatgaagaactttgatctgccgtttgtgccgctgcgcctgcagtcatccaagcagctgcttggcaccatcaacaaaaacttcggcaccctggccttctgcaagcgttggctggaccgcgccggtgccacgaagtaccagatggctctcaaggatctgtgcgacaagggcattgtggaggcttatccgccgttgtgcgacattaagggctgctacacggctcagtacgaacacacaattatgctgcgacccacctgcaaagaagtcgtttcccgtggcgacgactactagtgggatgaggaactggacagtgaccgattttcggcgatgtatggcttgcattatatacggtttttgatataagttcattctattgttgattttttgtgagcatgcgccaaccgaattatatatacaatgtattatgctcagaatataagcggagtgagattattttcgaagttgttcttgtcttggcagattgctacggagctcacgccagtaaagtgaatagttgtgattgataggctccttatctaataagaatgacctgtatatgtagacaaatcctttgcctgtaagatagtacaggatctctatgtaactgactatgctgaaaccgtacataagcgagagaatgcctccaaagcgatctaaagggttagttaatattttttaactactcgtcttagttatttactgtactcacttagcagaacaacccaactgctaaccatttgagattttgtggcttgggcaaagcgcagtttaaagaaaagctttataatggctaatggtcgctcgttggtcaatccctttctaaaatattcgatattcattatttatcaaagaaattgtggtacatcacttacagcaacccggtaaagtaaccactgctattataagtccgtctcaaaggagccacgttggtggtgatactcatgctaactccgttgcaggtgggcaaacagtgctcgcactgcctctggaccaagttctcttccttgttctgcaggtaggcgaagtcactgtagccataccaaatgctcttccatctcattaggcatggaagatcgggaagcatacaatagtcgagatccatggaactgccggtcaagggcggagatacacagccgcaatgatcgatcatgctcttcatgcggcataccagaaggcactcgtccagggagtagtacgatctgtaggaacgatgttcaccaggtattccgcggattggtttctaattacttactggttcagcaaccgcatgccttcttcgggatagtaacaacgtcgtatatgtggcgggactccgcgaaccccatcgcctgaactaaaaaacatcggctggatgggaatctccactatgctgtagtgatccaccagcacctctcccaaagtcgtagactgaatggtggcgtagtcctcttgggggaaaattatgagctaagg

SEQ ID NO: 7808 - DNA, 1645 bp, DROSOPHILA
tccacagcacgttttacagcactggcctctgacacctcgtgtttttgttcttttctccgcatcgccatcgccaggcaagagtgcgcgctacattttcgtttatttcatcgttcagccagcaaccaaggcactgcgaaatgtctgcaaccgagactctgaatgtggaggcggcaacgcccgagatcggcgaggaggtcaagaaacaaaagaagcccaagccgaacaacaagaagctccgccaagaagcggcagccaaaatagcctccggagaaggcggcgacgaggagctgaccacaaacggagatgccaaaccggcaacaccggccgctcagccggcaaagaagaaggggaacaagggcaagaaaagcggtcagactgatccgcccaccatacccattgctaagctttatccggacggcaacttccccgagggcgagatcgtggagcaccccacgcccaaggatatgcccgacgatcgtacggccaaggaccgattcacatcggaggagaagcgtgctctggaccgtatcaacacggacatctaccaggaattgcgccaggcggctgaggcccatcgtcagacgcgtcagtatatgcagcgctacattaagccgggcatgaccatgatccaaatctgcgaggagctggagaacactgctcggcgcctgatcggcgaaaatggtctggaggctggtttggccttcccgactggttgctctcttaaccattgcgccgcccactacacgcccaatgccggagaccccactgtactgcagtacgacgatgtgtgcaagattgattttggtacccatatcaaggggcggatcattgattgcgccttcaccctgaccttcaacaacaagtacgacaagttgctgcaggccgtcaaggaggccaccaacacgggcatcagagaggcgggcatcgatgtgcgcctatgcgacatcggcgccgctatccaggaggtcatggagtcgtacgagatcgagttggacggcaaaacatatcccatcaaggcgattcgcaacttaaatggacactccatcagcccgtaccgcattcatgctggaaaaacggtgcccattgtgaaaggcggagagtccactcgcatggaggaggatgaattctacgccattgagacgttcggctcgacgggtcgcggtctggtccatgacgatatggactgctcgcattacatgaagaactttgatctgccgtttgtgccgctgcgcctgcagtcatccaagcagctgcttggcaccatcaacaaaaacttcggcaccctggccttctgcaagcgttggctggaccgcgccggtgccacgaagtaccagatggctctcaaggatctgtgcgacaagggcattgtggaggcttatccgccgttgtgcgacattaagggctgctacacggctcagtacgaacacacaattatgctgcgacccacctgcaaagaagtcgtttcccgtggcgacgactactagtgggatgaggaactggacagtgaccgattttcggcgatgtatggcttgcattatatacggtttttgatataagttcattctattgttgattttttgtgagcatgcgccaaccgaattatatatacaatgtattatgctcagaatataagcggagtgagatt

SEQ ID NO: 7809 - protein, 448 aa, DROSOPHILA
MSATETLNVEAATPEIGEEVKKQKKPKPNNKKLRQEAAAKIASGEGGDEELTTNGDAKPATPAAQPAKKKGNKGKKSGQTDPPTIPIAKLYPDGNFPEGEIVEHPTPKDMPDDRTAKDRFTSEEKRALDRINTDIYQELRQAAEAHRQTRQYMQRYIKPGMTMIQICEELENTARRLIGENGLEAGLAFPTGCSLNHCAAHYTPNAGDPTVLQYDDVCKIDFGTHIKGRIIDCAFTLTFNNKYDKLLQAVKEATNTGIREAGIDVRLCDIGAAIQEVMESYEIELDGKTYPIKAIRNLNGHSISPYRIHAGKTVPIVKGGESTRMEEDEFYAIETFGSTGRGLVHDDMDCSHYMKNFDLPFVPLRLQSSKQLLGTINKNFGTLAFCKRWLDRAGATKYQMALKDLCDKGIVEAYPPLCDIKGCYTAQYEHTIMLRPTCKEVVSRGDDY

SEQ ID NO: 7810 - DNA, 9356 bp, DROSOPHILA
tccactgcacatttggcgggtggacaccatttccttctgcttccagtggcgtttcggtgctaaatggacagaattcgtttgcagcagcgttttgaagttgctgcaatagcggaacacacacagaaaacaacgtatatacgcattaattcgactatatacatatatatgtagcgtctctatgctgctttttctcccccctttcgaaatttctttgaaattttgtgctacgcactttgcgactcgatttcgagatggcttcgtacccgttttagtaaatggaactattgcgattgcattgtttttggacgcgcttcgccgtggtccaatatgtctagttctttgagacgcagttcatccacgctgacatccactttaacgcagtttttcgagcacaattaaaactacatacacaatccgtggcaaaaaaagtcaaagtgtctagggctggaagcgcatcgatggcaccgacaatcgattgcgccgatagcttgcaagcagtgaagttgctgcagaaacatcgattattataggctgattccactgaaacattgctgttccaattgcgcccagcaagccatttcaaaaaataaatgtttttttcttaaccaaaagtgaaattcaagctcaattcccacataccactgaacaattagaaaacaaacgacgaataaattgtgccaacaggtgtttgaatatgtatttagcacgtcgttacaaatagatcattgcttcgttcgataacaatactcgaaaaacagtttgcagatagaatttgttcctttgactgggtaaattgtctaaatactttaacatttaatttagttgggctgaagaaccaacaattacgataatatacgaaacgttttccgctaataggtcgccagactcttcggaacggctgcaatgtagaatgaactattaacgttattcagtattcgagattcaaaattcaagaatacacgatatttggaaaaatcataagaaagaatcgactggcgagcaatataaataagttatgtatttgtgcttttttatgcgtctgtagattatgaaatactttcgtatgtgctgctgtcatgggcctcttcgtctgatcttggtaaaaaccataaaacggatcggatgcggtgccaaaacaacttaaaaagcgaacacagaaactgattcgagggtgcggataggtggacattgatgcttcgatgcagcgatggtggtgataagcggaagtggggatcagagtccggatccgagtccgcttaggcgacggcgtcagtgtcacactcctcctcgacggtgatgtacataccctcctcctcgtaggcggaatcgtgcttggccaggatgcgcagcaggggacgcaggcgcagccaccactgcttcttcgggatgcgttgactggaagaggagtgggttatgccaagagcttaaagggaattcatagtcccctttgtggtgaccatcgggttaaacttactcgaagttcgtctctgcaatgaggtcgaccagcggtgagaagcggtactgccgcgacacgattcccagcagcgtggcggtgtccggggacttgcagttgactacgccgttggcgtcgatgttcgccttgatctgggcggccagccagtcgacacacttggcggccattttggtgcccatgttgcggtcgaagggagtgggtgagccgccctgctgcatgtgacccaggatgttcatacggcaggtgaagaggcccttgccctcctccgagtacaggcggtaaatgaagtccgtgctgtagttctcgctagccttctcgtttcgcaggattagaccgcgggagacgccctcggccatcttggaggccatgtggtagacatcctgctgcaggtctttgatggagaacttctcctcgtagatgtaggcggcatcagctccgccggccaagccggccaaggtggccaaatagccacagtagccacccatcgtctcaatgacgaacactcggcgcttggttccctgtgccgactgacggatacggtcgcaaatctccgtaatctcatttaaaccggtgtcgcatcccagagaaaattctgtgccgggcacattgttcgaaatcgtcgatggaataaccacaatggggatgcagaactgtgggtagttgtcccgctgatcggcgatctgtccggcggcatggtaactctcaaagccaccaatgatcaggagaccctggatcttaaactccttgagacgagcggcgatctccttgaacttgccctcaggcagtgtgcgtttggtacccaagtaggcgccaccctgaccaacccatcctgagacatccgacctgaaattgaattgcattaagcacagatttagagtgatcccttgtcggattacttaccagcccagctcgcggacatttccggcaatcagaccctcgacaccgtcgttgattccataaaccacatcaccgcggtagatggcattgcgcacgaagctgcgcacagcggcattcataccgcaagccggagcaccaatatgcatcacagctaggcggtatccttcgattcccttgccatcggcgtcgaagttctccttgggcggcttcaagcgcgtcagcatcttgtaggtctccagattccgctcgaaggagcgtccgcgcagcttgacggcatccgcccagcgtttctccgccatggccttggccacagcctgggtgcgctctacgcactccatcagcggcacgcgaaccgcctggttgccgtccagagagatgaccactggcaccgagtccttggtggcctccatcagggccaaagtggcctcagctcccatgcggcaagcctatgcgggttagaagcattaactctcaagtcaaaaatagtgtaattatatcttaataagtatatcttattttggtaactttagtgttttaaatcggatttacagcgcttcttaatataagtatgctatacaaataaaacaaaaatagctggcattgtaaattactaattaaaattaaattttgaggtgatctttggataattacttaccaaaatacgatcgaaggcactgggattgccaccgcgctgcacgtgacccaagacagtgatgcgggcatcgtgcttcagacgctcgtcgatcaccttctttacatcctcggctgtgatgggatgaccctcgcgatccatggctccctcggccacaatcacgatgttcagacgctggccagcagatcgctcctgttggtcaatggtgaagggattcacttaagcatatatgtaagatactaatcgtgaatgatacagaaactacaaaagcacaaacgaattatgaagaggcatgatgagtagacatcatcataacaaaaaaaatgtagtttacatatgctttgctttacaatgttgaaatagtgtcaccaaatgtgtatcagcaagcgaatgagtgcagtgcgtttcataaagttaactcacgttattctgtgatattcatgtatttcagtttgcatcattaaaatggctgtgtgcacgttcttttcaatgtatttaagtatttaaatcagttttgaaactttgaaatgcactgcaactgaattggtgttttgaaatatgaagaatggacgcacaagtcaaagtcgatgaatagaaaacattgatgaagatttactgatcgattaaacgaggatggacgttagtggatttggaaaagttagtaagggaactcagtgagatcatcgtgagtacataaaacagagactcaaaacccaaacaagtaaatcaaatagctgttaaagctgtttatcgccatggaaatttcggcacatcgaatagtccaaaaacaatgcagaataaaatttagaaattcaaaaatttgacaaaagagtaactagaaattaattggatagcgaaggactctggacctgacctggtggagcttgacacagatctcgtccttccaattgactgacaccggctcctcgggtatgaacataaaatcagcctctgtggctatggctgccgatatggctaagtaactaaaaaaacaagagattaggtacaaaaataaaagatggttcacaaatgtcggggagataattatccggggattgggagtatctggggtaaacttaagattagttacaatatgatttcggtatgctggtacagacaaaaactgtgcgtaattcattccgtatctccggtttgtgtttaaagatacattcgtgtgcagtaagcagaaaataagaacaagcgtttgtatggcaagtgtcgctcttaaaatgtgtctttcaaaaaattgtgtacaggtgtactacttaagcatcaagcaacgacaactgcactgaagtatacaactctatctaaaacaggaatattatctcgacagctaactggctatattaataagaataatatcctaaaatcctatacaagctgtcgagaacatatttccgatgctttgcgacttctcgcagtgctgatggaatggaaatggagctgcatcttgcctgggccagctgagagcagagcctgtctggccaatcgaccttgggcggcatttcgggaatgaatatgaaatccgcctcgcacgccagtccacccacaagagctaaatagctgcaaaaatatatattacaaaatattagtcaaaagggggatgggattttggaggatatggggatcgatcgacatagtactgcggccatagaaacagaaatgtgcgaaatgagtcgacgacattcaacagatttccgttttgggcttgcctgttccaatttaaggacaagtcgatcgggccaatcggcctgcggaggagactcgggcagaaagacgtagtctgcctcggagataatgccagctaccaccgaaagatagctagagatagtcgttccaggcattagctaaaatcccaattaatcactgacacttaggctaatacagaggcatcccaacttttcctcgcaaatatccgctcagagatcaacttacccgcaatgacgacccatgacctccatgatgaaggtgcgctgatgggagtaggctgtactggagatggcatcgattgcctcgatgatgcgatgtagtgccgtgtccgtgccgatggtcatgtcagtgccacagaaatcgttgtcgatggagccaacctacaaaaagattcatccataagaaaatatatccaaggaatactctgtgtagcataccaatccaacgatgtgcaggacattgaacttctcctgctgctcggtggtaatggtcttgttcttgaccagctcgtccaacaggctggaccactcctgacggaacagattggcgcccgtgagggagccatcgcctccaatgaccaccagattggtgattcctcgctgaatcaggttgttagcggctttcaagcgaccctgacgctcacggaagtcctggcaacgggcggagccaatgatggtgccaccacgatggataatggatgagactgaggcccagttggcttcctggatgcagtcgccaccatccaccatgccctggtagccttcacgaatgaagtagaccttgccgaaggtaaacacgaatcaattgtagatatggtgtaaaacagtttggtatagagtttggtatcttcatggcacatgacatcattagcacaattaaaaatgaatcaccgaattcgagtataaattattttaatttcattttcactctgccaaagtcgtaatattttaataggaagcagtaaagaacagtcaatagaaattaatatgatatgacttatctcatatactttctcaacttttactgaataagtttaagttttaaacaacaaaacatttgcatattcaaaataccgttacaggtaattacaatgtaatcgatgttaaatcgatactttttaagcaactcacataaccaagaattcaaattttataacgctcttaatttgaaaagtgaaaaaataacataaacaataatgatgccaaggcactagtagattaaaaacaaaggttagattacttgaactgatttggaaccatttgtttagcatactcatgatatatttattaattttgttcaatttattgaacatatcaagcgctgtcatgcaaagcgtggcaataactttacttttattgacccccaagaaattgaaatcaaatgaatagattttaatcaatttaaattggctagcaattgacacattttttgcatattttcgagggaccaacggccggccagaagttccctaacaaattaaagaactcatttaaataaaccgaatagaaaccaagagcgacaacaaaaaaacgaaacaaattagccgaaatcgaaatcgcatgtgagggacccgaaaataaacccaatgtcaatgtgcatgtacacatatattcttgaatttcttttcgcaccgattggagattatctaactggctttgcggcccaatagtcgtggtttaacggctgctgataagcaaattaccaggtgttttacgtaaatttctgggttcacatgggtttgttgcctgtgcctgggggtcggggtcaccggacgcgatgctgcgtgggcggaaagtacttgacagaggtcaccaactcaccttgcagcccaaatagatggccatacggacacaggctcgcacggcggcattcatgccctgggaatccccgccgctggtgaagaccgccagtcctttgtccttctgcgagccgcgggccaggaatcgttgattaatctcggaattcatttttcaatcttttgcactatatgtaaatcaaactggggtcgtaacggatatcgcacaaagcacacactatgaaccactattgtactcggtagggagtttccctgttttgcaactatgcgagcagcgccgctggagctgggttatatccaagtgggctataaatactactactgctccttgccgtggcttttcagttactagcaatatgtacgctcgcaggcggtattcacaagtttcgcttttgcttttgacgtttcaaggtgaccttcaggccagagacgcatacacaacacacacggacacacgcacacagccacgggctttctgtaagtgcgtactgatgcaatgcaaacttcggatggctaaatccgcccaagagttcgctccaacgcgattgccctaacttggtttgatttaggtcgaaaatctgaggattctgtctgttatgaacggacttttcgcgactagcaacgagcggaaaatagcgtttaaccaatttgtttatgttcgacccacaatcgttcagctgttgatcagctggttatcactgggcgagtaaaagctttcgcgagctttcaccgctgggaatggggaaattcgggagcagtcatcggttgtgtgtgggtgcgattgccgttatcgttatcgtttatataatacgttattctgatattcaaaaaaccggaaaatgtatcctcagattcgaaaatgtttatgaaacgccaattattatgctatatctcaagtgttcaactgatgttctaccctatctacaactatccgcgtaaagtaacgaaatgtaagagcttttatcgttgaatattagtgctcgtttaagtgcgtaattatttaaaaaactgtaaaaagcgagacaaacttacaaaaggcttgactggatgtacaaaatcaataacatcctgcatggttcttaaacactttcgcagctcatccaccgatttgccacatttcctttttggtgcactctttttctttttcaccgcattcttttcagaatagttcacagcattaagaaatccgttgtgcagattgtttattggttttccacatcgttgcgcagacttgtctttttgtatgtttttttcaccaggactatcattcttttgatcaccagaatcactgcgcaactttatacaatgtcgtttgcaattaaattttacacttaaaagagtatttcctctaagcaagtaaaaggaagaagtgttataatataaagtcaaactatataagcacatacgaaatatctcgaggacaacacaaatgatgacttcgtgtgcattggatgccgatgtttggaaatgtgagctaaagtaaaacaaagtcttataaattgatcaaaattaaattcgatttttaccttttgcctaatcggaggtgttttgtttgagatttctaagcgaaatgttgtaggaccatgaaaatggcggcaaatgggtatccgtccattgatttccaaaaatctccaaacaatcgaacagcttataagtgggtgtagtgaataaatcaaattcagacaacaacttacataggttttaatttggtaaatactcgaaattttattgaatgcatgccaaactaaattttgctcctaaatattgaacatttttattagattaccaatttttttcattttctgaactcattttttttttatgatttttgacattttagctaatgtaactacgatcacaaatattatatttgaataaaaactcatttggttggtttttgtattatttatttaattttttgttttttttttgttggtaattaagaaactgtaatttcaataaacttaaatattccactcatacatcaatctttgcctctgttatatgcatacaatttacgcctacacccggtttaattttcatctggttgttattatttttcggttttatgaatgtattgcagtttcacaatattattattttatatgttctgggattcgacttattagcgttgcggcaaaagtgtttcttttatttaaatatatatttttttgtttgcttttttttatattcctcacattcataatatagcgataaattcaattgcgaaaatatacatttacttttatcatacatacatatgttctgtatgctggacaataatatattttctttcaatacacatgcaaagttttcttgtatttaaattaaaaatttgaatagtttagttcacaatatttatgtattttgattcgatcttcatttaacttccgttttaataattccattgctgatttgcaggctgcaattgtcatagattgaagaagtcgaccacgttttcgaacgataataaaacagctaagaaataatcgccagattttaggaacaatttgtggctgtttctttgttggggaaacgcttctctgggcttaaacgtacacatatttatgcatgtacttcaaaaagttacacccaactaacgaataaatgggaaattgggcagacattgcgcacaataaaactcgtgccttcgccatgttgcacagtaaaaaaaaatgttagtggacttccgcgaggggatattagatttcatttcgttcgaaaaattcatttgacagacgacagttggttatatgtatgtattatatgagttatgcttttcacaattgtttataccaagaaaa

SEQ ID NO: 7811 - DNA, 3175 bp, DROSOPHILA
agaaaatgaaaaaaattggtaatctaataaaaatgttcaatatttaggagcaaaatttagtttggcatgcattcaataaaatttcgagtatttaccaaattaaaacctatatttttggaaatcaatggacggatacccatttgccgccattttcatggtcctacaacatttcgcttagaaatctcaaacaaaacacctccgattaggcaaaagctcacatttccaaacatcggcatccaatgcacacgaagtcatcatttgtgttgtcctcgagatatttcaggaaatactcttttaagtgtaaaatttaattgcaaacgacattgtataaagttgcgcagtgattctggtgatcaaaagaatgatagtcctggtgaaaaaaacatacaaaaagacaagtctgcgcaacgatgtggaaaaccaataaacaatctgcacaacggatttcttaatgctgtgaactattctgaaaagaatgcggtgaaaaagaaaaagagtgcaccaaaaaggaaatgtggcaaatcggtggatgagctgcgaaagtgtttaagaaccatgcaggatgttattgattttgtacatccagtcaagccttttaaggacaaaggactggcggtcttcaccagcggcggggattcccagggcatgaatgccgccgtgcgagcctgtgtccgtatggccatctatttgggctgcaaggtctacttcattcgtgaaggctaccagggcatggtggatggtggcgactgcatccaggaagccaactgggcctcagtctcatccattatccatcgtggtggcaccatcattggctccgcccgttgccaggacttccgtgagcgtcagggtcgcttgaaagccgctaacaacctgattcagcgaggaatcaccaatctggtggtcattggaggcgatggctccctcacgggcgccaatctgttccgtcaggagtggtccagcctgttggacgagctggtcaagaacaagaccattaccaccgagcagcaggagaagttcaatgtcctgcacatcgttggattggttggctccatcgacaacgatttctgtggcactgacatgaccatcggcacggacacggcactacatcgcatcatcgaggcaatcgatgccatctccagtacagcctactcccatcagcgcaccttcatcatggaggtcatgggtcgtcattgcggctatttagctcttgtgggtggactggcgtgcgaggcggatttcatattcattcccgaaatgccgcccaaggtcgattggccagacaggctctgctctcagctggcccaggagcgatctgctggccagcgtctgaacatcgtgattgtggccgagggagccatggatcgcgagggtcatcccatcacagccgaggatgtaaagaaggtgatcgacgagcgtctgaagcacgatgcccgcatcactgtcttgggtcacgtgcagcgcggtggcaatcccagtgccttcgatcgtattttggcttgccgcatgggagctgaggccactttggccctgatggaggccaccaaggactcggtgccagtggtcatctctctggacggcaaccaggcggttcgcgtgccgctgatggagtgcgtagagcgcacccaggctgtggccaaggccatggcggagaaacgctgggcggatgccgtcaagctgcgcggacgctccttcgagcggaatctggagacctacaagatgctgacgcgcttgaagccgcccaaggagaacttcgacgccgatggcaagggaatcgaaggataccgcctagctgtgatgcatattggtgctccggcttgcggtatgaatgccgctgtgcgcagcttcgtgcgcaatgccatctaccgcggtgatgtggtttatggaatcaacgacggtgtcgagggtctgattgccggaaatgtccgcgagctgggctggtcggatgtctcaggatgggttggtcagggtggcgcctacttgggtaccaaacgcacactgcctgagggcaagttcaaggagatcgccgctcgtctcaaggagtttaagatccagggtctcctgatcattggtggctttgagagttaccatgccgccggacagatcgccgatcagcgggacaactacccacagttctgcatccccattgtggttattccatcgacgatttcgaacaatgtgcccggcacagaattttctctgggatgcgacaccggtttaaatgagattacggagatttgcgaccgtatccgtcagtcggcacagggaaccaagcgccgagtgttcgtcattgagacgatgggtggctactgtggctatttggccaccttggccggcttggccggcggagctgatgccgcctacatctacgaggagaagttctccatcaaagacctgcagcaggatgtctaccacatggcctccaagatggccgagggcgtctcccgcggtctaatcctgcgaaacgagaaggctagcgagaactacagcacggacttcatttaccgcctgtactcggaggagggcaagggcctcttcacctgccgtatgaacatcctgggtcacatgcagcagggcggctcacccactcccttcgaccgcaacatgggcaccaaaatggccgccaagtgtgtcgactggctggccgcccagatcaaggcgaacatcgacgccaacggcgtagtcaactgcaagtccccggacaccgccacgctgctgggaatcgtgtcgcggcagtaccgcttctcaccgctggtcgacctcattgcagagacgaacttcgatcaacgcatcccgaagaagcagtggtggctgcgcctgcgtcccctgctgcgcatcctggccaagcacgattccgcctacgaggaggagggtatgtacatcaccgtcgaggaggagtgtgacactgacgccgtcgcctaagcggactcggatccggactctgatccccacttccgcttatcaccaccatcgctgcatcgaagcatcaatgtccacctatccgcaccctcgaatcagtttctgtgttcgctttttaagttgttttggcaccgcatccgatccgttttatggtttttaccaagatcagacgaagaggcccatgacagcagcacatacgaaagtatttcataatctacagacgcataaaaaagcacaaatacataacttatttatattg

SEQ ID NO: 7812 - protein, 950 aa, DROSOPHILA
MHSIKFRVFTKLKPIFLEINGRIPICRHFHGPTTFRLEISNKTPPIRQKLTFPNIGIQCTRSHHLCCPRDISGNTLLSVKFNCKRHCIKLRSDSGDQKNDSPGEKNIQKDKSAQRCGKPINNLHNGFLNAVNYSEKNAVKKKKSAPKRKCGKSVDELRKCLRTMQDVIDFVHPVKPFKDKGLAVFTSGGDSQGMNAAVRACVRMAIYLGCKVYFIREGYQGMVDGGDCIQEANWASVSSIIHRGGTIIGSARCQDFRERQGRLKAANNLIQRGITNLVVIGGDGSLTGANLFRQEWSSLLDELVKNKTITTEQQEKFNVLHIVGLVGSIDNDFCGTDMTIGTDTALHRIIEAIDAISSTAYSHQRTFIMEVMGRHCGYLALVGGLACEADFIFIPEMPPKVDWPDRLCSQLAQERSAGQRLNIVIVAEGAMDREGHPITAEDVKKVIDERLKHDARITVLGHVQRGGNPSAFDRILACRMGAEATLALMEATKDSVPVVISLDGNQAVRVPLMECVERTQAVAKAMAEKRWADAVKLRGRSFERNLETYKMLTRLKPPKENFDADGKGIEGYRLAVMHIGAPACGMNAAVRSFVRNAIYRGDVVYGINDGVEGLIAGNVRELGWSDVSGWVGQGGAYLGTKRTLPEGKFKEIAARLKEFKIQGLLIIGGFESYHAAGQIADQRDNYPQFCIPIVVIPSTISNNVPGTEFSLGCDTGLNEITEICDRIRQSAQGTKRRVFVIETMGGYCGYLATLAGLAGGADAAYIYEEKFSIKDLQQDVYHMASKMAEGVSRGLILRNEKASENYSTDFIYRLYSEEGKGLFTCRMNILGHMQQGGSPTPFDRNMGTKMAAKCVDWLAAQIKANIDANGVVNCKSPDTATLLGIVSRQYRFSPLVDLIAETNFDQRIPKKQWWLRLRPLLRILAKHDSAYEEEGMYITVEEECDTDAVA

SEQ ID NO: 7813 - DNA, 3329 bp, DROSOPHILA
taccagaaggcactcgtccagggagtagtacgatctgtaggaacgatgttcaccaggtattccgcggattggtttctaattacttactggttcagcaaccgcatgccttcttcgggatagtaacaacgtcgtatatgtggcgggactccgcgaaccccatcgcctgaactaaaaaacatcggctggatgggaatctccactatgctgtagtgatccaccagcacctctcccaaagtcgtagactgaatggtggcgtagtcctcttgggggaaaattatgagctaaggataatagcaaaaaaaaggataggagactacaatttggaatcctatcaactcacttgaaaagcactattggaatgaaaggtatttgtgatatcttcctttggagtatcctgcagcacaaattggacgctgttcaaaatggaattcgattcaaagacaaccattggaacagctctcatttcggagtcttcctcagctcgcttggtccttaaaaacttgtatattagatagccatataatgtacgatacacttacagaaattgggaatagctcggccgtctatagttaaatatgcagcacacattcgacgatgttggtcttttgaggaacagttgactggcattgacgggcaacccgaagacaatgcccctaatcaccagatccccgcaaccgggcgacaagtccctcagtatatcgcgcaccgagtaaccagcgccgttgtggtaagcgacgagcagccgatgcagtcgatccagctccgtggcattccaacgttcatgatcggattcgagggggtttaggtagaactgagccagcaccagcaggcgattggccatatcgtccagatctagggccaccgcctgcagcgaggagttgccctggtgatggaatctattggagtcgtggagtgttacaatcagaaattagtatgcctcactgcactcggatggggtataaaaggcccggggcaagactaaccctggactagtgccaatatgaagctactgctgttgctactgtcggttaatattcttattttttgcttggctgaacgccagaggttcgacaactacaaggtctatagagtaagtccagtgaaggcgaatcaactggagggactgcgatctttggaggcgaatagcgaggatgctctggtcctaaacaatctgcatcttgggcccacggattttctggtggcgcccgacttcgatggaacctttctgaaactcgtcaaagatttggatctctcgcctgaactcatcgacgcgaatgcccaaacgagtctatcgctggacatagagcccattgcggatgctaatcggcgaagtgatgactactcatggagtgaataccacgaacttaacgacacgcatcgctggatgcagaatctggtggggaagtatccggatgtcgtcagtgtatttgtggcgggtcagagttacgagggtcgtgagctgctgggcctgaggattaatcataacgatggaagagctgagaagcaatccatattcttggaggccggaatgcatgctagggaatggattggtcctgccacggccacctactttgctaacgagctactctcctctcagcagcaggagatcatgaatctagccagatcctatgtttggtacatattgccccatgccaatccagacggttatgtctacacccacaaaacggtaagctggtactgcaactgatatccaataagatattaaccattttccctttagaatcgcatgtggcgcaagacaaggagtccgcaggacaagaactgcgttggaacggatcccaatcgtaactgggacttccactggcgtgaggtgggagccagttctgatccctgctcggagtcatatgctggacccaaggcgttctccgaacctgaagttcagactctttctcagtttttgaaatcggtgccggaacccatgttcatgttcctctcgctgcactccttctcccaattgttgctatatccctatggacacacatccgcactgccggaaaatcataggcagttggagcagatcttcaatacagccgtgggtgcaatgaagcggcgttatggaactcggtacactggaggaaatgtgtacgatgccatatatccggcagctggttccagtatggattgggcttatggggtgctcaacgttaagtactcctttacctacgagctacgaccgtctgggtatagtttctggacaggatttagattgcccgccgcccaaattataccaacgggtcaggagaccacagattcgttggtggaaatgattaaggctgctgctcaaatcgagggttacaaaattgagtagaagagagagcttacgacgtttttgttgataagatatgaatgaaaagatctgttacttctgaaaaaaactaaacgtaagcatgttttgattaaaaagataacttggacaagctgataagatgaaaagtccaaattggcttaaaaagttttgggtaaaaaaaatgatttgattatatattatcaattttgcggactgaaatgttagtttgtggaacagaatgacttgtcaaagttagaatataaacaaaagctagagcttataaatttggtttaatgatgaatataactaatactaaaaatgtaatttataaatttcaaatattaagacaacgcttttttgaaattcttttaaagagttggcataattaaacttagccactatcacacacacttaacatttcacctgccagacttcggaattatttaatgatgaaatgtcacttcttaaagagctcaagacgtcatgaaccgagagcaggtcgggaattatagtgatttaaaacctgcagccgttaagacggcgataattttgtacaccgattactccaatatttactgcccaagcaattgtcaaaggcagtcgcggaccgtaaattagattcggataatgaattgtggaagctcttatcgaaggcctataaaaggaagtggctagccgagtgttggctcaaaccaacgacaacgatgtcgctgaacaagtgccttctattcgccctcctggccatcgtggccagcgcatccgtgagcgcggaacgtgttcgctatgacaactaccgcatgtacaaggtcaactcggagaatgccaagcaactggaggtgctgaaggatctcgagggatccagcgactcaatcatgttcttggatggcgttcatctggttggtgccgatattcagataatcgtggctccccacaaggtgcccgacttcctggagattctgggcaagtctgaaatcaagtatgagctgcaatcgcgcgatgtgcaaaagtctctggacgagat

SEQ ID NO: 7814 - DNA, 1275 bp, DROSOPHILA
atgaagctactgctgttgctactgtcggttaatattcttattttttgcttggctgaacgccagaggttcgacaactacaaggtctatagagtaagtccagtgaaggcgaatcaactggagggactgcgatctttggaggcgaatagcgaggatgctctggtcctaaacaatctgcatcttgggcccacggattttctggtggcgcccgacttcgatggaacctttctgaaactcgtcaaagatttggatctctcgcctgaactcatcgacgcgaatgcccaaacgagtctatcgctggacatagagcccattgcggatgctaatcggcgaagtgatgactactcatggagtgaataccacgaacttaacgacacgcatcgctggatgcagaatctggtggggaagtatccggatgtcgtcagtgtatttgtggcgggtcagagttacgagggtcgtgagctgctgggcctgaggattaatcataacgatggaagagctgagaagcaatccatattcttggaggccggaatgcatgctagggaatggattggtcctgccacggccacctactttgctaacgagctactctcctctcagcagcaggagatcatgaatctagccagatcctatgtttggtacatattgccccatgccaatccagacggttatgtctacacccacaaaacgaatcgcatgtggcgcaagacaaggagtccgcaggacaagaactgcgttggaacggatcccaatcgtaactgggacttccactggcgtgaggtgggagccagttctgatccctgctcggagtcatatgctggacccaaggcgttctccgaacctgaagttcagactctttctcagtttttgaaatcggtgccggaacccatgttcatgttcctctcgctgcactccttctcccaattgttgctatatccctatggacacacatccgcactgccggaaaatcataggcagttggagcagatcttcaatacagccgtgggtgcaatgaagcggcgttatggaactcggtacactggaggaaatgtgtacgatgccatatatccggcagctggttccagtatggattgggcttatggggtgctcaacgttaagtactcctttacctacgagctacgaccgtctgggtatagtttctggacaggatttagattgcccgccgcccaaattataccaacgggtcaggagaccacagattcgttggtggaaatgattaaggctgctgctcaaatcgagggttacaaaattgagtag

SEQ ID NO: 7815 - protein, 424 aa, DROSOPHILA
MKLLLLLLSVNILIFCLAERQRFDNYKVYRVSPVKANQLEGLRSLEANSEDALVLNNLHLGPTDFLVAPDFDGTFLKLVKDLDLSPELIDANAQTSLSLDIEPIADANRRSDDYSWSEYHELNDTHRWMQNLVGKYPDVVSVFVAGQSYEGRELLGLRINHNDGRAEKQSIFLEAGMHAREWIGPATATYFANELLSSQQQEIMNLARSYVWYILPHANPDGYVYTHKTNRMWRKTRSPQDKNCVGTDPNRNWDFHWREVGASSDPCSESYAGPKAFSEPEVQTLSQFLKSVPEPMFMFLSLHSFSQLLLYPYGHTSALPENHRQLEQIFNTAVGAMKRRYGTRYTGGNVYDAIYPAAGSSMDWAYGVLNVKYSFTYELRPSGYSFWTGFRLPAAQIIPTGQETTDSLVEMIKAAAQIEGYKIE

SEQ ID NO: 7816 - DNA, 8541 bp, DROSOPHILA
acttcagacgtcctgcgaaaggctgagaacgcaatatttgcaaaggctattaatgccatcaggcctatggagtttcaagttattatcaattccaaggacaacagcaaggaccgctccgtagttcgaagtgacaaggatcgctcctcctcacccaggcgtaacaacagcagcaggtcggtaaaggataggctgggcaccaagatttccaatgatagaagccgttcgcgagacaagtcgaagggcaggcgccgggccgcaaggagctccgacgacgatgcgaaccgcggcaggtcggatcgtcatggcagccggaagagggacaacagatcccgcgacagggcggcgccttcagagaagaggcaggagcgttcgtacaagcgaagctcgccggaggacgacaagctgaggcgccagaacaaggaacagtccgaatccaagcacggaaagcatgatcaaaacaatagcgacgactcggatcggagggcggccaaaaacaccaagtccagcgacagccgagtggtctcctctgtaacagccgtggttgctcctcccaaaccctgtcgtccagacaacccgttccgcaagttcgtcgacaccagttcgtcgagcagcttagttgtaaaatatgataacacgatacagaaggagggcgcgtcctcggacaacggcatggagcacaggaagcagagggataagaagctgaagaaacattcaaaatattcgtcaaccgattcgttgaagagcgagaagcgcaaggatccgaagagcaaaaagaagagcaagattttgaagaagaagaaaaaatcaaagaagtaggttacggtaggctacgagataagaatgatataaatattgaagattaatgtgtacaaatcaaagatttttaatgtatgtatttatcatgcaactataagtatacaaataaaacagaactactcaaggattgcttgcttgtgatcgatctaactttcgattgcccgccgagttagaagacggtggattgatattcgagaaattaaatatgtttattacaaacagttatcttaaaaaatcgattaaattacacgtgtagagattgactgaagttaatcattattgcttaagccgtccatgaaggacgatgccattggactgggcgttctggagataatgttgtcattgccatagtcatcggagtttgcatccactaaaagcacagaataataatatatatatgcattaggaaaactccgactagtctgtgctgtgcattaaatgctgcttgccttgttctagaaaattggattttctactctggggtatgcaactcagcgaatgtattattggactgcaggcttgatcggctgtttcgagcgtggttggtaagtctaggagtcgttgattttgaatgccatcccctggccccatgtgagaaatgtggttgaaattagtcggtgctgatatcatctttgatctacgatcactacaaataaaaagcgaataatgaggactcgaatcgattgcgccaataggttaactgaagcccaaccttttgatggtcttgtttatctccctgatagagaatctccgctttatgctcggaagtccctttcgatttccgtcacggtattgcaaaaggccctctgcaaataaagcatgtggtttaatggccctgataaacagacgtgaatgatttagcttacttgtgtgaatattggataggtaaacaatcagcggagtgtcattgactgaggacagcaccacgtttcccaaattgtttaagggaagtgattgcttcaatccaatcgactgcacccattcggcagtctgcgtattgaatatatccaaatgtgtatccgaaaacaccagcaagtgaccatcacaaaaggctggaatgagtccacaaaagagttatacatcatgagtcataaccgcatctcgttttttactcacttatatacgtagggaaggctggatacataatttccctatcccgagactttcgcccttgcaggtctacgtatatggccagagtctggaacaccagtaagtactccccgaaattgccgccgctggggcacagaatttcaatgaccctgaccgcatccactccggagtagttcaaaaatgcacataactggttctccggatgaaccaaagctaatgaaagatacgaagacgttataaagactctcagaaaacgtcatctattactactcacacattgcagttgcttctccgcgcagaaagtatgcggtaaatccgctttggtgagccacaaccaatcgcatgtcggacagaatctgcaggtgctgcgccatgtagccaattgtgaattcgcaagtcttctggtgtcttgtgcgcgttctattgatttcgtaaactacgatttgtgtgtggttattcggccgctttagagcgatgataaatgagtaaacgatattggggaagcggcggattattccagtgcaagcagatatgcagttcttcgattcgaccaccttgatccactcgacatcactagcctctaatgcccttataggtaataaacgcaagttgcgctgctttccgcagagaatgacgaggatctgctcctcttcaatgtaccatagctgaagaatcttcttgctttcgccaatacgagcgatctctggaaatgtttgttagcatttagttgtgccctcttctacttgcaagttttcataaaatgtgattgcttaccgtactggtccagattaatgtagaacaggccgtcttcggtgcccaagagtatttgatttggatatatgatgacagaacacaatgcgtttcttattaaagacagggtattgtccagaatctcgttaactttaaatatagcagtatttggtaagctgtttcgtttcaatattcgatgtagttctcccagggcaatgacccacttggacttctccgactcgttgtcggcgagcataagggtgttcagcgaaagaccgccatcgataagggcggtttttatctggaatgaggaagatgcacacatttagtctcaggagatgctgcgatggcagtctgtttaccttgaaaatacatggcacatctttcttggcggcatggatgacatcgctttcgcgcacactacccaccgagaactcgggatccctcatatccagcacttgggacacgctcacgctgggcaatgcacaccgatccggcgaaatgtcatagaggaacaacttaaagtcgcaaacaactacgaactgccgaatccatcctcgcttaatcacccccgacttggggacctttacgtagccctcgtatgccgtgccgattcccctggtgggatcgattcccagcggccgtttcgtctgatccatgggcacggggcacgtggtgggcaccttttggcagcagatcgtgtgacaggcgaatccgcagatctcgcacacaacgccttgtcgtgtgagccccaccatcagcgatgtgcagtgattgcattttgtgggactactgaatgtgcgcaccaggaactgatggatcgccgtgttgccgggcactttcttctgagattccttgaccagctggtcactctcctcgcgggacaaatcgctgaccgaggcttctttcatggacgaatgatccttgttgttcttacccgcatactttggctcgtagttgaagagcatgcccgaattgccggactggaagaagttgggagtgaaattgtcgccggattcgttgccaaagctctcggcagaatctataatctcggagttctttgacatgtcgcggaagaaggcgctgcttagcccatgatgcgttgatttgttgaggaacgactcggagtattccaagcctcccttctgcaagtcccgcagttcggtttccttcttctggaaatcgtgcagtatggagtcgtaccgctttttgtagtctcgaacctctttctgtgtggatatgaggtccgatctggtttgactcagctcatccgatatcatgttcttggcctgaatctccctttgcagcgcgctctgcaggttgagcagctccatcttgtccagcttctgagagcgccggttcctccagttcttattgtccacaccgttgttgttgaaggtacccacatgcttcagatactccaactcctccgtcattttggtggccaaggcctgcaagtagcctcgcgcgtctttctcatcggacacccattgaataatctccgccatttgccgctcccacaaggtgatggcctcccgtttcattcgcaactccttgaagatctcgtcgtcctccgcttgaagttctttaagactctttgacttgagattcacctcggagcttaatctctgcttttcctcgaaccatgagcttttctccaaatcatgctgcttcttcaattccaaaagcgtttcggcggaatcggtaatcgactccatttgagtgtacttcagcctttcctgtgtttgttgcaactccttggtgagtgccaaattcgcgttctctagctcgctgaactgctcgcgcagtgcttccaactccatattgtggcgcgtctgctgatgacttagcttttccgagaactggagttcaaggcgttcgatctcgtatgacgacatctcggaggaaatgctgagtggcatagttgtctccacactcgaggagcccttccgcagctccatctgcagctgcctgcagcagtcctccgcatgctcccgcagcttcttttctttggcagcctcgatgacagcatcctcaatgtgaagctccaattcccttcgcgttttgtccgactttctcagttcgttccgcaggctgtcgttcttctgcatggcaccatcaagctcctcctccttgtccctgacttggcgggagagcttctgcttctgatttcgcagctccgagagtttctcagtgacctccgagtactccatcatggcgatgtttcgttgagagatggcgtcctgaagttcagagtcttgagttttgagccgttcgaaaacctcgttgtgttgctttgacaactctgccttttcctgcttcaaagccgcaagctgatcgtttagtgccttcagctgaacggagtccaccggtgtctccgagttgttgctcggcagaatggccaactggggactgcttatggtgtccaaggtatcatctccgaagcccgagctctggttcttcttcgagtccaaggtggagctgctggtcagcgagaaggtaaacccgatgaagggcaagtgaaatccagagaaggcaggattggctgacggcggaatggagtccgttaaccggacgtcattgtcgtccacatcgaagttggaggtatctgttggactggacacttccggcacatacggtgctggtccctgccttatgttcttccagtcgatgcccacaaaccaggggtggtccatgaagtcttggatgccgttctgaccaagtcggttctcgggaatacatatcagtttgcagagcaagtcctgagacgtctccgataccttgtaatttagggtttcttgtgacggtaagttgaaacagttttggtggttcatgatcttgccataggtttccaccaaactttctgcgtagaagggcgtctctccgtagagcatctcgtacatgcacactccgagtgaccaccaatcacactccgtgccgtagcgtccctttccgtcctccatggccctcaaaatttccggggaaatgtagtcgggtgtgcccacggccacgttggactgtacggtgccatccttgtccaggcgcaggcaggatccaaagtcagccaggcgcacgtgaccgcgcttatcgagcagtacattatccggcttgatgtccctgtgaacgtacctaatctggtgaatactattgattgccaggatcatctctgtgatgtagaacttggccatgtcctcgggcagcttgtcctcgaatttgctgagcaatgtaagcaggtctccgccgcagtaatagtccatcaccagatactgaaaggaaggtgttaataaggtaagaacggagaataggagtgctgacataccaggttaatattgtcttgaaaggcatagtgaaggttggtgatccactgccggtcgccgaaaaccaacacatcccgctcctcgcggaagcaggccgtctcggccctcttcagcatctcccacttgttcagaatcttcatggcatacaccttttcggtggatatcatctgaaccacgcacacttctccaaaggcaccgcgtccgatgatcttgagtatgtcaaagtcatctcggcttagtcgaagctttcgcactatgtgcacgaagggtttggctgtggggtaattcaggttttaagtactcgatagcacatctggtttgtactaagcatagttacatagtttgaggaaatcagagacgcccttctccctgcgcagggaggagttgctgcactcgtcatagagaacgatgaaggtgtccagcagatagtccaacgaaaactgatgtccttccgtgtcctcgccgaactcggccgcccatttttgatcgcttgtggtgtcgcttagaatacatttcagaaatgtgagccttttcttgcagcttcctgtggttatatctgcaacgtagaatttggtgcgtgagtcactaaaagatataaccacttttgatgctcgaatagttacgtattaaataatatatcgttaaaagtatttgatgagtaggtacttttttttaactcaacgcttagatatttaaagtgctgtggaaacctaatacgtaagtatccttggcatcattaaaaaacacatatgtatgtaagctgataaaaactcggagactgtcctcctttggccaagagcgcgagcaattgttgtattaccccaaaaagccgaccaacacatgcatcgcaaacatttgccagcccgcaacaatgccgcacccactgacgtcgcagacacctggctccttccaattcagaaatgcggctcggggggcagaaatcagctcaaacgggtgggttatggctgtggctatggctatggaaaaccaagatgaaacgtgggggaaggtagaccggagaacaatgggcgcaagcagaaggccgtactcctaatggattccgctatatttccaagcatgcacagctttcccatattttccgcattctcctattggccaccactatttacgattcatattcgggccatttcgatttttcaaacatgtatgcgggacatgcatgtgtgttggaccgaccccccgtacaggaggatatattaggtatggagccgtaccctacgctcagcatgccaaatacacccgaatctcgcctatatggctggttcttccgcacagatataaataaataattgtttatatgcgtgtatgtatgtatggttggcagaatgcgaaacaacaaatgctcaattgggaaacaagcacggcctccaactgccgattttggtgtcagcgaaccgcgcgtattaccactgatttcggaagattcgtattccatcttagttattgctccgtctggcctaaaccatatttatccgaaatagtgcaaaaagaaaagccgaactgttgtcgaattgtagtgttccgtttcgttgggaaaacagagtggccctatagacttttaaaataagcctataaataccacaattttcatcggtattttggcttttttaagagcggtcacaccgcctttatcagctgatattattacaagaaatataataaatattttatatattttttatatattttatatatatataatatattatatataatatatataatataataatataatataatattattttatataatatatatttatatatattatgattacaaacatatatagaagatccaaaatacaggctgcttgctcagcggcattaaaagatatattctcagctatttaatctaagataatgataaatatcttgttagctggtaaatagttattaagtctctgagaattatattctaagataaattgatataaagatttaaagagattaagatataaagatataaagatgttttcttctatctaaaaacatataatttaacgtggccctcttcgtgttccattccatcactccaaatgcgacgccgcggtatttaaccgcgtttttgttatggcgtagtgcacataggccttcaataaagccttctaatactcagtagcgatcaaacttcattgcaaaattaatatttgttattgttttcgcgatactaaatgccttccgatgcgttcttcaccaaaagtgtaacgcggagctgagataaattcgcgcatcgcattaaaattgcgcttactttcaccgcactcgaattgataaacgtatgtacatacgagcgtactggctcgcatatgtatctggatatgtgtgtatgcagcagatagtttctgtaaagtggatacgtacataaaatgggatagttgtgcggaaacggctcgaactactcgaattacggtcgcaaaatgtttatctttgtggcgtttcgaatttcgaatggatgtactaaaaggccggggactactcattttacaagtgcaaatagcccattggtttcgctcgacttctta

SEQ ID NO: 7817 - DNA, 5091 bp, DROSOPHILA
aaacggaacactacaattcgacaacagttcggcttttctttttgcactatttcggataaatatggtttaggccagacggagcaataactaagatggaatacgaatcttccgaaatcagtgatataaccacaggaagctgcaagaaaaggctcacatttctgaaatgtattctaagcgacaccacaagcgatcaaaaatgggcggccgagttcggcgaggacacggaaggacatcagttttcgttggactatctgctggacaccttcatcgttctctatgacgagtgcagcaactcctccctgcgcagggagaagggcgtctctgatttcctcaaactatccaaacccttcgtgcacatagtgcgaaagcttcgactaagccgagatgactttgacatactcaagatcatcggacgcggtgcctttggagaagtgtgcgtggttcagatgatatccaccgaaaaggtgtatgccatgaagattctgaacaagtgggagatgctgaagagggccgagacggcctgcttccgcgaggagcgggatgtgttggttttcggcgaccggcagtggatcaccaaccttcactatgcctttcaagacaatattaacctgtatctggtgatggactattactgcggcggagacctgcttacattgctcagcaaattcgaggacaagctgcccgaggacatggccaagttctacatcacagagatgatcctggcaatcaatagtattcaccagattaggtacgttcacagggacatcaagccggataatgtactgctcgataagcgcggtcacgtgcgcctggctgactttggatcctgcctgcgcctggacaaggatggcaccgtacagtccaacgtggccgtgggcacacccgactacatttccccggaaattttgagggccatggaggacggaaagggacgctacggcacggagtgtgattggtggtcactcggagtgtgcatgtacgagatgctctacggagagacgcccttctacgcagaaagtttggtggaaacctatggcaagatcatgaaccaccaaaactgtttcaacttaccgtcacaagaaaccctaaattacaaggtatcggagacgtctcaggacttgctctgcaaactgatatgtattcccgagaaccgacttggtcagaacggcatccaagacttcatggaccacccctggtttgtgggcatcgactggaagaacataaggcagggaccagcaccgtatgtgccggaagtgtccagtccaacagatacctccaacttcgatgtggacgacaatgacgtccggttaacggactccattccgccgtcagccaatcctgccttctctggatttcacttgcccttcatcgggtttaccttctcgctgaccagcagctccaccttggactcgaagaagaaccagagctcgggcttcggagatgataccttggacaccataagcagtccccagttggccattctgccgagcaacaactcggagacaccggtggactccgttcagctgaaggcactaaacgatcagcttgcggctttgaagcaggaaaaggcagagttgtcaaagcaacacaacgaggttttcgaacggctcaaaactcaagactctgaacttcaggacgccatctctcaacgaaacatcgccatgatggagtactcggaggtcactgagaaactctcggagctgcgaaatcagaagcagaagctctcccgccaagtcagggacaaggaggaggagcttgatggtgccatgcagaagaacgacagcctgcggaacgaactgagaaagtcggacaaaacgcgaagggaattggagcttcacattgaggatgctgtcatcgaggctgccaaagaaaagaagctgcgggagcatgcggaggactgctgcaggcagctgcagatggagctgcggaagggctcctcgagtgtggagacaactatgccactcagcatttcctccgagatgtcgtcatacgagatcgaacgccttgaactccagttctcggaaaagctaagtcatcagcagacgcgccacaatatggagttggaagcactgcgcgagcagttcagcgagctagagaacgcgaatttggcactcaccaaggagttgcaacaaacacaggaaaggctgaagtacactcaaatggagtcgattaccgattccgccgaaacgcttttggaattgaagaagcagcatgatttggagaaaagctcatggttcgaggaaaagcagagattaagctccgaggtgaatctcaagtcaaagagtcttaaagaacttcaagcggaggacgacgagatcttcaaggagttgcgaatgaaacgggaggccatcaccttgtgggagcggcaaatggcggagattattcaatgggtgtccgatgagaaagacgcgcgaggctacttgcaggccttggccaccaaaatgacggaggagttggagtatctgaagcatgtgggtaccttcaacaacaacggtgtggacaataagaactggaggaaccggcgctctcagaagctggacaagatggagctgctcaacctgcagagcgcgctgcaaagggagattcaggccaagaacatgatatcggatgagctgagtcaaaccagatcggacctcatatccacacagaaagaggttcgagactacaaaaagcggtacgactccatactgcacgatttccagaagaaggaaaccgaactgcgggacttgcagaagggaggcttggaatactccgagtcgttcctcaacaaatcaacgcatcatgggctaagcagcgccttcttccgcgacatgtcaaagaactccgagattatagattctgccgagagctttggcaacgaatccggcgacaatttcactcccaacttcttccagtccggcaattcgggcatgctcttcaactacgagccaaagtatgcgggtaagaacaacaaggatcattcgtccatgaaagaagcctcggtcagcgatttgtcccgcgaggagagtgaccagctggtcaaggaatctcagaagaaagtgcccggcaacacggcgatccatcagttcctggtgcgcacattcagtagtcccacaaaatgcaatcactgcacatcgctgatggtggggctcacacgacaaggcgttgtgtgcgagatctgcggattcgcctgtcacacgatctgctgccaaaaggtgcccaccacgtgccccgtgcccatggatcagacgaaacggccgctgggaatcgatcccaccaggggaatcggcacggcatacgagggctacgtaaaggtccccaagtcgggggtgattaagcgaggatggattcggcagttcgtagttgtttgcgactttaagttgttcctctatgacatttcgccggatcggtgtgcattgcccagcgtgagcgtgtcccaagtgctggatatgagggatcccgagttctcggtgggtagtgtgcgcgaaagcgatgtcatccatgccgccaagaaagatgtgccatgtattttcaagataaaaaccgcccttatcgatggcggtctttcgctgaacacccttatgctcgccgacaacgagtcggagaagtccaagtgggtcattgccctgggagaactacatcgaatattgaaacgaaacagcttaccaaatactgctatatttaaagttaacgagattctggacaataccctgtctttaataagaaacgcattgtgttctgtcatcatatatccaaatcaaatactcttgggcaccgaagacggcctgttctacattaatctggaccagtacgagatcgctcgtattggcgaaagcaagaagattcttcagctatggtacattgaagaggagcagatcctcgtcattctctgcggaaagcagcgcaacttgcgtttattacctataagggcattagaggctagtgatgtcgagtggatcaaggtggtcgaatcgaagaactgcatatctgcttgcactggaataatccgccgcttccccaatatcgtttactcatttatcatcgctctaaagcggccgaataaccacacacaaatcgtagtttacgaaatcaatagaacgcgcacaagacaccagaagacttgcgaattcacaattggctacatggcgcagcacctgcagattctgtccgacatgcgattggttgtggctcaccaaagcggatttaccgcatactttctgcgcggagaagcaactgcaatgtctttggttcatccggagaaccagttatgtgcatttttgaactactccggagtggatgcggtcagggtcattgaaattctgtgccccagcggcggcaatttcggggagtacttactggtgttccagactctggccatatacgtagacctgcaagggcgaaagtctcgggatagggaaattatgtatccagccttccctacgtatataaccttttgtgatggtcacttgctggtgttttcggatacacatttggatatattcaatacgcagactgccgaatgggtgcagtcgattggattgaagcaatcacttcccttaaacaatttgggaaacgtggtgctgtcctcagtcaatgacactccgctgattgtttacctatccaatattcacacaaagggccttttgcaataccgtgacggaaatcgaaagggacttccgagcataaagcggagattctctatcagggagataaacaagaccatcaaaagtgatcgtagatcaaagatgatatcagcaccgactaatttcaaccacatttctcacatggggccaggggatggcattcaaaatcaacgactcctagacttaccaaccacgctcgaaacagccgatcaagcctgcagtccaataatacattcgctgagttgcataccccagagtagaaaatccaattttctagaacaagtggatgcaaactccgatgactatggcaatgacaacattatctccagaacgcccagtccaatggcatcgtccttcatggacggcttaagcaataatgattaacttcagtcaatctctacacgtgtaatttaatcgattttttaagataactgtttgtaataaacatatttaatttctcgaatatcaa

SEQ ID NO: 7818 - protein, 1637 aa, DROSOPHILA
MEYESSEISDITTGSCKKRLTFLKCILSDTTSDQKWAAEFGEDTEGHQFSLDYLLDTFIVLYDECSNSSLRREKGVSDFLKLSKPFVHIVRKLRLSRDDFDILKIIGRGAFGEVCVVQMISTEKVYAMKILNKWEMLKRAETACFREERDVLVFGDRQWITNLHYAFQDNINLYLVMDYYCGGDLLTLLSKFEDKLPEDMAKFYITEMILAINSIHQIRYVHRDIKPDNVLLDKRGHVRLADFGSCLRLDKDGTVQSNVAVGTPDYISPEILRAMEDGKGRYGTECDWWSLGVCMYEMLYGETPFYAESLVETYGKIMNHQNCFNLPSQETLNYKVSETSQDLLCKLICIPENRLGQNGIQDFMDHPWFVGIDWKNIRQGPAPYVPEVSSPTDTSNFDVDDNDVRLTDSIPPSANPAFSGFHLPFIGFTFSLTSSSTLDSKKNQSSGFGDDTLDTISSPQLAILPSNNSETPVDSVQLKALNDQLAALKQEKAELSKQHNEVFERLKTQDSELQDAISQRNIAMMEYSEVTEKLSELRNQKQKLSRQVRDKEEELDGAMQKNDSLRNELRKSDKTRRELELHIEDAVIEAAKEKKLREHAEDCCRQLQMELRKGSSSVETTMPLSISSEMSSYEIERLELQFSEKLSHQQTRHNMELEALREQFSELENANLALTKELQQTQERLKYTQMESITDSAETLLELKKQHDLEKSSWFEEKQRLSSEVNLKSKSLKELQAEDDEIFKELRMKREAITLWERQMAEIIQWVSDEKDARGYLQALATKMTEELEYLKHVGTFNNNGVDNKNWRNRRSQKLDKMELLNLQSALQREIQAKNMISDELSQTRSDLISTQKEVRDYKKRYDSILHDFQKKETELRDLQKGGLEYSESFLNKSTHHGLSSAFFRDMSKNSEIIDSAESFGNESGDNFTPNFFQSGNSGMLFNYEPKYAGKNNKDHSSMKEASVSDLSREESDQLVKESQKKVPGNTAIHQFLVRTFSSPTKCNHCTSLMVGLTRQGVVCEICGFACHTICCQKVPTTCPVPMDQTKRPLGIDPTRGIGTAYEGYVKVPKSGVIKRGWIRQFVVVCDFKLFLYDISPDRCALPSVSVSQVLDMRDPEFSVGSVRESDVIHAAKKDVPCIFKIKTALIDGGLSLNTLMLADNESEKSKWVIALGELHRILKRNSLPNTAIFKVNEILDNTLSLIRNALCSVIIYPNQILLGTEDGLFYINLDQYEIARIGESKKILQLWYIEEEQILVILCGKQRNLRLLPIRALEASDVEWIKVVESKNCISACTGIIRRFPNIVYSFIIALKRPNNHTQIVVYEINRTRTRHQKTCEFTIGYMAQHLQILSDMRLVVAHQSGFTAYFLRGEATAMSLVHPENQLCAFLNYSGVDAVRVIEILCPSGGNFGEYLLVFQTLAIYVDLQGRKSRDREIMYPAFPTYITFCDGHLLVFSDTHLDIFNTQTAEWVQSIGLKQSLPLNNLGNVVLSSVNDTPLIVYLSNIHTKGLLQYRDGNRKGLPSIKRRFSIREINKTIKSDRRSKMISAPTNFNHISHMGPGDGIQNQRLLDLPTTLETADQACSPIIHSLSCIPQSRKSNFLEQVDANSDDYGNDNIISRTPSPMASSFMDGLSNND

SEQ ID NO: 7819 - DNA, 2732 bp, DROSOPHILA
ttatattctttgtcacatcgttgaactcgattttggacgacaactgcagcagggctatgtcattgtgatacagcggcttgtcgaagttgcagtgcacatggatctggctcacagtgtagtacggagcatacagatcccaccagtccacagttccagtcacaaccagcagatttaatggcctcaatcccgccacgcaactggccgctgtgagcacccaagtttcgtcgagtatgatggctccgcacaagtgatacgagtatgcattttggatacttgctatccagggccagttgccctcggcggcggtggtgccaccgatcacacgaccttggggcacagcttcggtggagcgatgcctctcgatattggccaaacccggaagtggttctcctcgcatcctcatggcttccgttggcccctgaagagccagcagagtcagacccagcagcaccgtaagattccacctatttgtcatggttggtatatgcgcggtacaatcgaaactaaaacccctcagccgggccaccttaaaattacacttcataggacggatcttatcgcccagtttggtcgaattttggataataggcagtttatgggtctggacacggcgataagtggcatatgcggcattgcggccgtggtcattatgagctgactcgctagttcgaccggtgcatttatagagtgccgagatttgccgtgtcacacaagtccatgggtttatgagcaaccaggtccaattggacgttccgcctttaccgattgggttttatccttgcagccgtaaagatacctgactgcgaatggccataaagattgctggccagtggtcagttggccgcgaaaaaacccaagtgagccaactcccgatgtgcgataaaataggtttatatggaatgcatataaaaacgctcagttgggtcatacaattttccattgctggtcattaattcgcgctgtccggcattgtccctcgtctcggaaatatttgttttggatgatggctgtccgtttgtctctgatttggctgcttctgctgggcacttccattgacgtcacgcgcggaaagcgtttggacaatcgtaaacttttggacaatcgcattgtgggtggccaggaggcggaggacggagtggcaccttatcaggtgtccattcagaccatctggaaaacccacatctgcagcggagtcattctcaacgaacagtggatcctcaccgcgggtcattgtgcactggactttagcatcgaggatctaaggattatagtgggcacgaatgatcgtctggagccaggacagaccttatttccggacgaggccctagtccattgcttgtacgacataccctatgtctacaataatgacatagcgttgatccatgtcaacgagtcgattatattcaatgatcgcacccagatcgttgagttgagccgagagcaacctccggcgggttccacggtcactctgacgggatggggtgctccggaaagtagctatcccacagtgcaatatctgcagaccctcaacctgaccatcatcgcacacgaggagtgcagagagagatgggactttcacgatggcatcgacatcggtcatatttgcacctttacgcgagagggcgagggtgcctgctccggagactccggtggtccactgatgtgggagggcaaactggtgggcctggtcaactggggcagagcctgcggcgtcggcatgccagacatgtaagatggtgtatatccactcccctttaaaggtgggaattaatcaattgtcaatccttttaggtatgccaacacggtttactatcaggattggatccgcaggactcattcaggatgcaagaatcgtgttaactaaaagagatacaaggagagagcgattaactggcatcattatgatgtatttttgtataaatatgtgaaataaatgtattgactaaagcaacgctgataacttttacccttactcatgtggtcattgcctgcttttagatgggcaatcacaattttatggaactgtttgctaacatgttatggcataagataatgtcatgctagggctgaaaaattgtttgttatatgtgaaattatttggcctaatctaatgtaataaatagtgataattacttttaatgaattcaaatggatcatctcgtaaactaagaatactgttgttgttcaattcgttgcatttccgttatcaaaatgtatagtccagattatagatcggcttttatttagacttttaggtatgcattaaaaaaaattagtaaattttgaagatggtaaagagaaatttcctgattgcaaacaaccgctggcggcatctccaaaaatgagatgattttaaaagattcaagattttttgaaaccttattaaaaatatattcaattagaatatgatattggaaaatacgacttgcttgatcaaatcaatatatcatttagatatttgacgtggatggtaatagatgcaaccctcggttttacaaagtccagtggtaatatccagcaagtgaccattctagatattattcttatccaatgacggcgctgacattgattgccctgtcacaaaatgataatcagtgtgcgtctatatctttttacgatatcaggctttatgacatagatacttggggcggaaacattgatttcgatttacgataaaaccccaagacttacgataaaacgttcgagtataaaagaaaaatcactgcccatat

SEQ ID NO: 7820 - DNA, 732 bp, DROSOPHILA
atgatggctgtccgtttgtctctgatttggctgcttctgctgggcacttccattgacgtcacgcgcggaaagcgtttggacaatcgtaaacttttggacaatcgcattgtgggtggccaggaggcggaggacggagtggcaccttatcaggtgtccattcagaccatctggaaaacccacatctgcagcggagtcattctcaacgaacagtggatcctcaccgcgggtcattgtgcactggactttagcatcgaggatctaaggattatagtgggcacgaatgatcgtctggagccaggacagaccttatttccggacgaggccctagtccattgcttgtacgacataccctatgtctacaataatgacatagcgttgatccatgtcaacgagtcgattatattcaatgatcgcacccagatcgttgagttgagccgagagcaacctccggcgggttccacggtcactctgacgggatggggtgctccggaaagtagctatcccacagtgcaatatctgcagaccctcaacctgaccatcatcgcacacgaggagtgcagagagagatgggactttcacgatggcatcgacatcggtcatatttgcacctttacgcgagagggcgagggtgcctgctccggagactccggtggtccactgatgtgggagggcaaactggtgggcctggtcaactggggcagagcctgcggcgtcggcatgccagacatgtaa

SEQ ID NO: 7821 - protein, 243 aa, DROSOPHILA
MMAVRLSLIWLLLLGTSIDVTRGKRLDNRKLLDNRIVGGQEAEDGVAPYQVSIQTIWKTHICSGVILNEQWILTAGHCALDFSIEDLRIIVGTNDRLEPGQTLFPDEALVHCLYDIPYVYNNDIALIHVNESIIFNDRTQIVELSREQPPAGSTVTLTGWGAPESSYPTVQYLQTLNLTIIAHEECRERWDFHDGIDIGHICTFTREGEGACSGDSGGPLMWEGKLVGLVNWGRACGVGMPDM

SEQ ID NO: 7822 - DNA, 3855 bp, DROSOPHILA
ttaaatggccaagatccaaataaaagtcgagataataaggcaaacacgctaacacaaatcgctggcatagtttcatccgccagtttggccaaaagcagcggctgcaagcgccgtttatccggtttttcccaaacattttccattcatgcggccaaagaggaggagcacccatctttccatctttctctgactcgcacgggcaatgcagtgcaccggaaagaaagtggtgcgaattgggatttatagacttactttatagacttacacgtacaaatatacatagatattatattatttaaatacatttttattatattgcttatatattagttcgacttcgatatcatttctgccagtataattatgggctctgcttgatttggcgctcggatgctacggtaaaagttatctttctgtgctttctcctttgattcttgagtttcaacggttccgtttttgttgatctcgttcatcttcttcttcttgcgttctagacgttctcctttgttttttgttcacaacggatttcgtagcaccttgagcggtttaaatatacatacatatgtaatacatacataaatacatatgtagttagtgttttttttcgatattcgtatgcccaaatgttcgaataattagtaggtctcattaaaaacatcacaaattaagagtaaagcaataaaaatatagaaatatgtagtataaaatagtattctaggactaagattggtcatacctgcggtttctatgtgaatatgatgcgatgtgttgcttccccactatctacagggtatcgcactctacgcttacaaagtatgagcctaccaactgaatattcagcgatgtgatcccttttggccaagggtcagcagcgcgattggccggatttcaatattcccgccttgagtccgccgtacttcgcacagaagcacttggagcagcgacacgtgcggattgatatacgacatcgaaaacccgggagaccaacaaccgaaccaccatgaccataccggaagctttcgaggatcaggaaatattcgtgaccggcgcctccggtgggtatttatgactgcctttgcagaataaagatttaaagagaatgtattggtatctctgtgcaggattcgtgggcaaagcactgatcgaaaagctgctgcgctcctgtccaaaactgggccgcatctatgtgctgatgcggcccaagaagggccacacaattgaggagcgcctgcagctgcagtgggaatcgaggttgtatgaacggctgcgcagagaacagcccaatgcccgctccaaactggtggccatagccggggatgtggagcagctgggcctgggcattggcagcgcggatcttgagcggctgcgcaatgtcaacattgtctatcattcggcggccagtgtgcggtgagtacatatgtacatatatacgatccaggttaggatatacaaatcaataatacatcatcttttagcttcgatgatgccctgagcacggccatactactgaacacccgtggcacccacgagctggtcaagttggccctggagtggcccaagctgaaggcattcgtccacgtgtccaccacctactcgaatccgggagttcttgaggtggaggagcgcgtctatccaccgttggccgactggcgtacaactatcaaattggcggagacctacgacgccgagattctggacatcttcaatctcaagtgagtagtggagttgagtggaaaataagatgctatataatatgcaccttgcaggtatggtaactttcagccgaacacgtacaccttcaccaaaagtttggccgagcaggtggtcaatgagtacagggacaggctgcccatcttcatctttcggccatcgattgtggtctccaccattgaggaacccgtgcccggctgggcggacaacttcaatggacccacgggactgctggtggcctgcggcgtgggcatactgcgctcccagaactgtgatcccaatattgtggccgatttcgtgcccgccgatattgtggcccgtacactgatcacctcggtgtacaagttcatgggtgaatcgaaatcgcgggccaaggacagcgatctgtatgtggtcaactgtgccacggcgaatatatcgccgatcaccatgggcgaggtgatcgatatcggtaagacgttcatccgcaagaatccattcgagaagacactctggctgcccggcggcgggatgaccacttgtccggttcttcattttgtgcgggtgagttttggttttgtttatcccaaatgtatattaaccatgttgatactttcagttctgcaccatgcacctgctcatggccatcgtggtggacactttgctgcgtctctataatgaaaagcccttgtaagttgcggcggatttgatgaggaagttaaatgtatatgagaatgccttttccagcctgatgaagctacaacgccgcatattcgccgccttcagtgcgctgcaagtgtttgcgatgaccgagtggcattttcagaacgacaatttccgggctctgcacgatgtagttccggccaacgaagtgtgagtgcccttttaacattacatttcttatagatgtatctcttttcattgatctatcatttaatttcagctccaactttggcttcatgcagcacgccaacatcaactacacggagttcttccagcacggaattcgcggcgccaaggagttcctcctgaaggagagtcccgagagcagcagtgccgcccgttttcgcgtcaagatcttctacgtgctggactttctttgccggggcatcgtctatagcttcctgctgcgcctgatattccgatttctggtgcgattgtggtagcgagccattgaagccaactatagaaatgtagtgcttagtaacatacacatatatatatatattctccggcattggttaattctgtttattgcatttaattgtcacgtattcccttgcatttgtagttaaattaaaatcagaattttataaagctgtgtgggcacattgtatgcgttatgttggcaaaagtagaaatgctaattttaaatatcccgccaaactgtcgctctgtctatgtggcagctctggctacacgccacctggcggctgaaatggcagccacctggtaggtggcagcacacgcagggttgcaccgaaattggcaagaaaacaaaatggaggcgtataatatttttgtttggcatagaatataagaaattcgtattcgtgtgtgcgaacagcgccgtaaacaaaccccgtaaaagcgggcaaaacaaaaagtgcgagcggtcttagaccaaataaagaaatccgccggagtggatccacacgttgccgcatcgttgaaagggtcgcagaaaccggaggtgttccatattcgccacttttttgccaaggcgggcagcttcccccttcccgggaattggcgctaattggattggactggaaagaggaagaggcggaaagaggagagcaggagagggctagggctaggaggcggacgcagagaggacgccgcaatggccaccacccagcagtactcgctgcggtggaacaactacctgcgccacctcacctactccctggacaaccaccggctgaacgatgacttcgtggacgtcagcctgtgcgtggatggacgcaggatcaaggcccacaaggtggtactctcctcctgctcgtcctactttaaggagatattcaaggagaacccacatccgcatccagtcattatatttaagtttatcaagttcgaggatctcaattcgattatcgagttcatgtaccaggtgggtttatatggtatatatataaattgtcagtatcttgatgttcatat

SEQ ID NO: 7823 - DNA, 1485 bp, DROSOPHILA
atgaccataccggaagctttcgaggatcaggaaatattcgtgaccggcgcctccggattcgtgggcaaagcactgatcgaaaagctgctgcgctcctgtccaaaactgggccgcatctatgtgctgatgcggcccaagaagggccacacaattgaggagcgcctgcagctgcagtgggaatcgaggttgtatgaacggctgcgcagagaacagcccaatgcccgctccaaactggtggccatagccggggatgtggagcagctgggcctgggcattggcagcgcggatcttgagcggctgcgcaatgtcaacattgtctatcattcggcggccagtgtgcgcttcgatgatgccctgagcacggccatactactgaacacccgtggcacccacgagctggtcaagttggccctggagtggcccaagctgaaggcattcgtccacgtgtccaccacctactcgaatccgggagttcttgaggtggaggagcgcgtctatccaccgttggccgactggcgtacaactatcaaattggcggagacctacgacgccgagattctggacatcttcaatctcaagtatggtaactttcagccgaacacgtacaccttcaccaaaagtttggccgagcaggtggtcaatgagtacagggacaggctgcccatcttcatctttcggccatcgattgtggtctccaccattgaggaacccgtgcccggctgggcggacaacttcaatggacccacgggactgctggtggcctgcggcgtgggcatactgcgctcccagaactgtgatcccaatattgtggccgatttcgtgcccgccgatattgtggcccgtacactgatcacctcggtgtacaagttcatgggtgaatcgaaatcgcgggccaaggacagcgatctgtatgtggtcaactgtgccacggcgaatatatcgccgatcaccatgggcgaggtgatcgatatcggtaagacgttcatccgcaagaatccattcgagaagacactctggctgcccggcggcgggatgaccacttgtccggttcttcattttgtgcggttctgcaccatgcacctgctcatggccatcgtggtggacactttgctgcgtctctataatgaaaagcccttcctgatgaagctacaacgccgcatattcgccgccttcagtgcgctgcaagtgtttgcgatgaccgagtggcattttcagaacgacaatttccgggctctgcacgatgtagttccggccaacgaagtctccaactttggcttcatgcagcacgccaacatcaactacacggagttcttccagcacggaattcgcggcgccaaggagttcctcctgaaggagagtcccgagagcagcagtgccgcccgttttcgcgtcaagatcttctacgtgctggactttctttgccggggcatcgtctatagcttcctgctgcgcctgatattccgatttctggtgcgattgtggtag

SEQ ID NO: 7824 - protein, 494 aa, DROSOPHILA
MTIPEAFEDQEIFVTGASGFVGKALIEKLLRSCPKLGRIYVLMRPKKGHTIEERLQLQWESRLYERLRREQPNARSKLVAIAGDVEQLGLGIGSADLERLRNVNIVYHSAASVRFDDALSTAILLNTRGTHELVKLALEWPKLKAFVHVSTTYSNPGVLEVEERVYPPLADWRTTIKLAETYDAEILDIFNLKYGNFQPNTYTFTKSLAEQVVNEYRDRLPIFIFRPSIVVSTIEEPVPGWADNFNGPTGLLVACGVGILRSQNCDPNIVADFVPADIVARTLITSVYKFMGESKSRAKDSDLYVVNCATANISPITMGEVIDIGKTFIRKNPFEKTLWLPGGGMTTCPVLHFVRFCTMHLLMAIVVDTLLRLYNEKPFLMKLQRRIFAAFSALQVFAMTEWHFQNDNFRALHDVVPANEVSNFGFMQHANINYTEFFQHGIRGAKEFLLKESPESSSAARFRVKIFYVLDFLCRGIVYSFLLRLIFRFLVRLW

SEQ ID NO: 7825 - DNA, 2869 bp, DROSOPHILA
ttgacacacacacacacaaacccgcaggaaaagagcagttttttcgcgtgtcaaagtgtacatttaattgcaagttaattatactttagacgttcttgccgctcttcaagggccacgccccctccccctcctttaccaaacgatcgccgcccaccacgttggatttgtgtccttgtgttgtgtgcgttgtgttttccgctcttatgtcaaaacataacaaaaaaaaaaaaatgtactatgtgttaaattacaatatttggaacatttcgactagatctccttcttggactcgtccacttccgtttccgctgccattgctgttgcattcaatggcggattttcagattcctcggcatcgtcatcactgacgttctccgtcttcttgccgcccggaacgaaggggcaaacgccgcccttgcactcgaatgggaagtcgggtccctttttgatcacattgccatcgtcgtccttcttctcccagggattccagtagcgcaacaggatcggctgcacaaatttgtgccaaatgtacagaagcagtggaatgataatacagggcacgcaaaccattgttcgggctttaaaaatggttagttattggcgttgcaagtgattacaacaattgcggaacgtacctatttaatgttagcttactggctccggaaaaaaagtatttctcgctttgatttccttaattcaactatttatttattgtcaaaaatgtcagtgtagccagttcacttgtgtttggtattgagcctaaaaacgccacgcatatactgttatcttaaaaaaaaaaaatacgtactctctagcaaagaacgcaaccggttggactaatatagtccggactcgaaccaaaccgtttgaaatctattaacccttatgtgcacaccttagctttttttttgcttttttttttagattttttaacaccatgcgcatttacaatacagttgaaattttgtcatatcatatatttatttcatttgcacagtgcttaacccatcaatgggcaacggtagggaacgccagagcgacaacagtactccctgcccgcctgcagattggtattaacccattgattgtgacagttcttgatgaacaaataggcccgttccttgtgacaatcgtgacccagtgcggagcatactatatttgcggaattcggcagatgttgtacgatctaaaatggacgaaatggtgagttatagagcgcttctcctcatcttttcctcctcgtttccccagtactcaccgtctctaggcatttggtttgacactgcttgcgaccgatggcattgcagggaaacatatgatccaattcctggtggataagtggctttgtcggcaagccatttgggatttgcgaggagaggaagacgccgcatgtgcacggcactggctgattatcctgcacaggcagtcccgctgtcggtggcaagggaatggtgctaaccagactgctgctgctcgatgggtttgtgctcatcagcggactcgcggtggttggctccatcgatcgtgtggatccttccgacgatccgatgatgggtgcctcgccaacggtcgtttcggtggtgccattgttaccaatggtttccgtgctggcttccaattcgcttgcgggcgttgtcataatcacaaactcaacggccgtgggccaatcctcttcggctgttgtgctgctacttgcaacaccagtgctgctcatggtgctggtttccagtttgacgggcttcgtctttatacgcttgtccttgatgatgttgctattgccatagagcggcttcttgtagactatcttggatgcctccaaatggatggctagcagaagtgtcagcagcagcagggaatttttaaaggcgcctgatatatgaaatatatacgatatgaaatgtgttctttagctaatattactttcaaagcttacccatcttggtatctacggaaacactgaatacttctgcctttgcgccatccattttatataagccattttcttacttggcttgcagtttttcaagatttcggtcttccattttagtcggcccccaacgaagttcaagttgtgagaaccggcaaaattgtgtcagggttaagtctgattaagcagaattttcacacaaagcgagtggaattcattcatttggaggaaagtgagaagaaagaaaaagaattacttccgaaaattatgcgtaatcaataaacccaaaagttgtgtcttgagctgcacaaagtttaccttaccgttctaaactactttccaaaatctttttaaatatcccgccaaactgcaatgaaactgttatgattataataacataatggataacataaataaacggccgattaaacagcaattattatccaaattatacaagttataatatggtaatattaacaaacatttcaacataagcaaagctttggtttttaatctaattatagatttaatttaattttcattttttggtttgtttttcgttaagttagtattttttgcgctgtttatggaacttaacagaaataccaatcaatattgggcggccaacatttgaaatataaatacagattatcgatatgtatcttgaacgaagttttaaatgtttgttatttgttaaactcaacaatcctatagatttatgccataaaaatgtcaaaattatcgttgcttcaaatgatttaagtacaaaattcgagtttcgataaacggttaacagtgccgtactcaccacggtgcgcccaacagcacgcacacacagccggctgtggtgggttcgctggacaggcagtgtggtgaatatactagttgctggagcttgccgcaaaaaaaaaaaaaaagaaaacaaaacagatcgaaaaacac

SEQ ID NO: 7826 - DNA, 797 bp, DROSOPHILA
gcgcctttaaaaattccctgctgctgctgacacttctgctagccatccatttggaggcatccaagatagtctacaagaagccgctctatggcaatagcaacatcatcaaggacaagcgtataaagacgaagcccgtcaaactggaaaccagcaccatgagcagcactggtgttgcaagtagcagcacaacagccgaagaggattggcccacggccgttgagtttgtgattatgacaacgcccgcaagcgaattggaagccagcacggaaaccattggtaacaatggcaccaccgaaacgaccgttggcgaggcacccatcatcggatcgtcggaaggatccacacgatcgatggagccaaccaccgcgagtccgctgatgagcacaaacccatcgagcagcagcagtctggttagcaccattcccttgccaccgacagcgggactgcctgtgcaggataatcagccagtgccgtgcacatgcggcgtcttcctctcctcgcaaatcccaaatggcttgccgacaaagccacttatccaccaggaattggatcatatgtttccctgcaatgccatcggtcgcaagcagtgtcaaaccaaatgcctagagacgatcgtacaacatctgccgaattccgcaaatatagtatgctccgcactgggtcacgattgtcacaaggaacgggcctatttgttcatcaagaactgtcacaatcaatgggttaataccaatctgcaggcgggcagggagtactgttgtcgctctggcgttccctaccgttgcccattgatgggttaa

SEQ ID NO: 7827 - protein, 213 aa, DROSOPHILA
MSSTGVASSSTTAEEDWPTAVEFVIMTTPASELEASTETIGNNGTTETTVGEAPIIGSSEGSTRSMEPTTASPLMSTNPSSSSSLVSTIPLPPTAGLPVQDNQPVPCTCGVFLSSQIPNGLPTKPLIHQELDHMFPCNAIGRKQCQTKCLETIVQHLPNSANIVCSALGHDCHKERAYLFIKNCHNQWVNTNLQAGREYCCRSGVPYRCPLMG

SEQ ID NO: 7828 - DNA, 4017 bp, DROSOPHILA
tgtccttagcctcggccatagcggaggagaatgaatccccgagaggtgtctcggttgaacggtgggaactgaagaaggcggcgttggcgaagacgctgctgatttgtttgcctgttgaccgacgagcgacaactgtgctcatttatcagctgccggccaactcaaaagctccgctgcgcacggaaagctttcgcttgcgatcagctgtttttgcagctttgccttttgcgcccgccattcgcgtatgtaaacaacatagcgaaaattgctgtaattgcatgtttttgtcgccaaatgttgcgtattcgcactgatagcaccgcacccaagttcatagtacgtatacgctcaattggcgctgattgccggctggcatatcggcatcgaaatcagagcgctatgtgcacaacatcatgatttggggtcgtcgttgtcaagttcatcagtgaatcgaatgcacaaacatgggtttgaaagtcgaagggttatgattattgctcacagattaggtcgccactcggaaacagctctgctccactggcaatcaaatcgtttcaaagcatttccattccatctggcttattccacatattagttattattaagcgtgtgatgtgtatcttaattgtcatgcaagaaaaacataaataaataatgaatgtttctttgtggaagttgttcttgtaaattttacaacaaatgccacataatattacccttatctttatcgggatattcaaaaacgtttgcgattgcgcaggcgataagaaacaccaataaaagggcacgtaactaccaaataaacttaatagttttatttaaccagctctgttatctataacgtgtaatctttgaaagttttcctagacttaaaatttttcattaaaatgcaatgcaacaaagtgcaaagagcaagtgcaaggctagctattaacttaaacaattcatactggactggtcgtgaagaagtgatgaaaaaatgatggggccagcaggccttaaaacttaacagcaaggccattgtcgaaagaagatcattcctttccaacaacaaggcttataggacggagctggaaacactctcgatgacctcaaacgcattgtctatttccgaactctccagcaaacggttgacagcaatgcgaatgctgggacggactggttggcgttccctgttctgcaggtaggcagcctgtaccacagccactccacgagcaatgcactgggaaaagtgagtagaaatgtatagttttcataattgcatggggaaataaaatgcctaccttatcagccagctctgttagaagtttcagttccttgtcaaagttctcggcgggctgggcaagatacaagtgcttcactggtgacacctcatcgccgcgcagggttagcttgctgaatcgcaaaaacttctggtgcaacgtcttagactttgcctgcagctgctcgaagatttgtggttctcgttcgaaacgatccaacgctgaaatagccgcctgggtgagcatgggcggcagcgaggccgagaagatgtagcccaagccagagaggcgctggtgctcggctatgaagtgcgagccaacacagaagccaccgactgttgccatcgaaccctccatgccggccgatatcagatcgacttcatcacgctaaaagaaaaataccagttataattttagtttttctttccggtttaccacctacatcgacattaaagtgctccgtaactccgtgaccaccctggcccaatgtgccaaaggagatgctttcgtcgatgaacaaacgcagcttgtacttctgacgcaaggccaccaggtcgggaagtgggcaaatctcgcccgtattcatatagataccctcggcgacgaggaagcgacgtgtcttagccgcctttttcggatttttctggtctcgtttttcttgctcaatcagcagacgttctagatcctcaacgtcattgtgcttaaagaaaacgattgtgcttcgtgaagcatccagacccttctgaatggcaaagttgacagcctcatccctacaaataacaagtaattagtcgccaatctgagtaggtgaagtagacaatcctacacaaagataaggtcgccacgtttggcatacgccggaatggcactggccacggtcgagaagccgtaggaatagacaatggcctcctccaggcccatgaacttggcaatacgatcctccaggtccagatgcacgtccatagtgccgtagaagccccgaggtccgcaagatccaactccgtacttgcgcagcgacttgcaggcctcctccagtatctcctggtcctcgaggaagccaagatagttgtgagagccaagatttaggcagtcgtgtccatcgacctggatgcgcttgcccaccctggactgcacaacgcgggtgtgcagcaggggatgattgggatcggtgtcggccaccaagggctctggttcatagtcggcgattattcggtcttcctcctccttggtcagctgtcggcgacgacctcctcctcgtctgtggagcagcaaccaaatcacggttatgagcagtagggtctccaagacgagagcaaacgtgggggtctgtggaaggagtagaaactggagtaagctaaatgtggtgaaaaaggcgaatgcaaacttacgtttcggaaaatactgccgatttcgttgaacaattggatggccaccattttgacagtctggttccgtgccctttctgtgaaaaatcaattgaaaccgccttaattccctgaagttatgtgtcatctagccgacgctttcttatcgcgggtatgccccatacatatgtagaattgaagcattcgaccatacggtacggaaatcttttcaattgggtgtgtatgctgacataggctaattgccagtgggcgaaaaatgtgcaaccacgcccttctccaacattctcttacattaaatatccatttaaatcgagcactcaccacaaaactcagttaactataggcaaaatgcgtgaaatatccgccgaaacagatggatgaacgaatgtactaaaaaataccaatacgcggatatctttaagatgtgcgccaaattggcggcgatggaggaacagtggaatatggaactaggggacgtttttatttattttttgttattcaaaaacctggtcctgtcgacctgtcccgcccacctgccccaccgacctgtcccgccgatctgacccaccgacctgttccgctgacgtgtcccactgacctgtcccaccgagctgactcgctaacaacaaaatacaacaagttacaacagattttaaatttttattaaaaattacctagattttatcaatatttttatgatactgaactcaaataaacttgctacgtaacggttcttttctagttatcatttcaaatatatgatcgattactattttatatcgataggcagagcagcgatcgcagtgtgaccgtgcggtgggaaataacgaaatcgaattcaattcaaaccgccgatccattcagtttccattgaactgctgctgcgatcggtcaaccgatgtgaatgagccgcgttactggcgccatctgaaattcgagttcgcgagataaaaaccgcgagaagacaaagaacaccgcaaaaagccgatgtaaacaaagagatatagttagttctgcattttgcaagaaaactttatcacattacacgcgaatcgaaacggatacttgtatgtgcacaaagtgaaatcagctggacaacaagagtattttgcaattgccttggtttattttcagccacttgcggctgtcgttttctgtgaaattaacacttttttctattggcagtgatgggaagtgtatatttgggtgtacctggctggtagtctagatacaacaatttacgctatgtgtcgcgatctagtctaggtacaagtattcactcttccttgcaaatgtccttgttttaatatatagtaaattctattgcatttcatataattatttactatttacctatatcactattcaat

SEQ ID NO: 7829 - DNA, 1539 bp, DROSOPHILA
tttcggcggatatttcacgcattttgcctatagttaactgagttttgtgaaagggcacggaaccagactgtcaaaatggtggccatccaattgttcaacgaaatcggcagtattttccgaaacacccccacgtttgctctcgtcttggagaccctactgctcataaccgtgatttggttgctgctccacagacgaggaggaggtcgtcgccgacagctgaccaaggaggaggaagaccgaataatcgccgactatgaaccagagcccttggtggccgacaccgatcccaatcatcccctgctgcacacccgcgttgtgcagtccagggtgggcaagcgcatccaggtcgatggacacgactgcctaaatcttggctctcacaactatcttggcttcctcgaggaccaggagatactggaggaggcctgcaagtcgctgcgcaagtacggagttggatcttgcggacctcggggcttctacggcactatggacgtgcatctggacctggaggatcgtattgccaagttcatgggcctggaggaggccattgtctattcctacggcttctcgaccgtggccagtgccattccggcgtatgccaaacgtggcgaccttatctttgtggatgaggctgtcaactttgccattcagaagggtctggatgcttcacgaagcacaatcgttttctttaagcacaatgacgttgaggatctagaacgtctgctgattgagcaagaaaaacgagaccagaaaaatccgaaaaaggcggctaagacacgtcgcttcctcgtcgccgagggtatctatatgaatacgggcgagatttgcccacttcccgacctggtggccttgcgtcagaagtacaagctgcgtttgttcatcgacgaaagcatctcctttggcacattgggccagggtggtcacggagttacggagcactttaatgtcgatcgtgatgaagtcgatctgatatcggccggcatggagggttcgatggcaacagtcggtggcttctgtgttggctcgcacttcatagccgagcaccagcgcctctctggcttgggctacatcttctcggcctcgctgccgcccatgctcacccaggcggctatttcagcgttggatcgtttcgaacgagaaccacaaatcttcgagcagctgcaggcaaagtctaagacgttgcaccagaagtttttgcgattcagcaagctaaccctgcgcggcgatgaggtgtcaccagtgaagcacttgtatcttgcccagcccgccgagaactttgacaaggaactgaaacttctaacagagctggctgataagtgcattgctcgtggagtggctgtggtacaggctgcctacctgcagaacagggaacgccaaccagtccgtcccagcattcgcattgctgtcaaccgtttgctggagagttcggaaatagacaatgcgtttgaggtcatcgagagtgtttccagctccgtcctataagccttgttgttggaaaggaatgatcttctttcgacaatggccttgctgttaagtttt

SEQ ID NO: 7830 - protein, 468 aa, DROSOPHILA
MVAIQLFNEIGSIFRNTPTFALVLETLLLITVIWLLLHRRGGGRRRQLTKEEEDRIIADYEPEPLVADTDPNHPLLHTRVVQSRVGKRIQVDGHDCLNLGSHNYLGFLEDQEILEEACKSLRKYGVGSCGPRGFYGTMDVHLDLEDRIAKFMGLEEAIVYSYGFSTVASAIPAYAKRGDLIFVDEAVNFAIQKGLDASRSTIVFFKHNDVEDLERLLIEQEKRDQKNPKKAAKTRRFLVAEGIYMNTGEICPLPDLVALRQKYKLRLFIDESISFGTLGQGGHGVTEHFNVDRDEVDLISAGMEGSMATVGGFCVGSHFIAEHQRLSGLGYIFSASLPPMLTQAAISALDRFEREPQIFEQLQAKSKTLHQKFLRFSKLTLRGDEVSPVKHLYLAQPAENFDKELKLLTELADKCIARGVAVVQAAYLQNRERQPVRPSIRIAVNRLLESSEIDNAFEVIESVSSSVL

SEQ ID NO: 7831 - DNA, 6639 bp, DROSOPHILA
gttcatccgcaagaatccattcgagaagacactctggctgcccggcggcgggatgaccacttgtccggttcttcattttgtgcgggtgagttttggttttgtttatcccaaatgtatattaaccatgttgatactttcagttctgcaccatgcacctgctcatggccatcgtggtggacactttgctgcgtctctataatgaaaagcccttgtaagttgcggcggatttgatgaggaagttaaatgtatatgagaatgccttttccagcctgatgaagctacaacgccgcatattcgccgccttcagtgcgctgcaagtgtttgcgatgaccgagtggcattttcagaacgacaatttccgggctctgcacgatgtagttccggccaacgaagtgtgagtgcccttttaacattacatttcttatagatgtatctcttttcattgatctatcatttaatttcagctccaactttggcttcatgcagcacgccaacatcaactacacggagttcttccagcacggaattcgcggcgccaaggagttcctcctgaaggagagtcccgagagcagcagtgccgcccgttttcgcgtcaagatcttctacgtgctggactttctttgccggggcatcgtctatagcttcctgctgcgcctgatattccgatttctggtgcgattgtggtagcgagccattgaagccaactatagaaatgtagtgcttagtaacatacacatatatatatatattctccggcattggttaattctgtttattgcatttaattgtcacgtattcccttgcatttgtagttaaattaaaatcagaattttataaagctgtgtgggcacattgtatgcgttatgttggcaaaagtagaaatgctaattttaaatatcccgccaaactgtcgctctgtctatgtggcagctctggctacacgccacctggcggctgaaatggcagccacctggtaggtggcagcacacgcagggttgcaccgaaattggcaagaaaacaaaatggaggcgtataatatttttgtttggcatagaatataagaaattcgtattcgtgtgtgcgaacagcgccgtaaacaaaccccgtaaaagcgggcaaaacaaaaagtgcgagcggtcttagaccaaataaagaaatccgccggagtggatccacacgttgccgcatcgttgaaagggtcgcagaaaccggaggtgttccatattcgccacttttttgccaaggcgggcagcttcccccttcccgggaattggcgctaattggattggactggaaagaggaagaggcggaaagaggagagcaggagagggctagggctaggaggcggacgcagagaggacgccgcaatggccaccacccagcagtactcgctgcggtggaacaactacctgcgccacctcacctactccctggacaaccaccggctgaacgatgacttcgtggacgtcagcctgtgcgtggatggacgcaggatcaaggcccacaaggtggtactctcctcctgctcgtcctactttaaggagatattcaaggagaacccacatccgcatccagtcattatatttaagtttatcaagttcgaggatctcaattcgattatcgagttcatgtaccaggtgggtttatatggtatatatataaattgtcagtatcttgatgttcatatagttcattccacaagagatcttacctgaaacgtatcaactaattccacttctgttttagggcgaagtcaatgtgcagcaggaggcgctgcaatcgttcctgcaaactgccgagctgctggccgtccaaggactcaccgccgaggagaaggagaagccgcagatcccggtggcgccgctgatcagcgagcacaagctgatcaagaccataccgagcaccatacgcgcggtcaacgagcagcagcagcaggtgtccaatgtggcccaggcgcagacagctacgcaaaccatcgaaatacccgcggccactttgctgcaagccaccaacgccagccaggtgccatcgcaggtggtcgcagcagccgcagcagccgcagcggcacaacagctgcaggtccagcatcaacagcagcagcatcaccatgtacaaaccacccagattcagcacatccaagtgcaatcggcaccgcccccgcaacagcagcaacagcaacagcagcagcagcagcagcagcagcagcagcaacaacagcagcagcagcagcaatcacagcagcaacaaacgacgcccgtgcagacgcaacacctgaccatcaccaatgcggtggccctgccggcggccagttcggttaagaagcgaaagatcacgttctcggacgacgacgacaacatgtacaccaccgaaaccgttgactacgccgtcaaggatgagcagaccatagtgaaaagtgagtctggagtggatgccaccatgtttagacatcattttaataatatatttcgatgtttttttttttttttagctgccgagatgactttcctgcgcggcgccgtcaagatggacatacccgattacattgttggcgaagtggatgaccgcctgtcggatggagcaacgccgcaaacgtcgcaggatgccaccaccgcagcggcgcagaatgtggcgcagtactcatccgagtatgaaatactcaccgagtccgaaatggaggagaagtaccaggcggatgcggacaacgccgaaattgccattgagatgagtgagttatatttgggctattcatatataaccatgattattcaatcgatttatccattgtagcccgattgctgggcaccgccagcgggacgccgggtgcgggttccggccaagtgatggaggattcgggtggcggcagcgcgacgactggtccctcgactacggtgtctgtgacgcaggtcaaatcggacagcaaggccagcgggacgaatggtgagtagtatccgaacaactgacttgggtttaaggtgtttttttttcccccccatttaaagatatatttttattacatgaattgaagtgatgcagcaatgcatgtacatcgaacataagtgcattttctttacttatttcataagtttgtactttatttagtttgtactttcatgtcttcaatgttgaccatattttatggtccattcgttttttttttatctgttaaatgttatgttaatttaactattagttgttgtggtttgtcgaatatgtctccaaatgaatggtgtgttctgcccagagatttaggacgtaagcagcaatcgagactgttatactgattgtacgtattttctgtatatttttagattcgcccaataataagtggacagaatgtcagttttgcaaaatggttataaccacggttaatctttggagacatattcgcacccaacataccccacaaccgccgcgcaaatgcgacatgtgtaataagaattttaagaacaagtacagtctgcgggagcacatacgcatctcgcacgaacagaaagtggccatcaagacggagaactgatgcgtcttcataagtctcggtcgcctgcgagccgcatctggatctgcaactgcatctggattgagatcgataggatatacggataggggagagagatatagttaattacgtccagcttagcgagcagccagcaaaaccaatcaacccaaccagcccattccctcgtgtttcgatcaaaggccccaaaacgaaaactagccaaatttgtcaacttaaatgcaaagcagataggagtacgaaacgtttatccctatatagttctatatataacaccttgatagccactaagtcgagtcagtcagtcagttagtcagtcggtggagagtggagctggtgatcccgtcgttgaccaagccatgtcatgtgtccacgtaatgcgtacatgtaccacttgtattttatagtctaccatttgctttaggtacttcttcattatacagacggcaagttacaagccctcgaaatccattgacacaccacagaatgtatataaacacacacacacacacacacaaacacacccaagatgacaagaattttggaagatttgagagcactttggatgcttaatagcttagatcgagtgatactatgtgcaagagaacagaacacaaggatttaatttgattgtagaaaactaatgttatacttagcccatatcgatcactttattttagctcttaaacaacctcatatgtattttttgaaactctgatattattcagtttttgtatatagagctaggcaacttaacctaaattaaggtaaacccaaaaacaaagtcccccctccatgagattctctgcccaatttgattccgcaggaaggaagctgtgtactttgctcacaagcagagatcaggagaatatgagaaaatatatatattaccccttgtgtacaaatttaaatacgatttaatccaattacccggcgcgcttttgaccatctgtgttcagcattagagcgttggcagttgactgtaaattagctaaattagttttagtttagtttaagacaccacaaattcgattggacatagtttagttattcggtgtaacttaattgagtataccagcccacacgagccaagtgaaaacggaagtcatagcgcgataagttgaaagtattttcaaaaaaagaaagcgaagaagaaaagagaaaaaaaaacccgtagaaatcctctccaagacaaactcaaagcccatacatactaaagataatctagttaaatgaaacaactcatacgtattacttatcgatctatgtatacacatatatagttaacgttatatctctccatactccataccatgcccaaattgacttcactcccggccgccggccgtaatcctccagaagaaccacccaccaacccactagattcattcaacttcgtcaacgctctcaaagaattgagaatatatcaacgaagcaatgggattacggccggaatgggttaacgggtcagttggggcaactggatggatggatggataactagctgagattccaattccaccccaaacacacaactctaagtctaagccattctgtacgtagattgatttacacgcgtcaacgaaacggtactaaattaatcaatttaattcgagaaagagaacgagatagctgcagtgttggcgaaaaagagcgggagagaaaataaaatcatgtaaaccatttaaacgcaaatgaactttattctcaatgggcgcggcaaaaaaaccttcttgtgtccaacgatctcattaaaaaccaactctctctctctctctctcttgcagccgctttgaagccaggatccgtgacggttgccaggtcgtccaagagtggagcaactgcatccgcgccaccggctggcagcgatgaggagagcgtccagtataccggcctcgcaccgctgaactgcagcttctgcggcaggccgctcaagtcggtgaacgcgctgcggcgacacatcgcctccaggcattcggagattcagggcaaggagcacgagtgcttcatctgcatgaagagcttcaagacaaagtggtccctctccacacacaactcgcgttttcatcgcgaaatgggctgttcgaccaagggattcaccaagatcgagtacagcgatcactgagacagcggtatgccattaatgtatcatttagtacgcccaactatctgcacatgaccactgctgccttcatggctggctatcatttagaggagttgaattgcaggcaagcagggcatttggaaactaacaccatagttaccaaggatacttatgcccattgattagcaattgttgcaaagatacttaaatacatttattgaattcccttgcatcatctgaaacaaaccactcatctcgaataacaaagcattgtttcgtgtaaatactagatactccattccaaaaataaaactccatagctatggtatgtaaactgaaatgcgtttaatggcttaactactaattcccacttatgatattaacaagcggacttttcgaggatgtaaatcgtaaggcgaacaaaagaaaaagggacaaacaaagcaggcagcacctacagggtctccaggccgggcagcgggaatttcctgctgaactgggccacattcttgcggatctcgtccacctgggccttgagctccacattctcggccagcgtcttgtggtaatcggttatcttgggactgccggccagcttggctgcctggacgccaacctttagggcagcatcgatgaaggccaccacctgctcgatgtcctgctcggcaaggccgcgagtggtcagggccggtgtgcccagccggatgccggagggattcatggcggacttgtcgccgggcacagtgttcttgttgcacgcgatgcccacctcctcgaggatgtactcggccttggcgccggtcaggccagccttacgcacatcgaccagcaccaaatggacgtcggtgccgccggtggccacctgatagcctcgcgaaatgaggccatcgcacagggccttggcattcttgagcacctgcgtctggtaggccttgaattcgggactcttggcctgcttgaaggcggtggcaatgccagccacggcgttgttgtgcggaccaccctggagtgatggaaacac

SEQ ID NO: 7832 - DNA, 2029 bp, DROSOPHILA
ccgaaattggcaagaaaacaaaatggaggcgtataatatttttgtttggcatagaatataagaaattcgtattcgtgtgtgcgaacagcgccgtaaacaaaccccgtaaaagcgggcaaaacaaaaagtgcgagcggtcttagaccaaataaagaaatccgccggagtggatccacacgttgccgcatcgttgaaagggtcgcagaaaccggaggtgttccatattcgccacttttttgccaaggcgggcagcttcccccttcccgggaattggcgctaattggattggactggaaagaggaagaggcggaaagaggagagcaggagagggctagggctaggaggcggacgcagagaggacgccgcaatggccaccacccagcagtactcgctgcggtggaacaactacctgcgccacctcacctactccctggacaaccaccggctgaacgatgacttcgtggacgtcagcctgtgcgtggatggacgcaggatcaaggcccacaaggtggtactctcctcctgctcgtcctactttaaggagatattcaaggagaacccacatccgcatccagtcattatatttaagtttatcaagttcgaggatctcaattcgattatcgagttcatgtaccagggcgaagtcaatgtgcagcaggaggcgctgcaatcgttcctgcaaactgccgagctgctggccgtccaaggactcaccgccgaggagaaggagaagccgcagatcccggtggcgccgctgatcagcgagcacaagctgatcaagaccataccgagcaccatacgcgcggtcaacgagcagcagcagcaggtgtccaatgtggcccaggcgcagacagctacgcaaaccatcgaaatacccgcggccactttgctgcaagccaccaacgccagccaggtgccatcgcaggtggtcgcagcagccgcagcagccgcagcggcacaacagctgcaggtccagcatcaacagcagcagcatcaccatgtacaaaccacccagattcagcacatccaagtgcaatcggcaccgcccccgcaacagcagcaacagcaacagcagcagcagcagcagcagcagcagcagcaacaacagcagcagcagcagcaatcacagcagcaacaaacgacgcccgtgcagacgcaacacctgaccatcaccaatgcggtggccctgccggcggccagttcggttaagaagcgaaagatcacgttctcggacgacgacgacaacatgtacaccaccgaaaccgttgactacgccgtcaaggatgagcagaccatagtgaaaactgccgagatgactttcctgcgcggcgccgtcaagatggacatacccgattacattgttggcgaagtggatgaccgcctgtcggatggagcaacgccgcaaacgtcgcaggatgccaccaccgcagcggcgcagaatgtggcgcagtactcatccgagtatgaaatactcaccgagtccgaaatggaggagaagtaccaggcggatgcggacaacgccgaaattgccattgagatgacccgattgctgggcaccgccagcgggacgccgggtgcgggttccggccaagtgatggaggattcgggtggcggcagcgcgacgactggtccctcgactacggtgtctgtgacgcaggtcaaatcggacagcaaggccagcgggacgaatgccgctttgaagccaggatccgtgacggttgccaggtcgtccaagagtggagcaactgcatccgcgccaccggctggcagcgatgaggagagcgtccagtataccggcctcgcaccgctgaactgcagcttctgcggcaggccgctcaagtcggtgaacgcgctgcggcgacacatcgcctccaggcattcggagattcagggcaaggagcacgagtgcttcatctgcatgaagagcttcaagacaaagtggtccctctccacacacaactcgcgttttcatcgcgaaatgggctgttcgaccaagggattcaccaagatcgagtacagcgatcactga

SEQ ID NO: 7833 - protein, 553 aa, DROSOPHILA
MATTQQYSLRWNNYLRHLTYSLDNHRLNDDFVDVSLCVDGRRIKAHKVVLSSCSSYFKEIFKENPHPHPVIIFKFIKFEDLNSIIEFMYQGEVNVQQEALQSFLQTAELLAVQGLTAEEKEKPQIPVAPLISEHKLIKTIPSTIRAVNEQQQQVSNVAQAQTATQTIEIPAATLLQATNASQVPSQVVAAAAAAAAAQQLQVQHQQQQHHHVQTTQIQHIQVQSAPPPQQQQQQQQQQQQQQQQQQQQQQQQSQQQQTTPVQTQHLTITNAVALPAASSVKKRKITFSDDDDNMYTTETVDYAVKDEQTIVKTAEMTFLRGAVKMDIPDYIVGEVDDRLSDGATPQTSQDATTAAAQNVAQYSSEYEILTESEMEEKYQADADNAEIAIEMTRLLGTASGTPGAGSGQVMEDSGGGSATTGPSTTVSVTQVKSDSKASGTNAALKPGSVTVARSSKSGATASAPPAGSDEESVQYTGLAPLNCSFCGRPLKSVNALRRHIASRHSEIQGKEHECFICMKSFKTKWSLSTHNSRFHREMGCSTKGFTKIEYSDH

SEQ ID NO: 7834 - DNA, 8363 bp, DROSOPHILA
ctacttacctctcaacggttctattcgcagataatagatgcgcacattttatatgttactttattaagtatgcctgtacataaatgtgtgctgtaaataaatatatattacgtcaatttaacaatccaatcccccagtttaaaatgattcagcgtcgttggcgagtctgttgtttaatacttttctttattgcttagatctaacattgttcaatcaaagcttgtttattatttcgaatctgctataatctagactaatgtcaatgtgttcttagtttccttctgggcacggctgcccttaacaaaaagagaccaatcttcgaatgttattccgtatgagtttttctattcgtgggttttatgttaaatacacttgggtagaacgatcgattgcttagacggtatgttacgagctatgaatatttatttagcttttgtttgtttttcagaatgaaaactaataacttagcgtagttatgcgtttaaaaggaattcactatgttaagataataaataaataggtggaaaataatggtaaggaataaaggccgagctctgtttgtccagtcaaggtggcacctaaacgacctaaacgacaagataaaataaaacttttctgattcgcaagcggcaggaaatgtaaatttaataagtataggaagcatttagtggtttattgatcacgtattgtatatgatctcattaattgtctaatataattaagtttactttttgggcgaggacagaacacaaatcatggcccatacaaacaacgaactttaaatacattcaaaaatgtaagggaaacaattagaaaactgcctttcgaccaatcatctatacagtacgtatatgtacaaacatcgttacaaatcaattgcaaaggcaaagcaatacaattatcaattactaataatctgagtatatttgagctcgttatggcggtgtcgccctgaactggacacggagttattggaccatagtctgtctatttacactcgctattgcgacgaccattcgttgacggggtaagtactaccgatgtacgatggctgtcgcatagactcgcttgacgctggtgaggagttaacaaccgaactccaatgttgccgggggaaaacattcgagttcacgtaggacgacggagcgccgatgtaggacgccggtggatgcaggttggaatggtacggtgcgaaatttagattgccgtatgaggtgtagttattaatgtggtagccggaacctggtggtgcggacttgtgcttattgtcgtagtagtcgtagtactggggaggatatgtgtgctgaaagggcttgggctggaagtacgaactatccgctggcggcggtgcctcggagctgtttggagctcccggatgcggcgggagcggcacattgggctgaatactattagcgttgctgtaaccttcgccggcggccggcaggtggttctgatgcttgtatgccggcggcggtggctgctgcgctggttgctgctgcgacgcttgctgctgcggctgttgatgggactgctgtggctgtgagtatgttaggtcggatggcagctgatgctgattggttgtggtggctaatgtagtattaggttgcgtctgcgacttaaaatgttgcacgttctccgtggattttctatccttggcaggcatttctggtcggctagttgtcgccggattggattccttgtttttcaccacacgaggctcgtcatcagcagtcagatcttttacatctgaaagaagatattaacttttaaccaattgtatgttaaaaactcgtaccttcctctggagattggggctttgtggtatcggtgtcaccatcgtctgttatgtcaatcacatcgtccttatttgtcttttctggttcagttttggccgtggtccttatagctatgatcttcccgctgtccaactgcatgtagattcccttcgccgacttcagaaccatcactctctgacctgcctttagaattatattggccttatcggccgaatttgtgggaatgacaacatctgaaatatatgtgaattagaatatctggagttcattggcaatcagatgcgttttaccaagaggcaaggtcatttcttgggcagtcatcccctgtctttgccaaacgtcagccggaatccatcgcgttgatcggcctccagttgaggacgatgtattggtttttatttgctatggattagtaaaacaataacttaaatcccttgtaatagggcacctatctgcaaatagcttacctggttcattggtttggtaatcactgttccgtcgttgttcacgatcttgtaattcattttcgcaggtgcataggtgaatctctgattgacggcagctttcttttccagctcgtagcttcgatgagcttgtcttttttcagcttgcgacagctttctgtccttctgatcgaccaacaaactctcgtgcatgaatggttcctttgtaacgcagtgcctgtgcatgtcgagaatagtgtttattatgccgtcgacatggacagcatgctcctggccatcgttcttttcggtcttgattggcgagtgagaggcaccgtttggtgatttaggcgtattttgatcgtctagtggcttcgtgggtccattatttgatttattcgacgcgtttggcgacatatttgcacttcctggcttgcttccttcctccgacggcgagcctggcttacttaaatcgcctgtagatttattcacctcctcgacagtgtcttcatcagagtcgtagtcctggcacagatttgtgatatccttcatggagagatgcgcctcaggattgcattcatcgactattctatcggacattccttgtttcttgatctgccgatcgtaaatctttttctccagacacctgtccattacgattcggtacacaaagcacggctttgtctgaccgtatctgtagagtagggtacgtttaattaaacataatagttatatgaacaacctattattatcttacctataaatcctatatacagcttgtgtatcgtgacagggattccaactagcatcgaatattataacgcgattcgctccggtgaggtttatccccaatgagccggctcttgttgatattaaaaaaagcttaacattactatttgcattaaattcattgactagcctttccctttcctgcgaggaagtagaaccatccaaacctggaaccaaagttatacagtgttagagccattccgtaaggcagttgtgcatacttacgaaaataagagctgtttttagtccaaagttggttgctaccaggaacataactagatttcagatagacttcgagtagatttaaggttaaaagactttggctaaacaacagaatacgatctcccaaattcaggctctctttcaggatgcagaagaatatctccattttgggcgaattcgatattaggccagacacgtagttcttcatcaaatccacagcccacgaacacgaaaactcttcgtttcgctgcttgctcttcagtagctttttaaacggctcggcagcagcaacgccacttgagtttttactgcccgcggcgttccattcacttggtttgccagcgttgcacccattatccagttgattgttggaacacggcgcttgtatcgtcgtttcgacggtttttatttcgtttgtgtccagatccacgatctccgaagaccccgtaatactttcaaagttgctcgacatgttcgtgtccgtttgcttaatgacttccacgcatcccggcttgggtagaatactggaatccatccagtagttgttcttcccctcactgccgaaagatccataattaagtggctcaggtttttcgtcgtagaagcttggactgcaacaaaatattcatataaagtagtctgcgtatatcgtatgtgttttctatccaataacatacctcttgttcaaatatttagcattcaaatccgatgatgcggggatgttgaataatgtttgattctcggctttggaaaacgtttcgatactattgatcggatccccggatccattgattttcttctcgagaggcgatgccaaactcaaggaagaatctgcacttggctccacaatgggcgtggcagcgcccttggtaacctcctcgtcgatttctaaatctaaatcagtctcacattttttcagaaaattatacagaacgtctggatggttccagattttacagcaaacagcaaaggccttcagcggatttggaaaggcctttgtgcgcaccacatccgtcatgaaggtgtcgtagagcttgcgctgaaaggcggtcattttgaccaggatgacatactcgtacttctgaggcagcgtcagctgcagcacagtgtgcgatcgccgctgaacgaatcccagcagcagggagtgcagcacgtgcgccctgtagcgcattagcttgatgtcatcgggcgtggagtccacgcactggccattctggatgggacgctcgaacatgttgcagaactccgtgcgggtgcccaggtagttgggtcgcacaaagtccaccatgcaccagtactcgagcagattgttctgcaaggggtagccggtgagcacaatgcgacgccgcgtcctgatctccttcagggccagcgagatgccggcgtgggagttcttgatccggtgtccctcatcgcagattaccaggtcaggtcccggcttcaccaaggcctcgtataccagattcatgagatcgctgctggagtccatgccgtcgggccggatgacgctaccctttcgcttgcgcgtcttcaccagcttgagagccagcagtcggaacagctcgtagccgatgaggagcacacctccatcgtgcacccaattgaggatcaccttcgcccgagccgtcagcgtcttctgctggtcgttcagcacgaagatgtcaaagttgcgggggcgaacattgctgtccgtcgagtagcgcggaatccacatgttgaactcgcttagccaattctgcagcgtgttgatgggcatcacacataacactgtctttgccgaggtatgtctcaggaaaatatcacagaaggaaacaacctgcaacgtcttgcccaggcccatggagtgggccagaatgcagccgaacccgctcgatttgttgtacctccgtgtggattcgatgatgttgtcgtacagaaagcggacgccgccgatctggtgcggctttatcactttcgctatctgcggggccaggtacagggtctcctcgccctccggatgcgccatgttgaccaccacctgtccgttctcgtcgggaacattgtatatatctttgacatgcataccgctgttggtggcatcgtccgactcgtttaaatcctcgtcatcttcctcctcctcctcctcggagagaaggatgcagtcgtcgtcggagctgtcgtctattgtgaccacctcgctgggctgcacgctggctcccttgtgcaggacgtcctcaatgctgccgccactcaggctgctgctgttcgaatcgtcaaacgtgtccgaggcgatctcctcctccggaaagtcgacgggcgggtggtgctcgacgggattggccacggcacagctctcgatgccttcgctttcgtccagctgcaggatgcggaagatctgcttgtgcaccacctgcttctggatctcgcgcattgacttctgttgaccagcaacgcgagccaagcgttccgattcctctcgctgggccgccagcgtggttgtgtccagattgttctcgttcatcacgtcgcggatgttcttccgcaggtgactgttcttcttctcctcggcggccgccatactgagtttcttgtttgccgcctggtcctctcccgccgagttcttgcgcttgtggccataaggtactgtgtttttggctacctcggccaagggattaatgacccggtcaggctcgacgggctggcttgtctcggggcagtattctggcatcttaacgggaacttccatagtcccttccatgggtgtggatatgggtacgggaatgggaggctgtatctgtgcctgtggatgttgttgcggctgcagctgtggcggttgctgcgtctgttgctgtggatgttgctgcggctgttgctgtggatgttgctgcggctgttgctgcgaatgcagcggatgctgcggatgctgctccggatgctgctctggctgctgctgcggatgttgctgtggctggtgctgtgggtctgtggaggcattgtggaagtaccgcctgggatcatccggatacatcatggagggatggaactcattgacgtgcggccaaccctccggcttttgtagtctttggttaacatcgtaatttgggtttgactcttccatgttggcttctggattatccctgtggaagcgagaggttgattatttagccaaatccttttggaagagttttctattttctacacccaagtggaaaaccgacttatcccatcgctaacagaggtcacgaaaccaattaacaaatctttggggacatggggcgttgtaatatactggatctgctcactacgcagggaggcctgtatgtatatcggaaggtattaacccattggacaaactcctatttacctggcacggataacccttggctgttgacactttcggaagcacttttgcacactgacatacatacactttaatacctgtccgacttttgctggattatacaaggaaggatttacttttagggggccaaatataaatgtaaccaactgagtggtaactagacgatcgtagtcctgcaattgcaagctggattagcacttttgaccacgattctccctttgcagtccacacatgtatgcacattacatactcacataccaagtacatactgaaatcgtaaccgggccggattttggcctcctaagtggcccataagtgggctattagtggtcttcttcacagaacatctttcaatgatcaggacaaggacaactagaatcggatcggttcggcggagttataattataaatactaatttaattatatatgcacattcaaggggggaatgtttcctgaattacaagcagaatttttcgtttttagttcgggcaccatcaatcttacatacatttacatgcagccggcgaacggggttttcagataaaagaattaacaacgcaggttcttaattattgttattttatacatatggatatttttctatgtgcacgattgggaggttctcttaattggtgaacgttcttgagatacttggcttatcgcgtgcgccactgtgattgcgaggaccaagtccttccgattgttattatattaatttaaaatgttattctcgatttattttctcgctgttttcaacatgtacgtttgtatataatgtatacattactctacatagatatgaacaaagttttgcccagctgaacggtcagactgcacgatgaatgaccgataggtggggctctctacacgactcagcggcgatagttatcggaaatcgaacaataaactgttgaatttaagtacttgaatttagtactaagaaatgttgattggtttcattcaataaaaacctatcatgctaaattgtcattgcagtagttgtttccttttttcctaaccaaacatattaaataggaaaggaatatattgcatcaaacaattatgtatcttaatgtggctaatcagaagtcttttattaaaccagaccgtaattataaaaaatatcgatacccgatccaaaaaataggctgaaatgaaccagttagaagcagaactcgacgtatagcggtgccaaggaaagtgcggtcacactgcaaggacattactaagtatatattttatgtgttattaaggttgtgttttcctgataaataactgcattgtgatactcgattgctcgaatgatggtaattattaggttgcagctaaaggacatcgtattaaccatttgtcctttctgccagtgccacatatcaaactggagttccctgaaaatagtgctggcctttctctcggtcaacatcttctggctcctgaaggtgtatcccccggcaggagatggtgcgcagaggtgtccgcccactccccaaagtcccgtggccgtagagtgtccctagcattcggatatcgcctatgcgctgctccagccgcttaacaacatggacggcttcgtggtcccgaacaactccgcgtctctggccttcgataacatcaacttgagctacggccgctgggacaaccagctgctgtacaggatcaaagactttgctctgctaggcgagcagtacgtagactcctcggagggcagcttggtgtgcctggccacccagacttcagtggagcgcctcaactcgcttccccaggtggcagcc

SEQ ID NO: 7835 - DNA, 4888 bp, DROSOPHILA
tatacaaacgtacatgttgaaaacagcgagaaaataaatcgagaataacattttaaattaatataataacaatcggaaggacttggtcctcgcaatcacagtggcgcacgcgataagccaagtatctcaagaacgttcaccaattaagagaacctcccaatcgtgcacatagaaaaatatccatatgtataaaataacaataattaagaacctgcgttgttaattcttttatctgaaaaccccgttcgccggctgcatgtaaatggataatccagaagccaacatggaagagtcaaacccaaattacgatgttaaccaaagactacaaaagccggagggttggccgcacgtcaatgagttccatccctccatgatgtatccggatgatcccaggcggtacttccacaatgcctccacagacccacagcaccagccacagcaacatccgcagcagcagccagagcagcatccggagcagcatccgcagcatccgctgcattcgcagcaacagccgcagcaacatccacagcaacagccgcagcaacatccacagcaacagacgcagcaaccgccacagctgcagccgcaacaacatccacaggcacagatacagcctcccattcccgtacccatatccacacccatggaagggactatggaagttcccgttaagatgccagaatactgccccgagacaagccagcccgtcgagcctgaccgggtcattaatcccttggccgaggtagccaaaaacacagtaccttatggccacaagcgcaagaactcggcgggagaggaccaggcggcaaacaagaaactcagtatggcggccgccgaggagaagaagaacagtcacctgcggaagaacatccgcgacgtgatgaacgagaacaatctggacacaaccacgctggcggcccagcgagaggaatcggaacgcttggctcgcgttgctggtcaacagaagtcaatgcgcgagatccagaagcaggtggtgcacaagcagatcttccgcatcctgcagctggacgaaagcgaaggcatcgagagctgtgccgtggccaatcccgtcgagcaccacccgcccgtcgactttccggaggaggagatcgcctcggacacgtttgacgattcgaacagcagcagcctgagtggcggcagcattgaggacgtcctgcacaagggagccagcgtgcagcccagcgaggtggtcacaatagacgacagctccgacgacgactgcatccttctctccgaggaggaggaggaggaagatgacgaggatttaaacgagtcggacgatgccaccaacagcggtatgcatgtcaaagatatatacaatgttcccgacgagaacggacaggtggtggtcaacatggcgcatccggagggcgaggagaccctgtacctggccccgcagatagcgaaagtgataaagccgcaccagatcggcggcgtccgctttctgtacgacaacatcatcgaatccacacggaggtacaacaaatcgagcgggttcggctgcattctggcccactccatgggcctgggcaagacgttgcaggttgtttccttctgtgatattttcctgagacatacctcggcaaagacagtgttatgtgtgatgcccatcaacacgctgcagaattggctaagcgagttcaacatgtggattccgcgctactcgacggacagcaatgttcgcccccgcaactttgacatcttcgtgctgaacgaccagcagaagacgctgacggctcgggcgaaggtgatcctcaattgggtgcacgatggaggtgtgctcctcatcggctacgagctgttccgactgctggctctcaagctggtgaagacgcgcaagcgaaagggtagcgtcatccggcccgacggcatggactccagcagcgatctcatgaatctggtatacgaggccttggtgaagccgggacctgacctggtaatctgcgatgagggacaccggatcaagaactcccacgccggcatctcgctggccctgaaggagatcaggacgcggcgtcgcattgtgctcaccggctaccccttgcagaacaatctgctcgagtactggtgcatggtggactttgtgcgacccaactacctgggcacccgcacggagttctgcaacatgttcgagcgtcccatccagaatggccagtgcgtggactccacgcccgatgacatcaagctaatgcgctacagggcgcacgtgctgcactccctgctgctgggattcgttcagcggcgatcgcacactgtgctgcagctgacgctgcctcagaagtacgagtatgtcatcctggtcaaaatgaccgcctttcagcgcaagctctacgacaccttcatgacggatgtggtgcgcacaaaggcctttccaaatccgctgaaggcctttgctgtttgctgtaaaatctggaaccatccagacgttctgtataattttctgaaaaaatgtgagactgatttagatttagaaatcgacgaggaggttaccaagggcgctgccacgcccattgtggagccaagtgcagattcttccttgagtttggcatcgcctctcgagaagaaaatcaatggatccggggatccgatcaatagtatcgaaactccaagcttctacgacgaaaaacctgagccacttaattatggatctttcggcagtgaggggaagaacaactactggatggattccagtattctacccaagccgggatgcgtggaagtcattaagcaaacggacacgaacatgtcgagcaactttgaaagtattacggggtcttcggagatcgtggatctggacacaaacgaaataaaaaccgtcgaaacgacgatacaagcgccgtgttccaacaatcaactggataatgggtgcaacgctggcaaaccaagtgaatggaacgccgcgggcagtaaaaactcaagtggcgttgctgctgccgagccgtttaaaaagctactgaagagcaagcagcgaaacgaagagttttcgtgttcgtgggctgtggatttgatgaagaactacgtgtctggcctaatatcgaattcgcccaaaatggagatattcttctgcatcctgaaagagagcctgaatttgggagatcgtattctatacggtcagacaaagccgtgctttgtgtaccgaatcgtaatggacaggtgtctggagaaaaagatttacgatcggcagatcaagaaacaaggaatgtccgatagaatagtcgatgaatgcaatcctgaggcgcatctctccatgaaggatatcacaaatctgtgccaggactacgactctgatgaagacactgtcgaggaggtgaataaatctacaggcgatttaagtaagccaggctcgccgtcggaggaaggaagcaagccaggaagtgcaaatatgtcgccaaacgcgtcgaataaatcaaataatggacccacgaagccactagacgatcaaaatacgcctaaatcaccaaacggtgcctctcactcgccaatcaagaccgaaaagaacgatggccaggagcatgctgtccatgtcgacggcataataaacactattctcgacatgcacaggcactgcgttacaaaggaaccattcatgcacgagagtttgttggtcgatcagaaggacagaaagctgtcgcaagctgaaaaaagacaagctcatcgaagctacgagctggaaaagaaagctgccgtcaatcagagattcacctatgcacctgcgaaaatgaattacaagatcgtgaacaacgacggaacagtgattaccaaaccaatgaaccagcaaataaaaaccaatacatcgtcctcaactggaggccgatcaacgcgatggattccggctgacgtttggcaaagacaggggatgactgcccaagaaatgaccttgcctcttgatgttgtcattcccacaaattcggccgataaggccaatataattctaaaggcaggtcagagagtgatggttctgaagtcggcgaagggaatctacatgcagttggacagcgggaagatcatagctataaggaccacggccaaaactgaaccagaaaagacaaataaggacgatgtgattgacataacagacgatggtgacaccgataccacaaagccccaatctccagaggaagatgtaaaagatctgactgctgatgacgagcctcgtgtggtgaaaaacaaggaatccaatccggcgacaactagccgaccagaaatgcctgccaaggatagaaaatccacggagaacgtgcaacattttaagtcgcagacgcaacctaatactacattagccaccacaaccaatcagcatcagctgccatccgacctaacatactcacagccacagcagtcccatcaacagccgcagcagcaagcgtcgcagcagcaaccagcgcagcagccaccgccgccggcatacaagcatcagaaccacctgccggccgccggcgaaggttacagcaacgctaatagtattcagcccaatgtgccgctcccgccgcatccgggagctccaaacagctccgaggcaccgccgccagcggatagttcgtacttccagcccaagccctttcagcacacatatcctccccagtactacgactactacgacaataagcacaagtccgcaccaccaggttccggctaccacattaataactacacctcatacggcaatctaaatttcgcaccgtaccattccaacctgcatccaccggcgtcctacatcggcgctccgtcgtcctacgtgaactcgaatgttttcccccggcaacattggagttcggttgttaactcctcaccagcgtcaagcgagtctatgcgacagccatcgtacatcggtagtacttaccccgtcaacgaatggtcgtcgcaatag

SEQ ID NO: 7836 - protein, 1534 aa, DROSOPHILA
MEESNPNYDVNQRLQKPEGWPHVNEFHPSMMYPDDPRRYFHNASTDPQHQPQQHPQQQPEQHPEQHPQHPLHSQQQPQQHPQQQPQQHPQQQTQQPPQLQPQQHPQAQIQPPIPVPISTPMEGTMEVPVKMPEYCPETSQPVEPDRVINPLAEVAKNTVPYGHKRKNSAGEDQAANKKLSMAAAEEKKNSHLRKNIRDVMNENNLDTTTLAAQREESERLARVAGQQKSMREIQKQVVHKQIFRILQLDESEGIESCAVANPVEHHPPVDFPEEEIASDTFDDSNSSSLSGGSIEDVLHKGASVQPSEVVTIDDSSDDDCILLSEEEEEEDDEDLNESDDATNSGMHVKDIYNVPDENGQVVVNMAHPEGEETLYLAPQIAKVIKPHQIGGVRFLYDNIIESTRRYNKSSGFGCILAHSMGLGKTLQVVSFCDIFLRHTSAKTVLCVMPINTLQNWLSEFNMWIPRYSTDSNVRPRNFDIFVLNDQQKTLTARAKVILNWVHDGGVLLIGYELFRLLALKLVKTRKRKGSVIRPDGMDSSSDLMNLVYEALVKPGPDLVICDEGHRIKNSHAGISLALKEIRTRRRIVLTGYPLQNNLLEYWCMVDFVRPNYLGTRTEFCNMFERPIQNGQCVDSTPDDIKLMRYRAHVLHSLLLGFVQRRSHTVLQLTLPQKYEYVILVKMTAFQRKLYDTFMTDVVRTKAFPNPLKAFAVCCKIWNHPDVLYNFLKKCETDLDLEIDEEVTKGAATPIVEPSADSSLSLASPLEKKINGSGDPINSIETPSFYDEKPEPLNYGSFGSEGKNNYWMDSSILPKPGCVEVIKQTDTNMSSNFESITGSSEIVDLDTNEIKTVETTIQAPCSNNQLDNGCNAGKPSEWNAAGSKNSSGVAAAEPFKKLLKSKQRNEEFSCSWAVDLMKNYVSGLISNSPKMEIFFCILKESLNLGDRILYGQTKPCFVYRIVMDRCLEKKIYDRQIKKQGMSDRIVDECNPEAHLSMKDITNLCQDYDSDEDTVEEVNKSTGDLSKPGSPSEEGSKPGSANMSPNASNKSNNGPTKPLDDQNTPKSPNGASHSPIKTEKNDGQEHAVHVDGIINTILDMHRHCVTKEPFMHESLLVDQKDRKLSQAEKRQAHRSYELEKKAAVNQRFTYAPAKMNYKIVNNDGTVITKPMNQQIKTNTSSSTGGRSTRWIPADVWQRQGMTAQEMTLPLDVVIPTNSADKANIILKAGQRVMVLKSAKGIYMQLDSGKIIAIRTTAKTEPEKTNKDDVIDITDDGDTDTTKPQSPEEDVKDLTADDEPRVVKNKESNPATTSRPEMPAKDRKSTENVQHFKSQTQPNTTLATTTNQHQLPSDLTYSQPQQSHQQPQQQASQQQPAQQPPPPAYKHQNHLPAAGEGYSNANSIQPNVPLPPHPGAPNSSEAPPPADSSYFQPKPFQHTYPPQYYDYYDNKHKSAPPGSGYHINNYTSYGNLNFAPYHSNLHPPASYIGAPSSYVNSNVFPRQHWSSVVNSSPASSESMRQPSYIGSTYPVNEWSSQ

SEQ ID NO: 7837 - DNA, 6197 bp, DROSOPHILA
gattatgcttttcattattttaccattattattattttttttgccaaactgatatgtacttatatatgtctgcgtgtgtgttgttaaaatttgactgcccgtaaagtttgcaaaccgttttctagttctgctgttagatgtgcaatgtccgctactcttgcttaaaaaacaattaataattgctatccaataattttcatattattagtatatatcgttttatatatctcgatttatctaagtgtgtatttgtatttatattaaatgtacttattggccttgtctaaattgtaaattataggcaaataaaactagatttcgtattattagtttggttttgcaaattcgttttaaaaatagttatataactattattaacaacttatgtttctatgttgctctatggagatgaaaaactgtttattaactatgctctaagtgtgtgagtgtgttaggaatcatcatatgttcgctggtgtgtgtatggttctgtgtaagtaatcaattgcattaattactttaaatgttggccaagacacaaggtcatgtattgggcgtcaaaagtggaaatcaggggagtaaaaaagccatatttagatgaataagttcgacttgagataactaatagtttatcattctgctggaagtttacgagcggaagaaataagttttggtgacgagtctagcacaattctttttaaaaaaagtcatagttagaaatcgaaagaaattgtaagatataaaataaagtgcccagcacatgacttgttccactacttataaatatactttgtttgtatgcatataaaacttattatttacgagtggacataaaccgatttgcttgtctttcatttaattgtatctttattgttgcgggggctggctctcacaattagctatatcccaaaaattcgtacctaccgattagtttaagttcttcattttatatatatttatatatgtacatatcatacaggcaatgatcagttgagtatcttcagcatttcagccacagcatcggagtcagttcggaatccgatccgatctctgagtaacctacttcgccggcaactaaagccaacatcagagggtcatggtggtcatcacaatgggtatcagcagggccatcgcaaaggataacaggaatatgcgctggccagaactgctcaacgcgctcgcctggcagagcagatcctcgggaaagatctccaggatgggcaggtgtcgacccgatgttggatcgtggcaggtgttggcacgggctctctaaggaaatgaaatatgtaacttcattagccaatattcaaaacaagttcaaatggaataaatactatttcgatatcagtgcattgccatattatcctaataattttaatgaataatattaattaaaatatctaaaatgagaatcacacaccattttcacattaagcatataatgcaattacgattattgattacaatttagatttagattacaaaatatatttttatgtaacaaaacacttaatcatttagtgcatcttctgaacataattttatgtatatctttcttgctttgcattaatatctcaaaaaaaggtataaaataatataaaagcttacgcgcatatcggcaatcgataggggtaacttttggttaaaaattaagatttacacaaggttaaatagaaggatgaacagcaaagaggtaggtcaagtgactcacctggaccatgcgcttgaggtcatccttctggatgacctttatctgggcagactcccttagccatcggcgcagccagtgaccgaaccacaccagtccgcactcacattccagcggattgtgcgaggtgatgagtccacccatgatgctccgagttccaacagcatcccagtagctcttgttggggtaaaagctgtcggcggccagggcgttgatacgattgtgcgaaatgtcgatggacaggtgcggcacctctcgcagggcataaaaaatacccggcgggaggtcggagatgcgtgtgtgcgagatcttcacctgcagccgttgacttcgcgatagtccggtaaagacatcgggagcaatagtctggacattgctgccatatagctcgagtagtcggattttcgtgttattcgccagtttggcgaaaagctgttggccaatatttggctccaggcagtgcaccctcagctgctgcagacccggtatcctggccacaatctcacccagattggcatgcgaactggcatgtagcttcctcagagagcgcagcttggaaaatgcctgtggattggttaccttcacgtccaggatattcagttcggccaggtgccgcaagctggcgagatcgtgcagcgttattctgcgcagcggattgtgggccagatccaatacacgaactgatggcggcaggtgctccgccgcacagctcgcattcgtgagtttgttgtgcgagacattgacgtgacgcaggtggcgcagtgaacccagtggcgacagctcttgcaaatagttgccactcacatcaaggtaggagagaaggggaagcttcagcggcggcaggacatacagtcccatgtggtggaggctcagcttcctcaggcgcggcgtgtggacaaacacctcccgcaggttggtcgtcaccagggggttctgtgacaggtccaggttggtcagattattcagaaaactgaacgtgttgtccggcagaatggtgatgcggttgcgggccaaactgatgtcgtacaggaactgcgagttgatgaacatcgaggcatccaagtactctagattgttgtgggacatttggattgatcgaagagtgaatccgatgtccgtaaatgccggaactggccaaacgcttaactgattttcggctatatccagaaactccagtcgagtgttcatgaacacttctcgtggcagagcccttaatcgattcgagttaatgcgcagaattcgcagtttccttaggttcgagaactgctccacctgcagctgatccaactggttgtgactaagatccagttcctgcaagctattcaagccctgaaagctgcgccgcctcagcgaggtgagattattgtgggccacattaaggatttccagaaactccaggtcaccgaaggcatgactctgaagggatcccagctggttgtgggccaagtttaggaatcgcagcgtgttcgccaggttcgtaaagctatcggacttggtcacatggttgtgactaatgtccagctggtaaatatacatgtagctgctcagctcgtcataaaaactggctatgtgattgtgactcacattgagtcgtaatggagtggtggtgtttgaaacataaagaaaggattttagggatagcgaacacagctgattgtgcatcagatccagggcagccagattgggcagaaccgtaaaggcgccgtgggagatgttgaccaggcgattataagacaaatccaagtagcgtaggaactccaaattgtgaaaagcatgccgagctatcgtcctcaggcggttcgattgcaaattgagtgtctgcaaatccccgaggctatgaaacgtttgcgcttcgagtcgctccaagccattgtacgacaaatcaatttccaccagatgactatgagcatcggactgaaagagtccgcggggcagtgtctttagctggttaaagctcagattgatgtagctcaattctctcatctgtgcgaaggattcatttgagacttgcttcaaattattgttgtccagacccagccaaatgagctgggaaagtggcaagagggcatctaggggatccaggctctccaggcttctggccggaaagacggcgaacgagagctccagaatcttgagggttctcgaaacattctcgaaaaccaaaggatgatgaatggttatatcgttgaagctcaagctgatctcctgaatttgctctagtcccgcgaaggatcctaaatgaagatgggttatcttattatttcgcagcagtattgtctgcagattgctgccccaggaatccacggcaaaaattccttcgggaatgtccgtgatagagttgtagcccatgttcaagtacgaaagctgtgtgtagtttttcaggccgagaacagggatcatgctgaagttattgccactcagactaagaacgcgtaaattttccgtgaatgagggaagattgttcagctgactaatctgattagaggtcagatagaggtacttcaggtgatgcagtgaggataaggccacgggcaccgtggttagtcggttcctttccagatccagatactccagggtctcggttagaccctcaaaggccgaaggatgcactcgactgatcgcattaaaggccagtactaggtgggctatgcccgtggccttaaacactgcctcaggcagctgggtgacaaagttctgttctaaatttaaagctctcagatgaacatcggaatagttttgctgaaaatagtcggactccaggttttcaatgcagttctggccgagatccaggcgttccaggtgcattcgcagtggccgcacttgaagttctttccactgcacactccgtataaggttatcccttaaacttacgattcgcaactccggcaactgttcgaagagttgctgggggaaaactgtaagtagattacttgacaggtccatggtcaccagggaacgcggcagatagttcccagccacatggtagatccgattattggacaaatccagccaaagtagtttttgcaactgttcgaagggacgaccccctgtcgtccgatctcctgagctcggagatggtgggtaaattgaattactcgtttctagtctggtctgcacagcggccaaactggaaggctgggaactgttgtcgttttgagaaactacttctatcgatccacctcccggcgccacttcggtaatatcgttgtcggataaatgaagagatcgaagagtatcatgctgggcatcccaatttccatccaaggtggttatgtggttgctaaagagaaatcaaatgtatttttatgaaattaagataatctgacttctataattagtatcatagcaagtctatggtgatatattagttagacttaccgttgcgccaccagtcgcgaaagggaatgcaatcgctgcagtgcatccagtggcaagtgctgcatcttgttgccagatatatccaaagtcatgagcgagtgtgtcatcgtgctgcaaagggagaagtacgataaaaacgaggacgaacgaggcgccacgcctatctgcataaatattatccaaatcattccacacgaactgcagggggggctgttatcaaaaatatataatggccaaaactttcactaaaacttttgttcacaactatcaacagtttccgcttgggtctgctacatcccccatcaacatgtgattccccatcccatggctcatataaattgacgtgctgcctgccttttgacatatcctacacacaagtcggaaaacaaatatttaaacttaattaacgcgtagcaacggcgacccaggcgaccccagctgccaccccgtggtctccacttcacttcctctctaggccccattaatagttatacacacgcaccgcaagctcaccaaacgcacacacatatgtatgttcgttggagtggaccacatatgaacttaaagtttttatgattctaaaagctgcttctaaaaagccatggttaaaaaatcgttgcagtttcttttaacggatgaaagttagctatatagtttgtcacgcatacgcatttttaattaaattatttatttacatctcttgtattctgtacctcatacggtgaatattattattttgcatgtaaagtttaacattatgcttttattggctaacctggcgtatgatttatatttgacataactcatacgcagtggtgacacacttccgcatgcaaatacaaattgtgtttaaattgttattacttgtaagatgataaagaattcaaatttctatgaatctagtatagtactaatatttttcttaggaatactttctactaaggtccaccctcgatttctcagcaaggaagtgcagagagaaaaccaaacagagttcgaggaaacagcgacctcaattatgaaaaccacgaggttttccaaacaagttccagcctcctccttagaggcaacaacaaaaacaagcgcagcggcatccttttgtagttcttgg

SEQ ID NO: 7838 - DNA, 3655 bp, DROSOPHILA
cacgatgacacactcgctcatgactttggatatatctggcaacaagatgcagcacttgccactggatgcactgcagcgattgcattccctttcgcgactggtggcgcaacgcaaccacataaccaccttggatggaaattgggatgcccagcatgatactcttcgatctcttcatttatccgacaacgatattaccgaagtggcgccgggaggtggatcgatagaagtagtttctcaaaacgacaacagttcccagccttccagtttggccgctgtgcagaccagactagaaacgagtaattcaatttacccaccatctccgagctcaggagatcggacgacagggggtcgtcccttcgaacagttgcaaaaactactttggctggatttgtccaataatcggatctaccatgtggctgggaactatctgccgcgttccctggtgaccatggacctgtcaagtaatctacttacagttttcccccagcaactcttcgaacagttgccggagttgcgaatcgtaagtttaagggataaccttatacggagtgtgcagtggaaagaacttcaagtgcggccactgcgaatgcacctggaacgcctggatctcggccagaactgcattgaaaacctggagtccgactattttcagcaaaactattccgatgttcatctgagagctttaaatttagaacagaactttgtcacccagctgcctgaggcagtgtttaaggccacgggcatagcccacctagtactggcctttaatgcgatcagtcgagtgcatccttcggcctttgagggtctaaccgagaccctggagtatctggatctggaaaggaaccgactaaccacggtgcccgtggccttatcctcactgcatcacctgaagtacctctatctgacctctaatcagattagtcagctgaacaatcttccctcattcacggaaaatttacgcgttcttagtctgagtggcaataacttcagcatgatccctgttctcggcctgaaaaactacacacagctttcgtacttgaacatgggctacaactctatcacggacattcccgaaggaatttttgccgtggattcctggggcagcaatctgcagacaatactgctgcgaaataataagataacccatcttcatttaggatccttcgcgggactagagcaaattcaggagatcagcttgagcttcaacgatataaccattcatcatcctttggttttcgagaatgtttcgagaaccctcaagattctggagctctcgttcgccgtctttccggccagaagcctggagagcctggatcccctagatgccctcttgccactttcccagctcatttggctgggtctggacaacaataatttgaagcaagtctcaaatgaatccttcgcacagatgagagaattgagctacatcaatctgagctttaaccagctaaagacactgccccgcggactctttcagtccgatgctcatagtcatctggtggaaattgatttgtcgtacaatggcttggagcgactcgaagcgcaaacgtttcatagcctcggggatttgcagacactcaatttgcaatcgaaccgcctgaggacgatagctcggcatgcttttcacaatttggagttcctacgctacttggatttgtcttataatcgcctggtcaacatctcccacggcgcctttacggttctgcccaatctggctgccctggatctgatgcacaatcagctgtgttcgctatccctaaaatcctttctttatgtttcaaacaccaccactccattacgactcaatgtgagtcacaatcacatagccagtttttatgacgagctgagcagctacatgtatatttaccagctggacattagtcacaaccatgtgaccaagtccgatagctttacgaacctggcgaacacgctgcgattcctaaacttggcccacaaccagctgggatcccttcagagtcatgccttcggtgacctggagtttctggaaatccttaatgtggcccacaataatctcacctcgctgaggcggcgcagctttcagggcttgaatagcttgcaggaactggatcttagtcacaaccagttggatcagctgcaggtggagcagttctcgaacctaaggaaactgcgaattctgcgcattaactcgaatcgattaagggctctgccacgagaagtgttcatgaacactcgactggagtttctggatatagccgaaaatcagttaagcgtttggccagttccggcatttacggacatcggattcactcttcgatcaatccaaatgtcccacaacaatctagagtacttggatgcctcgatgttcatcaactcgcagttcctgtacgacatcagtttggcccgcaaccgcatcaccattctgccggacaacacgttcagttttctgaataatctgaccaacctggacctgtcacagaaccccctggtgacgaccaacctgcgggaggtgtttgtccacacgccgcgcctgaggaagctgagcctccaccacatgggactgtatgtcctgccgccgctgaagcttccccttctctcctaccttgatgtgagtggcaactatttgcaagagctgtcgccactgggttcactgcgccacctgcgtcacgtcaatgtctcgcacaacaaactcacgaatgcgagctgtgcggcggagcacctgccgccatcagttcgtgtattggatctggcccacaatccgctgcgcagaataacgctgcacgatctcgccagcttgcggcacctggccgaactgaatatcctggacgtgaaggtaaccaatccacaggcattttccaagctgcgctctctgaggaagctacatgccagttcgcatgccaatctgggtgagattgtggccaggataccgggtctgcagcagctgagggtgcactgcctggagccaaatattggccaacagcttttcgccaaactggcgaataacacgaaaatccgactactcgagctatatggcagcaatgtccagactattgctcccgatgtctttaccggactatcgcgaagtcaacggctgcaggtgaagatctcgcacacacgcatctccgacctcccgccgggtattttttatgccctgcgagaggtgccgcacctgtccatcgacatttcgcacaatcgtatcaacgccctggccgccgacagcttttaccccaacaagagctactgggatgctgttggaactcggagcatcatgggtggactcatcacctcgcacaatccgctggaatgtgagtgcggactggtgtggttcggtcactggctgcgccgatggctaagggagtctgcccagataaaggtcatccagaaggatgacctcaagcgcatggtccagagcccgtgccaacacctgccacgatccaacatcgggtcgacacctgcccatcctggagatctttcccgaggatctgctctgccaggcgagcgcgttgagcagttctggccagcgcatattcctgttatcctttgcgatggccctgctgatacccattgtgatgaccaccatgaccctctgatgttggctttagttgccggcgaagtaggttactcagagatcggatcggattccgaactgactccgatgctgtggctgaaatgctga

SEQ ID NO: 7839 - protein, 1216 aa, DROSOPHILA
MTHSLMTLDISGNKMQHLPLDALQRLHSLSRLVAQRNHITTLDGNWDAQHDTLRSLHLSDNDITEVAPGGGSIEVVSQNDNSSQPSSLAAVQTRLETSNSIYPPSPSSGDRTTGGRPFEQLQKLLWLDLSNNRIYHVAGNYLPRSLVTMDLSSNLLTVFPQQLFEQLPELRIVSLRDNLIRSVQWKELQVRPLRMHLERLDLGQNCIENLESDYFQQNYSDVHLRALNLEQNFVTQLPEAVFKATGIAHLVLAFNAISRVHPSAFEGLTETLEYLDLERNRLTTVPVALSSLHHLKYLYLTSNQISQLNNLPSFTENLRVLSLSGNNFSMIPVLGLKNYTQLSYLNMGYNSITDIPEGIFAVDSWGSNLQTILLRNNKITHLHLGSFAGLEQIQEISLSFNDITIHHPLVFENVSRTLKILELSFAVFPARSLESLDPLDALLPLSQLIWLGLDNNNLKQVSNESFAQMRELSYINLSFNQLKTLPRGLFQSDAHSHLVEIDLSYNGLERLEAQTFHSLGDLQTLNLQSNRLRTIARHAFHNLEFLRYLDLSYNRLVNISHGAFTVLPNLAALDLMHNQLCSLSLKSFLYVSNTTTPLRLNVSHNHIASFYDELSSYMYIYQLDISHNHVTKSDSFTNLANTLRFLNLAHNQLGSLQSHAFGDLEFLEILNVAHNNLTSLRRRSFQGLNSLQELDLSHNQLDQLQVEQFSNLRKLRILRINSNRLRALPREVFMNTRLEFLDIAENQLSVWPVPAFTDIGFTLRSIQMSHNNLEYLDASMFINSQFLYDISLARNRITILPDNTFSFLNNLTNLDLSQNPLVTTNLREVFVHTPRLRKLSLHHMGLYVLPPLKLPLLSYLDVSGNYLQELSPLGSLRHLRHVNVSHNKLTNASCAAEHLPPSVRVLDLAHNPLRRITLHDLASLRHLAELNILDVKVTNPQAFSKLRSLRKLHASSHANLGEIVARIPGLQQLRVHCLEPNIGQQLFAKLANNTKIRLLELYGSNVQTIAPDVFTGLSRSQRLQVKISHTRISDLPPGIFYALREVPHLSIDISHNRINALAADSFYPNKSYWDAVGTRSIMGGLITSHNPLECECGLVWFGHWLRRWLRESAQIKVIQKDDLKRMVQSPCQHLPRSNIGSTPAHPGDLSRGSALPGERVEQFWPAHIPVILCDGPADTHCDDHHDPLMLALVAGEVGYSEIGSDSELTPMLWLKC

SEQ ID NO: 7840 - DNA, 6556 bp, DROSOPHILA
aaaccaaatgcctacaagaatataaatcaaatgttgttcaacacacagaaacaaacacacacacgcgaatggatttgaggcggaatcaaatgcattcggttcacggcaaacttaagagcatcgtaaattaaaataatttttacgcctaagataaattttaaatgtttaagtgcaaaacacgagacacacaccccaaaccagatgtaacaatttcacctgcctacagtgcgggcagaatatgtttagcgtaatttagttttgcaagaacgattccgtttcgatgaaaaggatagctcacttttgtaactaccgggagcgttctcaagaaatatacttataaatataatttgttccttgcataatgagagatagacagctagagcgactatgcaacgtatttcatgtagtatttattcgataagttctcgatctatttatttatttttgttaactatttccattcgtgtgacccgccgccacctttgtcattacactttcttttgccatgttgtatattctttacgtatatatatatatatatctatattttatatattttatttgcaatcttgttatgccattcgtacacaaataggaattcaagcatagcaccgacccatactttagactaaattatttttttaacccgttcttgtgaaaccaacggcccaagaatacagagataccacacacacattaggctaagcgaaaccaggttaagatactttaagatgagttactttaaccgatggaagacaatgatttaaaatagcttgtagtacgtactctaagacaaataagcaaaactgagttgcacttctgtaagatatactgtaactaataacgaagcgaaaaagctacaaataaagcaactcgagtagcctacataatgtataatacaaattctaaagctaatatttacgtacacatatatatatttattataaacaataaaaatacaattttaaaaatttaaagcaataaatcattacgtattcatttagttctgctctctttgttggcccccggaaaaaccccggtctctgttggttttctttttcggctggattgcgtgcatggcctgaacgtaccagataatacccccaacatgtgcgctcggtggagttatgtagttttccatgatcgtaatgttgaatttgtagaaacctaggggaaaaacgttgggcaagtaggattcgttcaagtaggcgccgcgtgccatcaaatggccgcgatatggacaggagtgattaaagttcgagaacgtcctggcaattttcaggatgatcaagccatatggtataaagctacgcctggataatgcatcgcacatgtttatcacgacgtctacgaggaacggctgaaacttgttgctgtagtccttcttgaggatctgaaatcgaatctaaagattatctgattagtggagtaatcagatgaggaagtaagtccgcaaaactcactgttatattgtacaaaggcctcagcagataaacatccatttcagccaccgccttgttccaatttattgctcttatatgacacgaagcattcgcggagaatccaggcactgtggagcactcgatatttttcagtttgtagacgatgttgggttcacttagctggaaaatgtcatacatatagatagatgggttgcaaggagtatatagtggaacagcatctcactcacgacactccagaataggtaactgccgaataaaagtagatgaatggaatgcatgttactcaggaaacataggaaaagaacctgtgttcgaattcgatcccaatattctaatgcggttttaattttgtgtgtaagggtttaattatcaaaagttaatttgttccacttcaataaccaggcacaagcgcttgtcattgttcaacaaataccatatattgtattaaaatttgggtgataaaaatcgagatttgtaagtgattttaactttgttatatagcttataataactttgttattggccaatgaaagcaagcccaaatccctaaaattcaatgactctgactgcagaaatgtatcaatatcttggttgtggttatatatcatctaaccaccatttaatatcaaattaatatggaaatgcctaaatcctggatatggaatcaatgagcatttgttaaatcaagaataatgagtaatggcagccgatgataagagataatcaattgccgagactacttcccagtttactaactacatataaattttatattattcatttaatgtatggttataccataaaaaataccattttagaaaactatacctcagtgagcatatattttaatgatggcatcccgattcgtaacattaacaatcactataactaaatgtgaaattcgtttaggcattaacatttttatagatccggtcagatccggttaattgcgtctgactagctagtcactgacgcgggcataaaccacggctgtgcgtgatggtgtgtagacctcaatgaaattggagcgcccggcgtagccctccggattggagggatgtttgcagttggcatcgatgcggttgtggccgccgaagagaggatcgtctgaggagagcaccgcctggtaggtgcccgcccagttggtgcccacacggtatccggtgaaactctgctgtggatggaagttgaaaacgaacaccaggccggcacgctcgaaagcgattatcttgtcgccctcgtgcttccagctgacccaagcgggtccggaatgcagccagccgtagcgctcctcggcctcattcatggctcgatcgaattcgttgaggtacttgtacttcagcagatcgtcgtccacaagattccattgccggcgagcatagtgatacgaatcgttgttgccaacgcgtgggaagtccagccattctggatgtccgaactcgttgcccataaagttcaggtacgcctcgcctcccagggcgtgcgtgatcagacgaatcatcttgtgcagcgccagtcctcggtcgatgatcactgaggagtccgacaacgtcgacatgtgcgtatacatctccttgtccatcagccagaaggcgatcgtcttgtcgcccactagcgcttgatcgtgggactctgcgtaggccactgtgttctccatccagcgacggttggtcagcgtgtgcaccaagttgcccatgtcccactcatcgtcactctgctccttcagcagttcgatccacttgtctgggatggccatacccaagcggtagtcgaaaccgataccaccctctgatacggggcgacacaaggtaggcattccagaaacatcctggggaattaagaaaactgtcttgtctacttcgaaagaaacaaaaccaacggatagcttacctctgcaatggtgataatcctcgaatctatggtgtgcagcagatgattggccagtcccagataattgagggcatccgtgtcgacattcaggccaaagtactcgttgtaatcgccgctgaagccctccccaatgccacgggaatggtatagcatagaggtcactccgtcgaagcgatagccatcgaagttgtactcgtcgtgccaccaacgcaggttggatagcaagaaacgcagcacctcgtactccacgtagttgaagagacgactgtcccacagcgagtgctcgccacgggctccgtcgtggaagaagcaactgttggtgccatcgaactggttcagaccgtcctgaacgttcttggaggcatgcgagtggaccacatcgagcagaacgaacaggccgtgcgagtgtgccacgtcgatcatgcgcttcagctgctccgggttgccataacggctggaggccgcatagaagctggtcacttgatagccaaaactggcgtagtaggcgtgctccatgatggccataacctggatgcaattatagccctgacgcttgatgcgcggcacgatgcgatcggcgaactcgtcgtagctgccgacccgcggctcctgggaggcgatacccacgtggcactcgtagatcctgagcgacttgggtcttggcggacccggatgctggcgttggtagcgctcgtaggacggtggctcccacacgtactgcttgtagttgaccccctgattggccgacttgggcggctgcaccacgtacttggcccagggcgacaggcggtccagcaattgaccggaatggttgcgaattataatcttaatttcgctcaagtgcttgatggccggactgccgtcctcgttggggggcaggtgtagctcccacttgccaaagtcgagctttttaaatggatgcgattcccagtgccagttgtctgtggggttgtagcaatcggttagactagatcaattcgtattgaaggatggattactcactgaagtcacccgtgagatagacatctctggctccaggtgcccactcgcgggcaatcaccgaattatccggctggaagtgaagtccgtagtgcttgtaagccgtcgaaaagccatccagtccgccctcgctttggtttatcttattcagccaatcctcgagcacgccatgactgcggagaaataattgcaataattatttgtaggaccaacaggatggaatcgacgtctaatggatgcgtttcagtgaattctaattaagagctgtttttagatattagctaatatataatgatgtaaggcagtctctgaaatattttttattattaatggattattaatggatttttcaatttttgttcgcatattctcattaggtttataaatccgataacgaaaatcgtgggtcagatcgtgtcattgccaaattgttttctagtttaatggattttgttttaattaaataaatagaatttaaatattttcgaatttgtaaaattctattagaaatataattaatttttttcactgcactaagaatttattttagtggctatttatttattttaatcggctaaaaatgtaaacaaaaaaaattctaaaaggcaatcacaatcgcccgataaaagagaccaaaacaaaaggcgcaagaacggaagaccagccaaaatgtttcgatttgcagtaatgccaaaatagaaatatcgccggcacaacttggggaaatccggaaaatgccaccaaggccaagaacatccatgccccaaacacgccggcagcacgcagcgaacatattatttaaaatttcgttttgacaaacacacacggcaccgcactggccaaccaacacacacgcagagggcggggcggcaaacaccggcgaccttcattcgacattgcgaacgcagtttttccaactgcatgatacggctgcagcattggttacgaattccgggctacgcgccccggtcagcgattgccctctatggttacgccgcactcccttatcagcatggagcgcataaagccggcgccaaccttgggttacctgatgtacatctaactatgcacacatctatgtattgatgtatgtattgtacatccggggagggatcttaactcaccggcgacggatctcatgctcaaacggccgcaagtagccgtccgtctcgaacagcttctcgatgtccttagcctcggccatagcggaggagaatgaatccccgagaggtgtctcggttgaacggtgggaactgaagaaggcggcgttggcgaagacgctgctgatttgtttgcctgttgaccgacgagcgacaactgtgctcatttatcagctgccggccaactcaaaagctccgctgcgcacggaaagctttcgcttgcgatcagctgtttttgcagctttgccttttgcgcccgccattcgcgtatgtaaacaacatagcgaaaattgctgtaattgcatgtttttgtcgccaaatgttgcgtattcgcactgatagcaccgcacccaagttcatagtacgtatacgctcaattggcgctgattgccggctggcatatcggcatcgaaatcagagcgctatgtgcacaacatcatgatttggggtcgtcgttgtcaagttcatcagtgaatcgaatgcacaaacatgggtttgaaagtcgaagggttatgattattgctcacagattaggtcgccactcggaaacagctctgctccactggcaatcaaatcgtttcaaagcatttccattccatctggcttattccacatattagttattattaagcgtgtgatgtgtatcttaattgtcatgcaagaaaaacataaataaataatgaatgtttctttgtggaagttgttcttgtaaattttacaacaaatgccacataatattacccttatctttatcgggatattcaaaaacgtttgcgattgcgcaggcgataagaaacaccaataaaagggcacgtaactaccaaataaacttaatagttttatttaaccagctctgttatctataacgtgtaatctttgaaagttttcctagacttaaaatttttcattaaaatgcaatgcaacaaagtgcaaagagcaagtgcaaggctagctattaacttaaacaattcatactggactggtcgtgaagaagtgatgaaaaaatgatggggccagcaggccttaaaacttaacagcaaggcc

SEQ ID NO: 7841 - DNA, 2598 bp, DROSOPHILA
atggccgaggctaaggacatcgagaagctgttcgagacggacggctacttgcggccgtttgagcatgagatccgtcgccgtcatggcgtgctcgaggattggctgaataagataaaccaaagcgagggcggactggatggcttttcgacggcttacaagcactacggacttcacttccagccggataattcggtgattgcccgcgagtgggcacctggagccagagatgtctatctcacgggtgacttcaacaactggcactgggaatcgcatccatttaaaaagctcgactttggcaagtgggagctacacctgccccccaacgaggacggcagtccggccatcaagcacttgagcgaaattaagattataattcgcaaccattccggtcaattgctggaccgcctgtcgccctgggccaagtacgtggtgcagccgcccaagtcggccaatcagggggtcaactacaagcagtacgtgtgggagccaccgtcctacgagcgctaccaacgccagcatccgggtccgccaagacccaagtcgctcaggatctacgagtgccacgtgggtatcgcctcccaggagccgcgggtcggcagctacgacgagttcgccgatcgcatcgtgccgcgcatcaagcgtcagggctataattgcatccaggttatggccatcatggagcacgcctactacgccagttttggctatcaagtgaccagcttctatgcggcctccagccgttatggcaacccggagcagctgaagcgcatgatcgacgtggcacactcgcacggcctgttcgttctgctcgatgtggtccactcgcatgcctccaagaacgttcaggacggtctgaaccagttcgatggcaccaacagttgcttcttccacgacggagcccgtggcgagcactcgctgtgggacagtcgtctcttcaactacgtggagtacgaggtgctgcgtttcttgctatccaacctgcgttggtggcacgacgagtacaacttcgatggctatcgcttcgacggagtgacctctatgctataccattcccgtggcattggggagggcttcagcggcgattacaacgagtactttggcctgaatgtcgacacggatgccctcaattatctgggactggccaatcatctgctgcacaccatagattcgaggattatcaccattgcagaggatgtttctggaatgcctaccttgtgtcgccccgtatcagagggtggtatcggtttcgactaccgcttgggtatggccatcccagacaagtggatcgaactgctgaaggagcagagtgacgatgagtgggacatgggcaacttggtgcacacgctgaccaaccgtcgctggatggagaacacagtggcctacgcagagtcccacgatcaagcgctagtgggcgacaagacgatcgccttctggctgatggacaaggagatgtatacgcacatgtcgacgttgtcggactcctcagtgatcatcgaccgaggactggcgctgcacaagatgattcgtctgatcacgcacgccctgggaggcgaggcgtacctgaactttatgggcaacgagttcggacatccagaatggctggacttcccacgcgttggcaacaacgattcgtatcactatgctcgccggcaatggaatcttgtggacgacgatctgctgaagtacaagtacctcaacgaattcgatcgagccatgaatgaggccgaggagcgctacggctggctgcattccggacccgcttgggtcagctggaagcacgagggcgacaagataatcgctttcgagcgtgccggcctggtgttcgttttcaacttccatccacagcagagtttcaccggataccgtgtgggcaccaactgggcgggcacctaccaggcggtgctctcctcagacgatcctctcttcggcggccacaaccgcatcgatgccaactgcaaacatccctccaatccggagggctacgccgggcgctccaatttcattgaggtctacacaccatcacgcacagccgtggtttatgcccgcctaagtgaacccaacatcgtctacaaactgaaaaatatcgagtgctccacagtgcctggattctccgcgaatgcttcgtgtcatataagagcaataaattggaacaaggcggtggctgaaatggatgtttatctgctgaggcctttgtacaatataacaatcctcaagaaggactacagcaacaagtttcagccgttcctcgtagacgtcgtgataaacatgtgcgatgcattatccaggcgtagctttataccatatggcttgatcatcctgaaaattgccaggacgttctcgaactttaatcactcctgtccatatcgcggccatttgatggcacgcggcgcctacttgaacgaatcctacttgcccaacgtttttcccctaggtttctacaaattcaacattacgatcatggaaaactacataactccaccgagcgcacatgttgggggtattatctggtacgttcaggccatgcacgcaatccagccgaaaaagaaaaccaacagagaccggggtttttccgggggccaacaaagagagcagaactaa

SEQ ID NO: 7842 - protein, 865 aa, DROSOPHILA
MAEAKDIEKLFETDGYLRPFEHEIRRRHGVLEDWLNKINQSEGGLDGFSTAYKHYGLHFQPDNSVIAREWAPGARDVYLTGDFNNWHWESHPFKKLDFGKWELHLPPNEDGSPAIKHLSEIKIIIRNHSGQLLDRLSPWAKYVVQPPKSANQGVNYKQYVWEPPSYERYQRQHPGPPRPKSLRIYECHVGIASQEPRVGSYDEFADRIVPRIKRQGYNCIQVMAIMEHAYYASFGYQVTSFYAASSRYGNPEQLKRMIDVAHSHGLFVLLDVVHSHASKNVQDGLNQFDGTNSCFFHDGARGEHSLWDSRLFNYVEYEVLRFLLSNLRWWHDEYNFDGYRFDGVTSMLYHSRGIGEGFSGDYNEYFGLNVDTDALNYLGLANHLLHTIDSRIITIAEDVSGMPTLCRPVSEGGIGFDYRLGMAIPDKWIELLKEQSDDEWDMGNLVHTLTNRRWMENTVAYAESHDQALVGDKTIAFWLMDKEMYTHMSTLSDSSVIIDRGLALHKMIRLITHALGGEAYLNFMGNEFGHPEWLDFPRVGNNDSYHYARRQWNLVDDDLLKYKYLNEFDRAMNEAEERYGWLHSGPAWVSWKHEGDKIIAFERAGLVFVFNFHPQQSFTGYRVGTNWAGTYQAVLSSDDPLFGGHNRIDANCKHPSNPEGYAGRSNFIEVYTPSRTAVVYARLSEPNIVYKLKNIECSTVPGFSANASCHIRAINWNKAVAEMDVYLLRPLYNITILKKDYSNKFQPFLVDVVINMCDALSRRSFIPYGLIILKIARTFSNFNHSCPYRGHLMARGAYLNESYLPNVFPLGFYKFNITIMENYITPPSAHVGGIIWYVQAMHAIQPKKKTNRDRGFSGGQQREQN

SEQ ID NO: 7843 - DNA, 5590 bp, DROSOPHILA
tcaatataaaacaaaagagaaaagcttgcaagggaattattaagatgcctgcaaatgacaagtatgcaaatcgttatctaaatatttatacatatattgattattgcaattgcatctaaacgaaattcatgtttaatgtttttgattgtaaaatccaatggaggaccgcaagagcagaaatctcattaaataatagacaaataattagacagatccacaaaatctccttgattaatcactgttgagcaacttaaaatttattaacgataggaaaaatttccctattgaagaaaacgaagcaaaaatttcagaatattattatacttatagcagaattttttgaatgattctgggtaatattacgtttcgtttgtgtaccatagataaactgagaggggctacttcatgttgtgccgcttcctgaagagaaagcgatctttgtagcaccaagtattaactaatctgaagcagcagcagcagtagccgccagccataaatctgctaatgactctcttcaaatgcgagacggctgccgataaagaacaaagaattgtaaactaaaatatacactatatagatactgatactgaaaaccgataatggaaactgacatcaaatacttattaccattaaactctcgatcctttcgtaaaaaccaatgtgcatgacagctggaaatttaggcatttccaaagtgcaatagttaaatgttacaaaattccacacaaattccatttaacactcacagacaaaacaaaagcaactgcaagagcaagaaaaccaagccacaactacatatagcaagtgcaggaatttaactgtaaacgtaaaccaatatgtatttaaataaatataaattgaaaccatttgaaaggtgtttaaaacgtttccacgatctggatataaacacttggcaagcacagttgtattttacgtatttatctttattacgattagcgcacgggttaacataggacctaacaataattttagatttaaatcaaatttcatttaacttaaatctcgcattaatgttgaccgaactcaattcggtaaccagatacttaaaagagaatggtatctcgatcatcgatacagaactgttatccccgcacaagcgacacgtatctggctgagaagagagtcctcccgtctcatttcgcttaacaatgcgttgcagaggcgccagaatggagccgcacttgtggcacaccagggtgtgcgtcttatcggagttgtggaacaagcgatcctgcagcaggaaagcagcaccgtgagagatcaaagcatcccgttccatctcaccgaatctgacgcctccaccgcgttttctgcccttaattggctgatgggtccgagcttccaccgctcccgtagatcttacttgccacttgtcaaacaccatgtgccgaagacgctggtaatgcaccactccaaaaaatatgtcagcagtcatctcgcggccatctacgccggaatacagcctctccgttccgtagtaattgtaacccccagcctctaacattttgccaaaatagtcaatagcagtattctcttcggagaagcgaaaaggcgtggcatcgtaaacatttccgtggattgcagccccctttcccgccatcgtttctatcatcatggcgattgtcattcgggaggggaagccgtggggattgaacacaatgtctggaatcaaaccagattccgtaaatggcaagtcctctgcaggatatttttgtgagcaaattcctttctgaccagctcttgatgcaaacttgtctccaatagtggcaggtcgtggaaccctcagtgtgatggccaccattttttttggcgacaaatcgaagcttcccaactgtcggatgctctctactatgcaatcctccttttcatccattttcacaactttataagtggcgacctctccgtcaaagtaacagtacaggggcgaaccatagctcaatttggagcccggatgtggaagaccatccgtgtcaagatgctttattaactccggcatgtgtggatgccttgcgaagtaactgctcttcttgtccaacgtcaaaaactttgttttgtagatacttccataggcgaatcctcgttcataagcagccttgttgatgatcatagcatcttccatgtcgtagcccgtgtaggaaatgacagctacaatagcatttgtgcccattgcaaagtcatccagctggatgttgtcgtagtgtactggtcggaagagaggagtccctggcgtctgaaggcggtataacttgttggccgcttgcttaggccaattcaagcatggcgttcccatcgtctgttttcccatctgacactggtacatgttacgtggcgattgattgtagtccggcatgggtatcaagttggccaagttgctcatgaagtgggtcttagccaactccaaatgagtggtgaagtcaggatacatttcctttgcatcgatggcgatctccatataaagctgttccagtgttccgatgtactccacccttttccactttaggttccaaacgggcctcatcatcctggcaggacccgttgcaatgtaaagccctggaaactgaccgttcttcttgaagggtataaagccgatttccatcatctggggaagggtgccgaatatcttcccgtagcgcaattcgtcaactattttttcggcttctgattgatgaatgtgacccaagtgtttgccatctaggaagacgacgtaaagtttttcgcccaaatatcttcggtttgacaagggcatcatgcccatatctataagatgcttgggaatggcctgaaaaaaaaagtaatcggttaaaatttctaataaagtctaccattagctgtacccaccttcaccaacttgggatcgggacgcatcgaaatctcgcaagttagagtcaaatgatttaacagtccgcacggtgtgccatcaggagtgtgcactggacaaataaaaccccaggcatccgggagcagctgccgcgcctcagtggttctcatcgttgtaaaataggaaccacggtggatggcgcgaaagtgggacatgtaacgcatcctgttaatgttctccgccataatgactaatccgctattttgcattaatcccaggccagtgcgactcgcaatatttccagttgctaaaaacgactctatggcccggccaactcctcctgcttgtcgcatgcactgcgtcatcacagcactggtaactagggcatcaggtgaagtcagttttttttgaaggcaacgtcggacttgcgagacccaggattcgactcgctcacttaggtatttctgatagagatggcctggcagaagcacttcctgcatcatagctgagtcgacgttctccactttgtacttgccctgtgcgcattggaaaagcttctgaatcataaacacaatcaactggaacttatcctcataggtatccaggtgaatcattactcgctccctaagaataaagtctgtgacatcatcatccggttgccattccggaacttctgggaagcgggcacggaacagattgccaatgaagctcttgcactgggcgtgcgtatagacgttttcattttgaacttccctcaacatggcttgcacgcaggacacatagtactggtcggactcgtagccttgcaccaatctgttgtatatttcctcatctgtataatccattaggcacttgaggatcaggcaaactggtacgtatgatagtctcttgacgtgagaaaacataaactttgcagttccattgtttaaataatgtactacattgctcagggatgattcgtcctcacggaccgtttgcactaacatacccaaatcgctaaaattctgtccacgatccttccaggatgaacgttttacacatatgggatggttcctccgggtcatgatcaacatacgtacaatcttctcatttcctcggatcacaaaaatgcccccccactcgctgtcgtgctctccatgttttaccatttcttccggagtagcctgtcccagattgcaggctttggagcgcaacatgatgggcacttctcctaggtccatgtttatgggagtcttttgcactccattgacactccaccccaatcggaccgagcacattcccgagtaggagacatggagctgcctggagtccgtggggtaaatctctcgggtgcgcacatcaatcacatcttgcggcacctttggcttcgctatccatattgattctactttcattgaaatcttttcgccggcaggactcagccagtggttcgggatcatgtgtttggccgagttatccagtcccacggtcagcatctcgtcgaaggaatccacatgtggacctcccaaattggccaaatgctagccatagaagtaaatctattagcacgaaaccttgctataggtacaagattgatatttaccctgctgagttttttaggtatctgcttaaactccgggcgggaattggtcagcactggaatggtcttcatttgttgcatctcctccagcatgttgtaagtattattctttcagaatgccgaccaaaaatattaagaaacctattgccttccttcgcacgtgttgtttggaatcgaaccgttttgaatgcgaaccagtcagtggtgaggcagtcgcaaagaactagttcatatattatattgttcatataactgaatgaaataagaatatagatgattgggataaaaattttcggtaaataaagaaccatcactaaaaatttgtattcagattaatagaacacactaaaataaccttaaagttcggtgaattgtcgtatggttccgattcgtgttcagctcatctttaaataactgggctgccaaccgaatgcaaggaacagctgatatgtgcgcgcttgataagcctgataacccaattttgaattgtatccaagttgtataaaagcaaatataatttatttgcaacgtctgacatattgtgcacatacggcaataaccatttagcatttgcaaaggcatccggtatgtagaacacaactcctgcggaaatgagactttgcaacaggatgtgccaacgtgttgctctggcaatgaagttgttgcattgttgtgagccacataggtggcgtatgtatgcacatatgtatgtatgtgcatattaatctgaagcaccctccccaaaatacgccatctaaagcttctaagaagcagttttgtcgaatacttgggcttaaaccccactgactggcacattaatgtctaatgactgcgagaatatgaaaattttactaacattatatttcgtcttaagataggtgttaatcaaggctgatgccagatttcttaatttttcttgtattggaattgccaaattactttgttgggttttaacgtgaaaacatgaagtggttgtgggaacatcaagaaaatatcatcaatttgagatggttcaggggctaatggaaaaggaaagaaccccaatctgaacgcagtcactccggtttattattccattataatgaacacaatggatttcttgcaacttattttgggcagagcgtccttgatgcctggttcttgtatccttgctactttcaactttcgctgca

SEQ ID NO: 7844 - DNA, 3469 bp, DROSOPHILA
tccaaacaacacgtgcgaaggaaggcaataggtttcttaatatttttggtcggcattctgaaagaataatacttacaacatgctggaggagatgcaacaaatgaagaccattccagtgctgaccaattcccgcccggagtttaagcagatacctaaaaaactcagcaggcatttggccaatttgggaggtccacatgtggattccttcgacgagatgctgaccgtgggactggataactcggccaaacacatgatcccgaaccactggctgagtcctgccggcgaaaagatttcaatgaaagtagaatcaatatggatagcgaagccaaaggtgccgcaagatgtgattgatgtgcgcacccgagagatttaccccacggactccaggcagctccatgtctcctactcgggaatgtgctcggtccgattggggtggagtgtcaatggagtgcaaaagactcccataaacatggacctaggagaagtgcccatcatgttgcgctccaaagcctgcaatctgggacaggctactccggaagaaatggtaaaacatggagagcacgacagcgagtgggggggcatttttgtgatccgaggaaatgagaagattgtacgtatgttgatcatgacccggaggaaccatcccatatgtgtaaaacgttcatcctggaaggatcgtggacagaattttagcgatttgggtatgttagtgcaaacggtccgtgaggacgaatcatccctgagcaatgtagtacattatttaaacaatggaactgcaaagtttatgttttctcacgtcaagagactatcatacgtaccagtttgcctgatcctcaagtgcctaatggattatacagatgaggaaatatacaacagattggtgcaaggctacgagtccgaccagtactatgtgtcctgcgtgcaagccatgttgagggaagttcaaaatgaaaacgtctatacgcacgcccagtgcaagagcttcattggcaatctgttccgtgcccgcttcccagaagttccggaatggcaaccggatgatgatgtcacagactttattcttagggagcgagtaatgattcacctggatacctatgaggataagttccagttgattgtgtttatgattcagaagcttttccaatgcgcacagggcaagtacaaagtggagaacgtcgactcagctatgatgcaggaagtgcttctgccaggccatctctatcagaaatacctaagtgagcgagtcgaatcctgggtctcgcaagtccgacgttgccttcaaaaaaaactgacttcacctgatgccctagttaccagtgctgtgatgacgcagtgcatgcgacaagcaggaggagttggccgggccatagagtcgtttttagcaactggaaatattgcgagtcgcactggcctgggattaatgcaaaatagcggattagtcattatggcggagaacattaacaggatgcgttacatgtcccactttcgcgccatccaccgtggttcctattttacaacgatgagaaccactgaggcgcggcagctgctcccggatgcctggggttttatttgtccagtgcacactcctgatggcacaccgtgcggactgttaaatcatttgactctaacttgcgagatttcgatgcgtcccgatcccaagttggtgaaggccattcccaagcatcttatagatatgggcatgatgcccttgtcaaaccgaagatatttgggcgaaaaactttacgtcgtcttcctagatggcaaacacttgggtcacattcatcaatcagaagccgaaaaaatagttgacgaattgcgctacgggaagatattcggcacccttccccagatgatggaaatcggctttatacccttcaagaagaacggtcagtttccagggctttacattgcaacgggtcctgccaggatgatgaggcccgtttggaacctaaagtggaaaagggtggagtacatcggaacactggaacagctttatatggagatcgccatcgatgcaaaggaaatgtatcctgacttcaccactcatttggagttggctaagacccacttcatgagcaacttggccaacttgatacccatgccggactacaatcaatcgccacgtaacatgtaccagtgtcagatgggaaaacagacgatgggaacgccatgcttgaattggcctaagcaagcggccaacaagttataccgccttcagacgccagggactcctctcttccgaccagtacactacgacaacatccagctggatgactttgcaatgggcacaaatgctattgtagctgtcatttcctacacgggctacgacatggaagatgctatgatcatcaacaaggctgcttatgaacgaggattcgcctatggaagtatctacaaaacaaagtttttgacgttggacaagaagagcagttacttcgcaaggcatccacacatgccggagttaataaagcatcttgacacggatggtcttccacatccgggctccaaattgagctatggttcgcccctgtactgttactttgacggagaggtcgccacttataaagttgtgaaaatggatgaaaaggaggattgcatagtagagagcatccgacagttgggaagcttcgatttgtcgccaaaaaaaatggtggccatcacactgagggttccacgacctgccactattggagacaagtttgcatcaagagctggtcagaaaggaatttgctcacaaaaatatcctgcagaggacttgccatttacggaatctggtttgattccagacattgtgttcaatccccacggcttcccctcccgaatgacaatcgccatgatgatagaaacgatggcgggaaagggggctgcaatccacggaaatgtttacgatgccacgccttttcgcttctccgaagagaatactgctattgactattttggcaaaatgttagaggctgggggttacaattactacggaacggagaggctgtattccggcgtagatggccgcgagatgactgctgacatattttttggagtggtgcattaccagcgtcttcggcacatggtgtttgacaagtggcaagtaagatctacgggagcggtggaagctcggacccatcagccaattaagggcagaaaacgcggtggaggcgtcagattcggtgagatggaacgggatgctttgatctctcacggtgctgctttcctgctgcaggatcgcttgttccacaactccgataagacgcacaccctggtgtgccacaagtgcggctccattctggcgcctctgcaacgcattgttaagcgaaatgagacgggaggactctcttctcagccagatacgtgtcgcttgtgcggggataacagttctgtatcgatgatcgagataccattctcttttaagtatctggttaccgaattgagttcggtcaacattaatgcgagatttaagttaaatgaaatttga

SEQ ID NO: 7845 - protein, 1129 aa, DROSOPHILA
MLEEMQQMKTIPVLTNSRPEFKQIPKKLSRHLANLGGPHVDSFDEMLTVGLDNSAKHMIPNHWLSPAGEKISMKVESIWIAKPKVPQDVIDVRTREIYPTDSRQLHVSYSGMCSVRLGWSVNGVQKTPINMDLGEVPIMLRSKACNLGQATPEEMVKHGEHDSEWGGIFVIRGNEKIVRMLIMTRRNHPICVKRSSWKDRGQNFSDLGMLVQTVREDESSLSNVVHYLNNGTAKFMFSHVKRLSYVPVCLILKCLMDYTDEEIYNRLVQGYESDQYYVSCVQAMLREVQNENVYTHAQCKSFIGNLFRARFPEVPEWQPDDDVTDFILRERVMIHLDTYEDKFQLIVFMIQKLFQCAQGKYKVENVDSAMMQEVLLPGHLYQKYLSERVESWVSQVRRCLQKKLTSPDALVTSAVMTQCMRQAGGVGRAIESFLATGNIASRTGLGLMQNSGLVIMAENINRMRYMSHFRAIHRGSYFTTMRTTEARQLLPDAWGFICPVHTPDGTPCGLLNHLTLTCEISMRPDPKLVKAIPKHLIDMGMMPLSNRRYLGEKLYVVFLDGKHLGHIHQSEAEKIVDELRYGKIFGTLPQMMEIGFIPFKKNGQFPGLYIATGPARMMRPVWNLKWKRVEYIGTLEQLYMEIAIDAKEMYPDFTTHLELAKTHFMSNLANLIPMPDYNQSPRNMYQCQMGKQTMGTPCLNWPKQAANKLYRLQTPGTPLFRPVHYDNIQLDDFAMGTNAIVAVISYTGYDMEDAMIINKAAYERGFAYGSIYKTKFLTLDKKSSYFARHPHMPELIKHLDTDGLPHPGSKLSYGSPLYCYFDGEVATYKVVKMDEKEDCIVESIRQLGSFDLSPKKMVAITLRVPRPATIGDKFASRAGQKGICSQKYPAEDLPFTESGLIPDIVFNPHGFPSRMTIAMMIETMAGKGAAIHGNVYDATPFRFSEENTAIDYFGKMLEAGGYNYYGTERLYSGVDGREMTADIFFGVVHYQRLRHMVFDKWQVRSTGAVEARTHQPIKGRKRGGGVRFGEMERDALISHGAAFLLQDRLFHNSDKTHTLVCHKCGSILAPLQRIVKRNETGGLSSQPDTCRLCGDNSSVSMIEIPFSFKYLVTELSSVNINARFKLNEI

SEQ ID NO: 7846 - DNA, 6061 bp, DROSOPHILA
tggagcaaagaggaagggaatcgggtgagcaacagtgggggaaaaggtgagagcacggtggacagagagggttaggggtcgccagaaggtgaagaagggagcgaccttttcattacatttctccctattcttagcaccgttcttaagtcacttacccattccttctccttcggctccttcttgttttcctgttctgttcggtgtgtttatgttatctgtgtacactttgctatgtaggtgaaacatcgcctgcttatgttacttgctacagggtattacgggtataacggatggctatttcggattaaccatttatggaagaatgtgcttccagtggaatttagattgccttaggccatggttgccacttttcatatgaactaaattagggagttaatagcttttacatttcattcagtgcctcacttgctcgcgtttcttctgcaacgaaaggtgtacagttcagcatatctaaaataacaaacagataatagttattagtgataacggtaaatgtatgcaagtgcatacctactacattttaattgttggtaatgttgagtatctggttgcgatatgatttcttatgcaagaacttattaaaataatgtgtctcgtttgaataaaatgaatatttgttatttcccgtatcacatttacatgttaacactccgtagaatacaattcgcgaactcgattgatgaattatgacagcactttgaccaatctgattctttccaaaaaaacggatgctttcccatcgacgagcgtcacttccaggtcgactctcgctctcctcttttgtcgctctctttttacctagaagaagccccgtttgctctcccccttttcatcgttcccttcgccgcgttgcatttgttgttgctttacctttctcacgcacacacacacacacagacgcacgaacgagagtgcaagtttaggaattggaatttttgtaatgtttttgtgtgtcccataaatcgaacagccgtcaaagatgaaccacctgcgggtgcacaaattcaagctgggcggcaaagataatgccgccatggccgatttgccccaatcggaaaacaccaccaacaataacaataatatcggaagcaataataatcaaaaaggcggtgcaaaaggatttctgggaaggattaagcgctactcagtgttgggaaataaactgggacgtcgtaatctcggcagtatgaatttgaatccgccgaataatgtcgttgataattccgtttcgcccactaaactccatactggaagctacaatatgaccggtagccattccgatgatcatcgcctggaaatcggagctccgattttaatatcgactacaacattggacaccgaccgtttcgatgtcacggaggcgagactcaaacagattggcggcggcatagcccagacctccagtatagtaagaaccctgacgcccaggagttcggatgaggaggagtttgtggacgccaggagtagtccgcaacaaatggaaagggatgaggatctgcaaatcgctgatgatcaggtcgaaaagaacgatcgcgatcagtatggtcatcaatttcagcttcctaagaaacaacatcgtgaagaagagatgggggacttaaaatatctagacgatctggaggaaccagaacaatttgagacgcccaaacacgaggtggaggaaaagctcctgactgccaaccaggatgtgaagcgccccataacgcccataaccattgccatagatcccccaatcagacgaccacgtattgcccgccagcaaaggcaatcgcaatccgttcagaatctgcatcgcagcgaactgaaggtatacctgcacaagtccaactccgtggcgctggacatgaatgtcacggctccggcaaagctgggcttggacttgaatctgcccgagttgccggaactctatggagccagcgagctcagtttggcggccagtgataataaggaaaatctgccagcggtgaagccatccgctgagcgatcgcccataccaaatggtggcttcatggcccagcagccacatttcaagagcctagactcgttccacctgaacacccgctcccattcgaatcagagctcccaacagagttcccgccaaagcttggcctgcagcagcagcaatggggaatacgactttgatctgaagtcggtgagctatcagagcctgaatgcccagaatctgttcgtttcgattgacgaactgcaggagctaacgcgtcagatcaacgaaacggaggattttggcaaggagatcgatctggagtactgcgcgcatcgcgatcaattgagacccagtgaacgcaggatcaccctgctgaagaacaaaaaccaaacgttgatcaacttcaatcacaacaaggagaagctgcgtaagggctggcacggcatgaagcactggctgggcgaggagggctccaagattaaggaggcagtgcgtcaacagacgcccctcaaacgtctggcccaatcacggagcaatcttaaccagtcaactgcggatgccagtcgccagtcaatgtcgccggaacgcactcaacgcgatgtaaccgagagctgtgaggatgtcaccgaacgcaccgaaatggagtcgtccatgtcgcaccgaaacagcgaggaggatctgtcgccgcatgccaagcggttcaaggatgaggtacaggtttagctgtttgttgttggtctggggttgctccatgggatgggtgtattggggggtaaactgtatactaatgatgttattgctattctaaacagggacagaacggcttcgaggaactccggcgatatgtgaagcagggcggtgattttagcaaggagctcatctttgtcctgcaggagaggtgagttaaagatcaaatttagtttgtttgtttcattcaaattatgtttttaaaccttacagagccgattcggagctgatctactccaagtcgctatcgaaactggccaacaagctgaacaaagcgggcagggaaattcccgggagcgtggccgacgcctggcgtggagtggctacggagatggagagccgcagcgacatccatcgccagttggcagcctcgctaacggatgagctggtcaagccgctcaagatcgtcgtcgaaggacatcacaaggcgcgcaaggcggtaggtacaatttaaaagccagctaagcatataaatttaagccaacccaatcctcaggtggaaagcaacgtggacaaggcggcgcgagtactgggcgaatggcgagccagcgaggcgaaagccaagaaggcctcccatacggcggcgcgcgagaacgagaagctgcaggacgcaatgctggacgtgcgcatccagaagtcaccatcgattgccctgctccaccagggacccaacaagcaggccgcagaaaaggagctcaagtcagcggagaaggattgcgtcaagctggataacaagcgcaagaaggccgaggaggcggtgaagcgtgcggatgtggaatactacaccctgtgcgtgcgttcggagcgagcacgcgtagactgggagatggccgtgctccggggaagtgcccaactgcagagcagcgaacagcagcggctgggcaatatgcacaactttgcccagcagtatgcacgcctcatctcggacatgaatccgatactcggtggcctgagcacacgcctgcagccgcaactcgatgcttgcaatgtggctaaggatatgcaagtggtgcgccacatccgccgcaattcggagggacccagtgagcaactcctaccggacttttactgcgaacacaccacgctggccatgaatcgggagcgtcgcaagcacgctctgatcaagctgctgcagctggtcaagacggatctggagcgggagcgacgatcccgcgacggattgaggggactgtcgcaatcgcttaaccatcaggagcatcagaacatcaccgataagctgtaccacgtaagtttatcacgtttatatgaatcgttaggaggcatcattaaatatggttcattctagattcgttccatgctgacctatttggagggcgcccgtctcaagctgcactctgccctcttggagctggaccacaagcccagagccactcacccactggcccagcacattcatgtgggttattattgcttaacttaagagacttaagttttaaatgtctttgtttaatccacagatcacccgtgaccgcactggtttgcagcagagcatcctgaaggtgcccaactggctgaagaacaacgacaagtcgcagacgcagcaatcgaccagtatgctggcccacgacatcaccgacataaccactaaccacgaggatgagcttcccgacgagaactgctcccacctgcacagcagtagccatagcaacaataatagcaacggctcctgcacagatgtcagttcggtggtgaagccttttaaccgaagcaaaagcaacatcgagaccaatttcaccagtcaaccaaagataatctcgacgacaaatgccgcgattgccgtgtccgttaagtccaaaaccctggccaatctgcaggatggccatcacaataaccaacagcaccatcatcatcatcataatcatcacagcgatcgcggccaggcggatggtggatccaatcagcaggactctgatttcgatgagttcagctcgcaggacgaggacgacgagccgcagcagccgcagcaacaaccgcagccgttgcaatcgcagcagcagcaacagcagccgttgctgcaaaatccaaccatcaatggccaagtgcagacgcagcatttctatcagaatgcgcaggaactgcagaagggccaaaagaacggatccgttccgatactgggacgctgcaaggcactgtatagctacaccccgaagctctacgacgagctggaactgagtcccggcgacatcatcgaggtgcatgccaaacaggacgacggctggtggctgggcgccctgcgcaatcacatcggcatctttccggccacctatgtggaggagtgcgcctagttctagttgggaaacgccctgccagcttccctccatagctataaaaaacaaaaaaaaaacgtgcgaatatgtgtgtgtgtgtgtgtgcgactgccagaggagtgtgtgtttgccttgtggagcgatttgtttgacatgaaaccaccgaaggagaaagtaatcccaaggcgatttagggtttatttgcaacattgctgacaatcaaatgatttacattgatttcacttcaacttctatctatttaaacgctaatatgattgtttattgacaaatgaaaatgaaacaaatgaaaatttatttttagaaaagatcatttaaactccgctgaaaaattgagaatagttacactttaaagaagtttaattctttttgttttccctataagcggaaaaatgtactgcatatgtcttgtgcttaaaaaattatttgcctaaacggaacttaagaaaatatcttgaaaaaaaaagctgtaagaaagcgaagaaacaacaaatatttacgttttcgtgtaatttgtgcattcagcactaatttttcactttaaaagaaaacattaagaattaatcacttaacttcattgaaaacgaacaaaatcgagaaagcaaatacttcatttttgttagaacatttttttttgtaaaaatgaaaatattttgctttgcttatattatgggcttactaagccattttcttggtagccaagttaaatgaaacgaaaacaaaaactcaattaaatactgagtgaagaatatttaatacattgacattttttcaaggagagaatatatcttgattttttttaacatttgatcgactaaccattttcatatttttcgccataaaaaaaccgtttttaatttgttagctttagccctatattattttatttgatttatgccctgattggcttcaagggtttattttaatcgtttagttttatatcaaacaaatcgatccactttagttttacgaacttagctaacctgctcttgactaaatgctaatcccaaggacaggcctttgcattaagcattaagctatg

SEQ ID NO: 7847 - DNA, 3720 bp, DROSOPHILA
atgaaccacctgcgggtgcacaaattcaagctgggcggcaaagataatgccgccatggccgatttgccccaatcggaaaacaccaccaacaataacaataatatcggaagcaataataatcaaaaaggcggtgcaaaaggatttctgggaaggattaagcgctactcagtgttgggaaataaactgggacgtcgtaatctcggcagtatgaatttgaatccgccgaataatgtcgttgataattccgtttcgcccactaaactccatactggaagctacaatatgaccggtagccattccgatgatcatcgcctggaaatcggagctccgattttaatatcgactacaacattggacaccgaccgtttcgatgtcacggaggcgagactcaaacagattggcggcggcatagcccagacctccagtatagtaagaaccctgacgcccaggagttcggatgaggaggagtttgtggacgccaggagtagtccgcaacaaatggaaagggatgaggatctgcaaatcgctgatgatcaggtcgaaaagaacgatcgcgatcagtatggtcatcaatttcagcttcctaagaaacaacatcgtgaagaagagatgggggacttaaaatatctagacgatctggaggaaccagaacaatttgagacgcccaaacacgaggtggaggaaaagctcctgactgccaaccaggatgtgaagcgccccataacgcccataaccattgccatagatcccccaatcagacgaccacgtattgcccgccagcaaaggcaatcgcaatccgttcagaatctgcatcgcagcgaactgaaggtatacctgcacaagtccaactccgtggcgctggacatgaatgtcacggctccggcaaagctgggcttggacttgaatctgcccgagttgccggaactctatggagccagcgagctcagtttggcggccagtgataataaggaaaatctgccagcggtgaagccatccgctgagcgatcgcccataccaaatggtggcttcatggcccagcagccacatttcaagagcctagactcgttccacctgaacacccgctcccattcgaatcagagctcccaacagagttcccgccaaagcttggcctgcagcagcagcaatggggaatacgactttgatctgaagtcggtgagctatcagagcctgaatgcccagaatctgttcgtttcgattgacgaactgcaggagctaacgcgtcagatcaacgaaacggaggattttggcaaggagatcgatctggagtactgcgcgcatcgcgatcaattgagacccagtgaacgcaggatcaccctgctgaagaacaaaaaccaaacgttgatcaacttcaatcacaacaaggagaagctgcgtaagggctggcacggcatgaagcactggctgggcgaggagggctccaagattaaggaggcagtgcgtcaacagacgcccctcaaacgtctggcccaatcacggagcaatcttaaccagtcaactgcggatgccagtcgccagtcaatgtcgccggaacgcactcaacgcgatgtaaccgagagctgtgaggatgtcaccgaacgcaccgaaatggagtcgtccatgtcgcaccgaaacagcgaggaggatctgtcgccgcatgccaagcggttcaaggatgagggacagaacggcttcgaggaactccggcgatatgtgaagcagggcggtgattttagcaaggagctcatctttgtcctgcaggagagagccgattcggagctgatctactccaagtcgctatcgaaactggccaacaagctgaacaaagcgggcagggaaattcccgggagcgtggccgacgcctggcgtggagtggctacggagatggagagccgcagcgacatccatcgccagttggcagcctcgctaacggatgagctggtcaagccgctcaagatcgtcgtcgaaggacatcacaaggcgcgcaaggcggtggaaagcaacgtggacaaggcggcgcgagtactgggcgaatggcgagccagcgaggcgaaagccaagaaggcctcccatacggcggcgcgcgagaacgagaagctgcaggacgcaatgctggacgtgcgcatccagaagtcaccatcgattgccctgctccaccagggacccaacaagcaggccgcagaaaaggagctcaagtcagcggagaaggattgcgtcaagctggataacaagcgcaagaaggccgaggaggcggtgaagcgtgcggatgtggaatactacaccctgtgcgtgcgttcggagcgagcacgcgtagactgggagatggccgtgctccggggaagtgcccaactgcagagcagcgaacagcagcggctgggcaatatgcacaactttgcccagcagtatgcacgcctcatctcggacatgaatccgatactcggtggcctgagcacacgcctgcagccgcaactcgatgcttgcaatgtggctaaggatatgcaagtggtgcgccacatccgccgcaattcggagggacccagtgagcaactcctaccggacttttactgcgaacacaccacgctggccatgaatcgggagcgtcgcaagcacgctctgatcaagctgctgcagctggtcaagacggatctggagcgggagcgacgatcccgcgacggattgaggggactgtcgcaatcgcttaaccatcaggagcatcagaacatcaccgataagctgtaccacattcgttccatgctgacctatttggagggcgcccgtctcaagctgcactctgccctcttggagctggaccacaagcccagagccactcacccactggcccagcacattcatatcacccgtgaccgcactggtttgcagcagagcatcctgaaggtgcccaactggctgaagaacaacgacaagtcgcagacgcagcaatcgaccagtatgctggcccacgacatcaccgacataaccactaaccacgaggatgagcttcccgacgagaactgctcccacctgcacagcagtagccatagcaacaataatagcaacggctcctgcacagatgtcagttcggtggtgaagccttttaaccgaagcaaaagcaacatcgagaccaatttcaccagtcaaccaaagataatctcgacgacaaatgccgcgattgccgtgtccgttaagtccaaaaccctggccaatctgcaggatggccatcacaataaccaacagcaccatcatcatcatcataatcatcacagcgatcgcggccaggcggatggtggatccaatcagcaggactctgatttcgatgagttcagctcgcaggacgaggacgacgagccgcagcagccgcagcaacaaccgcagccgttgcaatcgcagcagcagcaacagcagccgttgctgcaaaatccaaccatcaatggccaagtgcagacgcagcatttctatcagaatgcgcaggaactgcagaagggccaaaagaacggatccgttccgatactgggacgctgcaaggcactgtatagctacaccccgaagctctacgacgagctggaactgagtcccggcgacatcatcgaggtgcatgccaaacaggacgacggctggtggctgggcgccctgcgcaatcacatcggcatctttccggccacctatgtggaggagtgcgcctagttctagttgggaaacgccctgccagcttccctccatagctat

SEQ ID NO: 7848 - protein, 1225 aa, DROSOPHILA
MNHLRVHKFKLGGKDNAAMADLPQSENTTNNNNNIGSNNNQKGGAKGFLGRIKRYSVLGNKLGRRNLGSMNLNPPNNVVDNSVSPTKLHTGSYNMTGSHSDDHRLEIGAPILISTTTLDTDRFDVTEARLKQIGGGIAQTSSIVRTLTPRSSDEEEFVDARSSPQQMERDEDLQIADDQVEKNDRDQYGHQFQLPKKQHREEEMGDLKYLDDLEEPEQFETPKHEVEEKLLTANQDVKRPITPITIAIDPPIRRPRIARQQRQSQSVQNLHRSELKVYLHKSNSVALDMNVTAPAKLGLDLNLPELPELYGASELSLAASDNKENLPAVKPSAERSPIPNGGFMAQQPHFKSLDSFHLNTRSHSNQSSQQSSRQSLACSSSNGEYDFDLKSVSYQSLNAQNLFVSIDELQELTRQINETEDFGKEIDLEYCAHRDQLRPSERRITLLKNKNQTLINFNHNKEKLRKGWHGMKHWLGEEGSKIKEAVRQQTPLKRLAQSRSNLNQSTADASRQSMSPERTQRDVTESCEDVTERTEMESSMSHRNSEEDLSPHAKRFKDEGQNGFEELRRYVKQGGDFSKELIFVLQERADSELIYSKSLSKLANKLNKAGREIPGSVADAWRGVATEMESRSDIHRQLAASLTDELVKPLKIVVEGHHKARKAVESNVDKAARVLGEWRASEAKAKKASHTAARENEKLQDAMLDVRIQKSPSIALLHQGPNKQAAEKELKSAEKDCVKLDNKRKKAEEAVKRADVEYYTLCVRSERARVDWEMAVLRGSAQLQSSEQQRLGNMHNFAQQYARLISDMNPILGGLSTRLQPQLDACNVAKDMQVVRHIRRNSEGPSEQLLPDFYCEHTTLAMNRERRKHALIKLLQLVKTDLERERRSRDGLRGLSQSLNHQEHQNITDKLYHIRSMLTYLEGARLKLHSALLELDHKPRATHPLAQHIHITRDRTGLQQSILKVPNWLKNNDKSQTQQSTSMLAHDITDITTNHEDELPDENCSHLHSSSHSNNNSNGSCTDVSSVVKPFNRSKSNIETNFTSQPKIISTTNAAIAVSVKSKTLANLQDGHHNNQQHHHHHHNHHSDRGQADGGSNQQDSDFDEFSSQDEDDEPQQPQQQPQPLQSQQQQQQPLLQNPTINGQVQTQHFYQNAQELQKGQKNGSVPILGRCKALYSYTPKLYDELELSPGDIIEVHAKQDDGWWLGALRNHIGIFPATYVEECA

SEQ ID NO: 7849 - DNA, 3007 bp, DROSOPHILA
atccgaatccactacaaggattttttgccattattgggggtcgaagtgatggcattcctggcttcaagaatcttattcaattcgcgtaggcccttgaccttctgctgagttattttttgattaatgcatagcaagccaaattcttgcttgaatcccgggaatcatcatttgatccatagtttcccgtcttatattgaacattccgccctacttggaggcaacataatcaataacgtattccacttcctcttgctatttttgggttggttaaagagttggctttcttggtacggtcggtcgaccacatatcttggccaccctttacatttggagcggtcttcggtttagctgcaaccttctgcaaagcagcgaagatgagaaagtttaagttaattgtcctataaactaatgaatttgaaagtatgaggaattattggctaaggtaaccgccatataacgaaattaatttcgacttataaacattttctcatcagagtttcacattgtaatgtcttataagcatggactatgcatggagcatgctgctatcgaactaaaaaacgcgtggtggtggagcccagtggcagccagaccatctacagtacatgggcgtaagctcccggtagtaaagtaacgcggtagagtgggcgataattcaacttactttggcttaggtatgctcagcactgcacctgcaagctgaaggttgatgaaagggattcggagtccgatgacgatgcaaaaatagaggatgacaacccgtggtgagacaaagcgaaaaatccgagcatactagaccgaattaggtattattctccgaaattttggtcggtatttaccaaagcattaattctatgattggtattttattacgattattttcgaaattctggtcggtatttaccaaacattaattctatgattggtattttattacgataccgaagccggtatatttggaacatccggtaacactggcagtctgtttgtaattaacgtgcttttgcccaatttcaggatgaatacaattcgtccttgcggttgtaagggcgttcgcacctgcttgagctgcgaacaggactttcatatagcgaagacctcgctacgggaacaattccagcaactggaagcatggtcctactgtatccagtgcgaccttctgcagcgcggttgggataccaatcatgtccaaaaggatcatgaaaatcacaaaaaagatgagggcctcccactgccgggcatcctggtgcaggaggaattccttagcgttgatgagggcgcccaacttatagccgacttggatgacctgccatgggacatctcgcagagcggcaggcgaaaacagaacttcggacccaagaccaactttaaaaagcgcaaactgcggctgggatcctttgccggattccccaggacaacggaatatgtgcaacggcgcttcgaagacgttcccctgcttcgtggctttcagaccatcgaacagtgctccctggagtacgagcccagcaaaggagccagcatagatccgcacgtggacgattgctggatctggggcgagcgtgtggtcactgtcaactgcctcggcgactcagtgctcactttgacgccctacgaagttcaacaatcgggcaagtacaacttggacttggttgccagctacgaagatgaactattggcgcctctactgacagatgaccaacttgcaacttttgagggaaaggtgctgcgcatacctatgccaaagtaagtttacttatttattgccttctcttccgggttaaatttactatccctgcttttcagcctctccttgatagttttgtatgggccagcgaggtaccagtttgagcattctgtactacgcgaggatgtccaagagcgccgcgtttgtgtagcctaccgggagtttacgcccatgtacatcaatggcgtagacatccaaaagggagatcctgtccgagaaaagtctcagatattctggcaaataaactagcaaacaagaccaatgtaactatgtaatataatctttattatgagcgcggattatcccgatcctgactggctggcctgtaatccagcagtgccacctgtgcgggcagctgaactccatgaattttctttaagtgagccctcagattgctactggtactaaagttgttggagcagacaacgcactggtgatgcggatgcttctgccgaatatgctcattgagatcgcgaaccttggcgaaggcggtggtgcagtacttgcagacgtgcgaattgcgcacgtgggttttcagatattgaggcgaggcataagccagtgggcagtactggcacttgtagatggcctggctgccactgggctccacgtccagcaggcgattggcctcgttgtactcgtccaggttgtagtgtttcagttcgacggcagcatagtccacggtgcgcatctcgtatgctggggattccagttgctccagctgagagtcggatagatccagtcgtggttgggctgtggtggcaggtaaaaactcggagacaatcagcgaatcttggttggccagcctttgagagggtttcgtacagctatccgtccttctcctcgtttgtcttgtttctgtaggacgatcggggtctaaaaccacataatccagtggtatcctcctgaattcctccagtatctcgaattcatcactagcctggttttcgggctcttcctccgttgcgtccatcttaacttggcacatttctacctccgcctcgttgtagagctgcagtagctgctgattggcgaacgttagcttcctgaagaaggcgtactgctgcaggcaatcttccaagcaatcattacagatcatgggcagctcctcagtaagattaagtgctatgttctgttgaatattatacgtattcacttatgtttaagtcatttcgaaggtcttacccagccgaacatggcttctatcagctggaggactgtctgatccgaactgccaccgctcctgtgctcccgtatatccac

SEQ ID NO: 7850 - DNA, 947 bp, DROSOPHILA
cttttgcccaatttcaggatgaatacaattcgtccttgcggttgtaagggcgttcgcacctgcttgagctgcgaacaggactttcatatagcgaagacctcgctacgggaacaattccagcaactggaagcatggtcctactgtatccagtgcgaccttctgcagcgcggttgggataccaatcatgtccaaaaggatcatgaaaatcacaaaaaagatgagggcctcccactgccgggcatcctggtgcaggaggaattccttagcgttgatgagggcgcccaacttatagccgacttggatgacctgccatgggacatctcgcagagcggcaggcgaaaacagaacttcggacccaagaccaactttaaaaagcgcaaactgcggctgggatcctttgccggattccccaggacaacggaatatgtgcaacggcgcttcgaagacgttcccctgcttcgtggctttcagaccatcgaacagtgctccctggagtacgagcccagcaaaggagccagcatagatccgcacgtggacgattgctggatctggggcgagcgtgtggtcactgtcaactgcctcggcgactcagtgctcactttgacgccctacgaagttcaacaatcgggcaagtacaacttggacttggttgccagctacgaagatgaactattggcgcctctactgacagatgaccaacttgcaacttttgagggaaaggtgctgcgcatacctatgccaaacctctccttgatagttttgtatgggccagcgaggtaccagtttgagcattctgtactacgcgaggatgtccaagagcgccgcgtttgtgtagcctaccgggagtttacgcccatgtacatcaatggcgtagacatccaaaagggagatcctgtccgagaaaagtctcagatattctggcaaataaactagcaaacaagaccaat

SEQ ID NO: 7851 - protein, 304 aa, DROSOPHILA
MNTIRPCGCKGVRTCLSCEQDFHIAKTSLREQFQQLEAWSYCIQCDLLQRGWDTNHVQKDHENHKKDEGLPLPGILVQEEFLSVDEGAQLIADLDDLPWDISQSGRRKQNFGPKTNFKKRKLRLGSFAGFPRTTEYVQRRFEDVPLLRGFQTIEQCSLEYEPSKGASIDPHVDDCWIWGERVVTVNCLGDSVLTLTPYEVQQSGKYNLDLVASYEDELLAPLLTDDQLATFEGKVLRIPMPNLSLIVLYGPARYQFEHSVLREDVQERRVCVAYREFTPMYINGVDIQKGDPVREKSQIFWQIN

SEQ ID NO: 7852 - DNA, 4210 bp, DROSOPHILA
atgtggaataaattaattatattaatacgctggaaccacacaacatgcgcccaaaacgatgatgataatgatgatggtgtgcaggtggttccgctcttttcatcttgtagttggtgttgttgttgattttgttgtgctgcactccaaacttccaccactcgcacttgcactttcgctgctgcttcctcgacttctcctcctcctcctccagcagaatcaagaccatcccgatcctgatcctcttgcccagacaagcgatccttcttagaagcacttgcggtgcacaatggaggggccggactcgtcgtactcctgcttggagatccacatctgctggaaggtggacagcgaagccaggatggagccaccgatccagacagagtacttgcgctctggcggggcaatgatcttgatcttcatggtcgacggtgccagggcggtgatctccttctgcatacggtcggcgatgccagggtacatggtggtgccaccggacagcacggtgttggcatacagatccttacggatatccacatcacacttcatgatggagttgtaggtggtctcgtggatgccgcaagcctccattcccaagaacgagggctggaacagggcctcggggcagcggaaacgctcgttgccgatggtgatcacctgtccgtcgggcagctcgtaggacttctccaacgaggagctgctggcagcggtggccatctcctgctcaaagtcgagggcaacatagcacagcttctccttgatgtcacggacgatttcacgctcagcggtggtggtgaaagagtaaccgcgctcggtcaggatcttcatcaggtagtcggtcaaatcgcgaccagccagatccagacgcaggatggcatggggaagggcataaccctcgtagatgggcacggtgtgggagacaccatcgccggagtccagaacgataccggtggtacgaccggaggcgtacagcgagagcacagcctggatggccacatacatggcgggtgtgttgaaggtctcgaacatgatctgggtcatcttctcacggttggccttggggttcagcggggcctcggtcagcagcacggggtgctcctcgggtgccacacgcagctcattgtagaaggtgtggtgccagatcttctccatatcgtcccagttggtcacgataccgtgctcaatggggtacttcagggtgaggataccacgcttgctctgcgcctcatcacccacgtacgagtccttctggcccatgccgaccatcacaccctggtgacggggacgtcccacaatcgatgggaagacggcgcggggagcatcgtctccggcaaatccggccttgcacatgccagagccgttgtcgacaaccagagcagcaacttcttcgtcacacattttgtaagctgcaatggaaagaatgcggatttcccattagtttttggttaccttatttggtaatgtagaaatggcaaaaaaaaaactgagaatttgcgtggtttccttggactgcgctggtctaccaaagtacaattgtcataacaaactaacttgtttttcgtgtacaattaaaaatcactcaatgcaatgtacgtttttttagtacaaaattttaatcttggacaaaaaaaatttcataaaaaaatacttttccgattgaaaactgattttcacttgcgatcgaattgtaataagaaattaaaagaacagttacaaaatagaaggccccgccccgaaaaattaaaaccacaatacgaatatgccgaaaagggaggggagaagcttctagacgacacttaacgaatgccggtgcaaaagaaagccgcaaagagagcacagttgcctgtgtgtatgcgcccttaaaatggcggctgcctaaaactcgaattggaacccgaaattaacattacaaaataaaaaaaaaaaaaaacactaaacgcactctagaaaatttaacaattaagagccacgaaacttttcaaagctagttaaactttacctttttgttcgatttaacaaattcaaggcgtgaaaactactgtaaacgcaagtggcgaggctgagctaagcgaccgcacggtttgaaaggaatgactggaataaaccgactgaaagtggctggtgaatgttgaatgccagttaactgcgtttttcaatcgctgcctgcgtcgacgtcgccataggcgtcgctcgctctcgccatctcgctcgctccgcgccatggtcgctatgggtgcgaaggagagcgctggtgtgttgaattgcggcggccaagttttgtgaccatatatggtcatgtttcgaggcgaaaagcaaaccgtcgtctggctttcgctctctcacacacacatacactctctctcgttattttgcgcgtgagtgtgtgtatatgaacgaatgctcgaaggttttctccatttttgcaactacaactttgaaaaaccggcaaaaatttctgcttcagccaaaacggctgcctacgtcactattttcaagaacctgatctagttttacagattataatatgcatatactgtatgtatgtacatttatggatgatctggtgttttagggcgtgggaaaaaaagaaagtgttggcgaattgatttgcaattcgtaatttggcatatctttgggtgaaatcgtgacacgcccacatcagcgagcttggctttaaacactatattagatcctaacatttgagttggggctattgaattgctttggtttttataatttcgtataatttgtatgtatatatcctgaaatctgcagttgtaatcctgattcttgagttatggtatttgaaaccctggttttgttaattttgatgtctttcgacctattggtattttgattgacaatttagggccaaacttgggtatttttggagttttggtcaatacaataactctttagctcgtggctagtattttttgatcactttcagcactggcacataaaaaaatgttttgtttacaaaaaaaatcacacattttccgcggcttttctcgattattgctttttcttggtgggagtggttcgatggtgttttgttgttgggaaggggaaagctacttacatttggtgtgttttattaaaattaattaaataaatataaattaagtctttcggtttggtgtctctggattagacgactgctggctgatggagcggctttgtgtcgggaggagtatccacacagcacaagaactcaaacggtagtgatatgaaaactggtcccgcagcccgttttataaagcccgcttagcgctaaaaccttatcagccgcaatgctctccgctctcaagtcgcgttcaaaacttttaccatatatgggtatgaattgttcgccgattgggttttcatttacggagaatttcctccgcaactgggtgttcgtgcttgtgtgtgtcttgtatatcgccatgaagagtgtacttccatgggtcctatcagttgcggcatgtgattcaatttgggggttactcatattcgatacttcagctggttatctttatgctgtgatggtcacggtgcttttacacattttttccccaactactcattgtatgccaaaacatacatatgtacatgtgtttatagtgggtttattagtaatgtccagcgatattaaaacattacagttaaataatattcatattagcttacgtttactgctatctgcacttcaaattggttattccagggacattttgtgcaacacacatcttctagtagggcattcactagtcgtagaaaacacacctaacttaagccggttttaacaataacggcgaaacagctgccagacgagagaaaagtacacagcaagaagcatttctataatgatgccgtcctaaatatgcagcatttttgctcaaattgatcatttcgttgcatcgctcaggtggtatagtatttggctattgaatgtgattgctatcttaatagttttgaatagtaatagtgcaaatattcattcataaaaaataggtaatcgattttttcagtgcagtctatgcgtttgcgcaacagagacgaagagagagacgcctcacacacaagcacatgcggtctaagctgctctccctctttttctctctctctctggcttgcggcagttttccagaggctgtgactcagtaagcatttcttgttgttaccctaacgataagcgtccgattcctaattctctttcaaataatttgtt

SEQ ID NO: 7853 - DNA, 1379 bp, DROSOPHILA
ttcttgtgctgtgtggatactcctcccgacacaaagccgctccatcagccagcagtcgtctaatccagagacaccaaaccgaaagacttaatttatatttatttaattaattttaataaaacacaccaaatactttcagtcggtttattccagtcattcctttcaaaccgtgcggtcgcttagctcagcctcgccacttgcgtttacagtagttttcacgccttgaatttgttaaatcgaacaaaaagatgtgtgacgaagaagttgctgctctggttgtcgacaacggctctggcatgtgcaaggccggatttgccggagacgatgctccccgcgccgtcttcccatcgattgtgggacgtccccgtcaccagggtgtgatggtcggcatgggccagaaggactcgtacgtgggtgatgaggcgcagagcaagcgtggtatcctcaccctgaagtaccccattgagcacggtatcgtgaccaactgggacgatatggagaagatctggcaccacaccttctacaatgagctgcgtgtggcacccgaggagcaccccgtgctgctgaccgaggccccgctgaaccccaaggccaaccgtgagaagatgacccagatcatgttcgagaccttcaacacacccgccatgtatgtggccatccaggctgtgctctcgctgtacgcctccggtcgtaccaccggtatcgttctggactccggcgatggtgtctcccacaccgtgcccatctacgagggttatgcccttccccatgccatcctgcgtctggatctggctggtcgcgatttgaccgactacctgatgaagatcctgaccgagcgcggttactctttcaccaccaccgctgagcgtgaaatcgtccgtgacatcaaggagaagctgtgctatgttgccctcgactttgagcaggagatggccaccgctgccagcagctcctcgttggagaagtcctacgagctgcccgacggacaggtgatcaccatcggcaacgagcgtttccgctgccccgaggccctgttccagccctcgttcttgggaatggaggcttgcggcatccacgagaccacctacaactccatcatgaagtgtgatgtggatatccgtaaggatctgtatgccaacaccgtgctgtccggtggcaccaccatgtaccctggcatcgccgaccgtatgcagaaggagatcaccgccctggcaccgtcgaccatgaagatcaagatcattgccccgccagagcgcaagtactctgtctggatcggtggctccatcctggcttcgctgtccaccttccagcagatgtggatctccaagcaggagtacgacgagtccggcccctccattgtgcaccgcaagtgcttctaa

SEQ ID NO: 7854 - protein, 376 aa, DROSOPHILA
MCDEEVAALVVDNGSGMCKAGFAGDDAPRAVFPSIVGRPRHQGVMVGMGQKDSYVGDEAQSKRGILTLKYPIEHGIVTNWDDMEKIWHHTFYNELRVAPEEHPVLLTEAPLNPKANREKMTQIMFETFNTPAMYVAIQAVLSLYASGRTTGIVLDSGDGVSHTVPIYEGYALPHAILRLDLAGRDLTDYLMKILTERGYSFTTTAEREIVRDIKEKLCYVALDFEQEMATAASSSSLEKSYELPDGQVITIGNERFRCPEALFQPSFLGMEACGIHETTYNSIMKCDVDIRKDLYANTVLSGGTTMYPGIADRMQKEITALAPSTMKIKIIAPPERKYSVWIGGSILASLSTFQQMWISKQEYDESGPSIVHRKCF

SEQ ID NO: 7855 - DNA, 6419 bp, DROSOPHILA
gctaaagcactaatctgatgttgtttttctggtctaggatcctacgatctccgccatctctaatgtattcgctttcggttgttttccctttctattccatgtgaaattctgggtaaacaatagtcgtgttcgcactttggcgagccctctggaatagaaatgtgttggaatgacgatcgaggcacttaaaattccttgtttactatatagtaaactatggattaatctcaaaataggcttggcaaaaaatcatcatgacatttacatttcaagcgatttcgatgtgacgaagttaggggtaggtttgggattgttccaataatttagtaatttgtttactgacggtataaaggttgacaacatttagttgaaataaacaactattggttacaaagatcgtttcaatagggtaatacaaattctgcttgatcgcctattatgaaattactcaattactcaacagtataacaaataaattcaattaaaataaattactattaatagctttataggcattaatatattctaaaatgaattctgcacgagggcgcacttcgagtaattaaaatgtagccagtatgtatgtattcataaaaaaagtttttatcgcattattattatcatttcttttttaatgcgaatataaatgttgctttgtgaacttgttataattgcgctgtgattattgctttatatacaaattcgtacattaagatataatccctcctacttttcaacatcgctcccagctactcatcccgagatatccagaagactaattcgatcaactccggctggtggtagccccaccctctctgggctctctccaccgctagcgatcagtgctccccagagagaaaacccacgtaactctctggcactccaattcccagagaacacttcgtgaaactgccgagagccgaacgagcggcgacgattgccgagctgtttgatcacaaaactggctgccatatggcgaaaccagttagtcgccatccagagccgctagaccacgtaacgccacgattttcgccggatccaccgattcgattcgattcgccgcgatcgtcagtgcctatatatacagttcccaacggagccgagcgataaagataaatgtgcaaaaacaaagcgcacttagataaagatagcgaagttctcccatgtggaaggcacagtgcaagtgaagtgaaacgagaacgcagttttgaataggaaatacgaaagtactcacatatatagagaacccgagacttggagtcagaatgcaaatgtggcgagcataaagtcgcaaagcgtgaaaatctacgatatatacgagtatagtcgattccaagtgtcagccaagtgaaacccagtgtgcagccgaaaccaaaccgaatgactatgacttctacggtgctccaacggcccattcaagccaagccagagaagaaggcctcctccaaatcgaccagctcctcgagaagccgctccacgatggcctggtccaatgagaagctgcgcttctcctgcatcgacaacatcggactcaagcagctatggaagctgattgccctggacacgagtgcttcatccaagcagcgcagtgccatgatgttggaagtggagcaacagcagcaacagcagcagcagcagcaatcgaacaacaataacgaggtaagtggccgaaagaaaagaaagcttgtaagcgattgtgacgtcaatgaggattggggcaacgcatccacatccgcgtagaaagccaacttgcagagaaagtgaccaaaaaaatataagtaagacagtcgaaaaaagcatacggggtgctggtaaactccgactccggatcgtgaatgacgtctgtttgttgtggacggacacattgttgaaacatctgtgggtctccacccagtcaccaccccaaatatgcgaatggcaaacagagtgtggtgcgggggagctcggaggagggcggcctggaattccaataatccacgtaacgccaatttgcatactactacgagtctgcgctaattaaagccggagcaaatgagacccgtgagcgtaactcagccggacatggccagttatgatcacacatcgccagcagattgagatgtggacacttggcttgtccgccagtggggacaatcgaatcgattcatttcgattccgtttcattaaagacaattgattcgttgacaaagacgagagagattcatctccctttttagacagtcaagtccttatttcattcagtgattgaagccctcttgggtttattgacttcgtttctctcagtgtgatcacttggagcactctcgatcgtttcaagtgtcaagtgcagcggcccacacacttaacggcctcagctattatccgtttatttcggacattttaattttgaggtgctttaagatcaaggcttgcgagcagagcgaaggttattagaagcacggcgatcgggtttggggctactaatctagtttctaaatgtaaaaccatggttattccccctaatcgaaccgttttcatcttaattatgtagcccattccgttgattcgaattcgcggtgaatgtcgaactttcgcagagtgattcacgtagattttcgtgtaagcggcgatgagtgcagcaaagggaacaagacgttattcatattgacgcacttcggatccggttctcctccggctaacggttgggttactcatgaccaatgtgccagccactagaactgcgacttagaatggtgcttagtggtggtgctaaaagagtcgcatagtttctggccctgggacacggatctctaaccctctgctgatgggctgagtattgcgatattgatactttttttaagccaactggtttgaacccccttcgggccccatctgccacctttcccttcagcagggtagcccctggtcgcccctttcgttggattgacgtcaatgcaaataaactccccgacggaccgagactatcgatatatcaaagaaaccccccagacggtctgggccaatttcttctcctcgccacggtattgtattataatgtcagggttgtgttctagaaaacctgcgaaggctgctgcacctgagtcacgcccatcgcgttgaggatcctgaaaaaccggcttcatgttgcatgctgcaggttcagggtcaaaagcaaccagccctcatcggggttaggatggagccgaaactaaggtgaaccaagaatcctacatttagacagtttaaaaaaatatatattaattcggcaggttgattaacagctcagccaaagcgccctgacgtcacgcgcataaatttatttgagcaaaggtttagctattttttttttttttaatttttttttctatttgcctctttggtgtgctttaattttttcgttgctattttgtttctgtccgttaacacgttcgtccggcggctatagaatatgttaagtagtcataaataaacactactaaactgtgggcttagttaaacgccggagaatcgcaacaaaatgaaaaaaaaaaaaacagtctaaaaataacgatttggctgaaatcgcggccaaaacgcactcagaacccgaactcgatctcgaatttgaactcaaatgaatgcgaatcgaatcgctcaagcgaaaagtgctgtaattttttgttgttacccgatgtcagagttaaagttaattattgttttgttcacattgcggttttaacttttcatctgtcagaagtgatttcgctgaggttttccctttgtcgagatttctgtgaaaaaaacaatatcacacacgagcgaacatcatccaagtgatgagataattaaacatgtaatagcatataaaagtgaagtaatagggtgaccccgattctttaacagtatgacgtacttaactctaatccaaatgaatgcccatgtgctaatttcaaccaggtggtggtggcgtacgtgcaaaaatgtacaaatatagactatttaatgggctcgctgccaatctgtagtatagtaaatgcagttgtaaaacaagtagtcaatgaatacaaaccgctgacgtcgattattccgatcgaagctataattaaatccccgttaactccgaagcgtaacatgtaactctcgataaaggtcagtgctgacgacacgatcaaacgaacctcgaatattaattattggaatctgataggcggtgctcgctccacctcaaacgaatgtgacatcttattagcgcctaattaatacatataatgggggggtctttttggttaaccatcgatatggaaatgcgagacgagaggccaatagaatttgaccaaaacaggtctgagaaattacaattttaggcgccgttagccaaatttcacattcaaagcgattctaaagtcaagaatcatggtcgccattcattatctctaacccacatctatggggatttcgcagttaagccagtgtatttgcaccctcaaatcaaacatttgccaaccgctaactgccgcaaaatgataagcccaagatcataccatacaccactgataagcagcgatgaccctggcaacgggtgttcactgtgatgccatccacccctttttcatcccttcagctcagtgaaatggaacgcgtgacgaatttgtgccacatgtgcaaatttgccgacttacgtaaagatcgctcgccattcggggcaatgctattagcccaagattacgggcgttggtagggaactgcttaagaatacgcagtgttatctggccagttaagatacgataatagtggagagataagcgcaagaaaacaagagcagaaacagataggcggccatataagatgggggggccgaaacaagttccgcggcatttaccttaattagtcaattaatcaacagcaacggagtgaggatcgtttcggtttgtatcggattggttttgatcagttcatattggctcggatcgccttctacgctgacagatcgttatttgttatggccaatgcttatggctcaattcgcataggcagcgcaaacaaaaacaaacgccaactttgcatactaagtgcctcattagggacacggcagtgccggggatctcggtcgtaaaccacacacgacgacccatcaagtggctccgcatttttatataagcataaacaaaacgggccgcctagaattttttttgccatttacccatgcattcggcttgaataattaattaacgccttcgtgagtcacaaaatgcattgcaatgttaaatattttgtatcaccttcttgcactgactaacaaatttattcatttcctttgttacagcggatacccaacgagaactgcgactatttgagtctacagagatcgggccaggcgccgaagaatcacatccaggcgcaggatccggctcagatgtccctgctcaagttcttggccattgtaagtaccccatgttgttagcacactcgtctcgtggcaattggccagaaactttccaccgtagcgcttcctggtcaggagcctcggacaatgtgcgatcggttggcctggcgagctgcctgcataaatttcacgtttacgaggctgtgagttgggcgtggcccgtcggctggcaaataaaattcgtttgattatttataatcgctgccggcggacagtaatgtttccctctggcgaaaaagatcgaggcaaacccgttcgcagccgcgataactgcaatttatcaatgaatgcgtatttcttgttatcctttactaagttaatttttttcttctttcgctttccagaatgccctagagctgagtgccccagcaacgccacatctcctccagcatcagcaggcccacaagcaggcgaagccacagggctggatgcagctatccggtcacccagagaggtaaggatcttaccaataacttaaattttgttttgaaaacaaacattttattagtcaatttactaactgctactattattcttattttgcagcattgttcccacatcgactggaatagtgcgcaaacggatctcaggactggaggatagcgaagtacatgcctaccgactgatctgcaaggaaccacagaccgctcagatagtgcccgcctactttggaatacaggagatgcaatcacagcactttattgagctgcaggatctgctggctggctttcgggatccgtgtgtgatggacatcaagatgggcagccgcacctttctcgaatcggaggtcagcaatgccacgctcagaccggacctctaccagaagatgatcgccgtggatgcgggagctcccacgcctgcggagcacgaggcacgagcgatcaccaagctgcggtacatgacattccgggagtccctgtcctcctcccactccaagggtttccggatcgaagcactgcgtctgcgcggacgaccgcctgtcaaggatttgaagacgtgccgaagcagcgagcagatt

SEQ ID NO: 7856 - DNA, 797 bp, DROSOPHILA
agccgctagaccacgtaacgccacgattttcgccggatccaccgattcgattcgattcgccgcgatcgtcagtgcctatatatacagttcccaacggagccgagcgataaagataaatgtgcaaaaacaaagcgcacttagataaagatagcgaagttctcccatgtggaaggcacagtgcaagtgaagtgaaacgagaacgcagttttgaataggaaatacgaaagtactcacatatatagagaacccgagacttggagtcagaatgcaaatgtggcgagcataaagtcgcaaagcgtgaaaatctacgatatatacgagtatagtcgattccaagtgtcagccaagtgaaacccagtgtgcagccgaaaccaaaccgaatgactatgacttctacggtgctccaacggcccattcaagccaagccagagaagaaggcctcctccaaatcgaccagctcctcgagaagccgctccacgatggcctggtccaatgagaagctgcgcttctcctgcatcgacaacatcggactcaagcagctatggaagctgattgccctggacacgagtgcttcatccaagcagcgcagtgccatgatgttggaagtggagcaacagcagcaacagcagcagcagcagcaatcgaacaacaataacgagcggatacccaacgagaactgcgactatttgagtctacagagatcgggccaggcgccgaagaatcacatccaggcgcaggatccggctcagatgtccctgctcaagttcttggccattgtaagtaccccatgttgttag

SEQ ID NO: 7857 - protein, 138 aa, DROSOPHILA
MTMTSTVLQRPIQAKPEKKASSKSTSSSRSRSTMAWSNEKLRFSCIDNIGLKQLWKLIALDTSASSKQRSAMMLEVEQQQQQQQQQQSNNNNERIPNENCDYLSLQRSGQAPKNHIQAQDPAQMSLLKFLAIVSTPCC

SEQ ID NO: 7858 - DNA, 3092 bp, DROSOPHILA
aaactttaaaaatacttatattttgataagtaaatattcatttattggctaagaattacacaattagaaaaagtaatgtttcgcaaagctaatcacatataaaaacaatttccatcacttgatttccaattttgtgaaagggttatcatgatttgttgcaaaaaatttaaatgattaaagttttattacgaggtaaacgaggtatttggaccactgtaatgcaccattttcgacgcaataaaatgcaaagtttccctggtttcgacaccaggggatcagaaatcatagcaggtgccagctggtttccgcaagaacatgaaaataactgttttgttttccagtaatttttcgaccaatgggaaatagctatgtggaaggcaaccgtaaattaactttgagaaagctacagtaaaatgtgacaaaatccatgaaaccaaatggtccttggtcacctcctgaaaattatgttcgactagtgtctgaacccagagaaagttgctattttgtactaagtcttgtttcagcccgcggacgagatctttattttcttgtatcgtttttggtttccgacaccaggcaaacagaaatcatagcagttgtcagttggcagcacagattaaaaccaaaacatctgatataattcatgatggctgctgtctatgcatttccagtcaatattcgaccaatagaaaatcaagaggggaagttaaccgttaatttgcaactaagcacatacacactagagccaatcacgacaggcctgaaataactgtaaatttcgtagtactttgagcttgagaagtaatcagctgatcgatgcacgccctattcttttttctgttcgcctagtgtcgtagattcaaaggttaccccaaaaaaggtaaaatcaaatttttgcgccatggagcaatccaaaaatccgccaaacaaaaatactaaacttcggctaagcggctataatttagccgattgagcagcactgccacagacccaaacatttcgctcccttgttcgtgttattgcagcgcaattaaataagatacgttagttgtggccagtgctgcaacttaccaccacccggatacaccattccctagcgcgatgtcacaggtttacttgctgccggtgctcacgttcctgatattccaggtcacctttcttggcacgtaagtacgcagggggtgcttccccgattaccgggctttctgacccgactgacgtctcattggtctccaggtacatcttcgccgtgctggaggggcatgtggtgcccacggttccctacatcagcgatgcggccacctactcgccggaaagctgtgtgttcgggcagcttatcaacataggcagcgttctgcgtgagttcctctcccggcatcccgtctcgtctccagagacgatgagtcatctgttgattagacgctcttgcagcggtgtgattatactttctaagtgtctcatgctttgcagttggaattaccatctacgtacgctaccgtcaggtgctgcagctttatgaacaccatccggatttggacgggtcggtgctgcgccagaaccgactagccttgtggttcggactggtgtcctgcctgggcattagcttcgtgggcaactttcaggagacgaacgtgcggattgtccacttcatcggagccttctgctgcttcggctgcggcaccttgtacttttggatgcaggcgctcatctcgtatctgatcttccccatgtcgggtacccgcattaacgctcacttgcggctgggcatgtccgttgtctgcacgatcctgttcatcctgctggcggtcaccggcgtgatgtcgcacatcctcttcaaaggacagaatcctcgaaagtggtgagtctgcagactgtcttttctatcagggagatacttacgattgacctctcgactcgtcattttaggtatccctcggacggcggctggtacttccacgtggtcagctctatttcagagtgggtcatcgccaccgtcttcagcttctttatcctctccttcacgaatgagttccgcgacgtgtcgctgtcgcatccccagattgccctgatgtcctattcgaccaccatctagagcttaccttcatagatcagaagatcagatagtagagatcagcgtctgaagtaggcagcggttccttcaccttcaacattttaagtacaatctaaggtggcaagagcacgggcctcgaggacgatgtgctgagcggctgatgtgcactgcggcctctcgcctgcctttcctctctttccggtgctctttctctgtcggattgctgtgatatgtgcaaagtgtttcccaaagactgggatcgggtagttcgaagtgacagaatgctttttgattgaagagttacatttattgtttacccgcgttcgttttttcaatacacattagcattactaaatcggtagaaataatctgtaaatttgtaaaataaagagcaattaaatataagggagtgtttgtctcgcttgtctatcaatcactagcgcttgcgatccctggagcgatcgccatcccgatgcttgtgcccccctcggctgccgtggttcccgttgcctccaccgccgccaccacctcctcctccgcttcttccgtctccaccaccaccgctgttccgacgcgacgaggaggaggagtaccgactgtgcttgccggaattggagacggagttgcgatacttgtcgccatcacctagattattgctactgcctgggtttccagaccgatctttcttggagtagtattcagagcgttctcgcgaggatttcctgaaaggaataagtgctaataagtccacccagttcctaaaccgttagagtacatacgacttcctgtgcttgctgtgcggcgaattggagcgcgtgggcgacctcgagtagtgacgtgactttttcttatgcttcggcggcgaacgggagcgcgagcgggaggatcgactgcggtgggtcttcttagtgcgctcgcgactaggcgacctggacctgggtgatcgggagcgaggtgtccgcgaatgggtgcgcgtcctggatcgcgagcgtgacctcgaatccttttgcggcgacttttc

SEQ ID NO: 7859 - DNA, 842 bp, DROSOPHILA
cgctcccttgttcgtgttattgcagcgcaattaaataagatacgttagttgtggccagtgctgcaacttaccaccacccggatacaccattccctagcgcgatgtcacaggtttacttgctgccggtgctcacgttcctgatattccaggtcacctttcttggcacgtacatcttcgccgtgctggaggggcatgtggtgcccacggttccctacatcagcgatgcggccacctactcgccggaaagctgtgtgttcgggcagcttatcaacataggcagcgttctgcttggaattaccatctacgtacgctaccgtcaggtgctgcagctttatgaacaccatccggatttggacgggtcggtgctgcgccagaaccgactagccttgtggttcggactggtgtcctgcctgggcattagcttcgtgggcaactttcaggagacgaacgtgcggattgtccacttcatcggagccttctgctgcttcggctgcggcaccttgtacttttggatgcaggcgctcatctcgtatctgatcttccccatgtcgggtacccgcattaacgctcacttgcggctgggcatgtccgttgtctgcacgatcctgttcatcctgctggcggtcaccggcgtgatgtcgcacatcctcttcaaaggacagaatcctcgaaagtggtatccctcggacggcggctggtacttccacgtggtcagctctatttcagagtgggtcatcgccaccgtcttcagcttctttatcctctccttcacgaatgagttccgcgacgtgtcgctgtcgcatccccagattgccctgatgtcctattcgaccaccatctag

SEQ ID NO: 7860 - protein, 246 aa, DROSOPHILA
MSQVYLLPVLTFLIFQVTFLGTYIFAVLEGHVVPTVPYISDAATYSPESCVFGQLINIGSVLLGITIYVRYRQVLQLYEHHPDLDGSVLRQNRLALWFGLVSCLGISFVGNFQETNVRIVHFIGAFCCFGCGTLYFWMQALISYLIFPMSGTRINAHLRLGMSVVCTILFILLAVTGVMSHILFKGQNPRKWYPSDGGWYFHVVSSISEWVIATVFSFFILSFTNEFRDVSLSHPQIALMSYSTTI

SEQ ID NO: 7861 - DNA, 13458 bp, DROSOPHILA
caggaacccaaaggaaggatggaaagcaactggattccaaattgagttccacagtccaaaatacagaagcagcgaggtccaaagaaactcctgcacccaagaagaatgttaagaaactgcaggctgcacttccgtgcgccgacgcggctgcaaatcttttggaggaacaagcatctaatgaaatgaatgaagaaggacctcctgtgcccaagaaaaatgtgaagaaacttccggctgcacgtcagtgtgtcaaggtggctgcaaatcttctagacgcacaagaatctatcgaaaatgaagtaagaaatatccaaagatataaaaatatttgttcaaacattacaaaatataaaatatttagaaaacaggaacaaaaaggaaggatgggaagcaactgcaggcacaaaattcgaatgaaaatgaagtaagaaatatcaaaagatatgcatatattaaaatattataaaatatataatatatttagaaaacaagcacattaaagaaggataaaaaactactggcttccaaaactccagaagcagcgacaaacgataatgtaaaatgaagatacagatactaataatattagtatttataaaattccaattttaggcaaatccaaatatgaaaccaagcctaaagaagtcgacaagggagcacaagtccaaaaagtgtaatgacattcaaaaagctggaaaagatcacatcgaacatcaagccgaataatttgtatcacgttgcgttaattgtttttgtttttaaagttcaaaattgattttagttgcttttataagcaaaaatataaatataaataattaagaatacctaataacaaagaatgccgaacagtgaggttaccttttaaaaagccgttacacgcagggttcgtttcccggctaaatggttacccgagctcccaacctgccactggttgcggtgccgtgtattgtcaacgttttccaaaaacggaggtacggtcactccagtctcgggcgctctcatttttcgttcgaattctgaccgggcgggtttattttatcattgctccgcgacttcgaatacgagaccggtgttgtgcgctcctgataactgcgatatattgagcgcgagcgccatgtccttttgctggaagtagaatttgaaaagtgcagagatcacggcttggattgccaaggaacaacggtgttgagactgaatatattttttgtgcgctgtttcgaaatagaaccgttaattggaattggcagtaagaagcagagaggcggacgatattccggtgaaatcttcgccaggcggaaacatcgatcaaaacaaagtgcatgctaaaaacataaaagattcaacatgttcgaactagaggattattcgagcggcatacatgagggattcttcagcaaatatgcggtgagttgaaacaaaaaaggcgagctaagcgagaataataacttttcgcgaacatttcgccggccggccacacgcacccatacactcgcatgtgccgagacacagacaggcgcaatttttgaatttaacgttcggtctccacgttccccacaccccaactgttcccataccgacatgaagagcaaaacccaccaccaagaacagtttggcggcgaaactttggttccactcgccatctcgctcgcccctgcggccaaatattccccgcctcgctcgctccaaagctgtgttgttgactcgccaattcgccctcgccgcgtttaacgtttgtgtgtgtgtgtgtctgtgtttacatttgatcgttaaactttgaaaaatttctttttcgcccaaaaaattgatgattaattacaaccggaacagcggagcgccgataaaaaataatggaagtatagtaccattgcgtttgaggaagtctgctgtttattttgggggttactaactcggctagccgcagaattcacctctgttaagcgactgttatttgcacttaattgtggacatcaattcacttttcacgggaggggattgcctgtattattctacttgtattattaagacacttggagtattttactttggcgcacacagcacaagtctttcttttgttgtagccattcgcaattatttggcttatttattttctgtcacacacagcggcggatgaaacaatagcacaccttataatatattatttcttgcaatttataaggtttaagaatttcttatcttcattttcaaagagtaactctataatataacacagtatgagaggagaaggtaccaaagatttttttttaactaaaaggattatttcttcggcataaatttacttgtataatgttagagagtttctctggtcgagtattcactgtagagttacgttatcacattctacagtttagcacaggttaataaatttgcagtcctatttccttggccgccaatatgcgctgagtactttagtgtgtttctccgccggttcgctgagtttttcgtctggtggcctcttcttcggcttttgcgttttaaactttttgaaggccaagcgttcacctcgaatctctcggttttcatctgttttagtcacagtccaaccaagtggctaatgattttgggccagaaagtgggggtatggctttgaagtttgggctaaactgaccgcctaaattgtcagtccgtcagaggaactgacctccagcaaagtttgcacattttcaatagaaaatcaaacgaacggacttgggaaaacacgtgcgcctgttacttgcaacatgcaaaactccacacacgcacgcacgcacaatctacaagtgttgcgaattcccagtaagcgtgtgcgtgtgcgaaggggaacaaagaaaagcaaacaaaataaatcgtttcatcttgtacgcttgtgtaagtgcgagaacaaaagaaaaccaaaaagcaacagtcgacaataattcccacatcaaaagcttttctcccaccttctccatctctttcgcactgttctctttcgtctccgaggtttcggcaacctttgttgcagcaacatggcagcaaagaaagaaattagtgaaacaaaaatcaaagcaaaaagccaacaaagaacaacttcaaagttcaacgcgctttccactggggcctttcaaatggggcgatttcagtgggtggcggcacacctaccccaaaatgcgcagtaggtgggaaagagatgggcgcacaaggattgtgggaggactgccacttgtctgcatttcgctctgctgccgaatatgagcgcccagctgtatgccgcatagattttctcacggccccagcgcacacacacccatacacatattggtacaaacactagtctgggggcagttgctattacccatataaaacttcagagcgcctaaatcgtgtaataccaaaaagatacttgaaactatgcaaagtaagatatagactaatttaaatacaacttattatgtgtccacatgtcatttgcattttgaagaaatgcattggcttctctccctttcttctttctataagaaaatgtaaatctccatgaagccaactgtttgtttgtatggcaattaagttaatgaacaaagaagttatggagcttgtgtaattcgtaaaaatcgtaagatgcctcaccaaaccaactaattgccccaaaaaaccctcacagtctcagcaaatggacttccaggctaaaaataaacatttggcaaatctgatttcttgaaacacatgcagttaatgaatgaaataacccggagaatctgccgatttacttcccgctaaaccgagagatttgaaaacgatttacgaccctggatcatcctgtgtgtttaaggatgttactttgcgttgggaatcggtcggcaattcaggcaagcgacttttattgcaccataaagtaatttacaaatgggcgctcatgacctcagggaagattcgtccagaaaggtccacggaaatcgttggttttacctgagtgagggattccattgcattccattccttaccatcctcctcccatcattatttaccatctcttcttgtgttttctctgtgtgtcagcagagtgatttccttcggaggtgaaaggcggagaaagatggaaaatatgtgcaacaaaagaaacgaagcagatgcaggaaatgcaggagaacacttacaaccatcgccagtgacgaatcctgccgagaaaggacgaaaataccctcgtcggcagctccttggttcgttgcacaacttgaaaaggccaactgtaggcagctgcaacagagcagcaaaaactttttatggcctacggtgggttgtatgggagggggtgctgaaatacgggagtggtggcggtgtctgtaagcctcgtcgaagttttactgacaacttttgcattttcctttaatccccccgataaccaaaagcagcttgctgtgaactttgctcgcctgtttgatgcatttttatttcggcacattttttcgagaattttttgggggggcagaaaaatggggaaaagaaaaaaaatacaaaataaagttgaggtgtgggggcaaaggaaggtgggcaggcttttcaaactgactacctaggccttttcctcgtgtttctgaacgccgcattcgaaagccggttgatttattacgtctctcgtgctgagggatttattaacccttcacccgcacactgtcctcgttttcccccatttgaaaaaggtgcggaaagtggcaattccttggctgtaaactaattagagccaggaagttagctttccgttggcgcggatgcaattctaaactgtttacgattctggttctggaattgcagcttactgcaggaagaagaataggaagctacagtggtctaccgataatgcaaatagcttctaaaatgcacaaatcgtatattcccatagattgatatatttttgtgcacctagtgttatggcaaatacagaaacatattttcatatttaaatgaatggttcaagatatcaaagatatcaaattatattaaaaaaccataaaatttacataaatgtaatgagaactcctcagttctgaatggtgtaattcactcaatcgatcgcttactgtaccgcaagcaacataacaaaactagagacttatcaaccctcgagttgcagctgcctgagtccgcttcccctgcccctttttcctccaatttcgactggaaactggcaactcaacagagggcaggccaaaaggttatcacacagacagggaaacgcacacacactcaacttgagcgggaatttagcgaggggagatcgaagaaaatcatccagctgagaaggggaagtacctatgttgagcaaaaccctcttcagtcattctatcactcccacaatggagccatatcatatcatctgcgttctattccggttgtaatgctcaattaatgactgcgggggtgaggcggaagggtttggagctgagtatgcgggctaataactggtggaaaggggttaaagggctgcggaattcgccaaacaaaaatacataattcagcatgaaatctatacgaaatcggtgaatcacatttcaattagggtagattagggacaacagttggcgatttggagaattaaggtttgaatcatataaatttggttcgttatatcgttaataatacattcacatgcaaaggggcaactgatttatttggggattatcttcttgggttcaataaacgtacgatataatgggaaaatctgagaattggcagatgcattttgctatatatcattataatggattgggtcagccaacctagatttgcagtcagctttttctcattttccggcaacccataataccccctgttcaaatatcgattaaaccaaatcacggacactttgtaccatatactcttattgccactcaatacaaatcgattgaaaatcaaaaactgagaaactccagaacaccaacagctgctgaagattgccagctgtcccggtcttctgttttctttcttcaggctccctgacttgtgactactcctcctccgagtttcccttttatcgactgtgttgaatgctgcatggtggctgcattcgaaaagcaagaattaccgactgctgacttttagcccggttcgcttgtccgcttatcggccaaacacctgccgccagctaattcgattttgtttgggccaggatgcgccatctgcggaagcagggaatggttcagatgcaactaggagtggtggtccaatgcaattgtgtaaaaccattgaatgaacgattggaatgggaaagccagcactcgaggaaaagttattacttgttgctatcttaaatatcttgtggtttcagtacaatcgagttatatttgcattatatgaatgccttttattataataacacacctgttactttatatttatttagtggcttcccatttccccaagtgcatttcaatagtttaatgggaaaatgggcggaagcacttcgatgccacttgaaatttcgaactgacaaaacagggatccacagaattcccagcatcgcccccttttggcattcctcacatcccgattattatttcgtcgcagacacatgggattgcgcattgggaatggggatttctggtgaaggggttgtgaggaggataaaggtgcttctttggggagcacccagttctctccgcctttttcagtctgataaaagaacccctgaacatgcgcctgcaccaatttatgatatcctgctaaattatgcaacttatcactctcgtgtggcaaacttcatatatacgtacaccgtacacaaacatacatacaaatatcatcattccgctgtgtctatgtatgtatgtaagtgtatgctcttgtctatcgattttccatccttcccgcgcataaagcaaaacacttcagtcgtcctcgttgagggtcaccaagggaccccgcccccttttttggggtcaggtcagtgttttgtgttttctgctccgcttcaaggacaccttgacattgaactccctctctctctaactcgctcgcttttcgtctcgccatcccactcacacgccgcatctaacagcagcgccacttttaacagccgcccaaaaactgtaaagtacgaaaagcatccaatttcatattacatttttccaacagagctgcgaataaaagccgaaaagaataccaaagttcgcaagcgaaaacagcaaaaagcaaaagtactcgctgtgtttttgctgcctttgctttacttcgtttctgttgttggccgccttgtgttttccgttctcagtaactcgccgcatgttttgttgcctactgtacgcgcaacagaggtcgcaacttcgcctctgtggcagctctgttgtgtccgttctatgtttttcgtaaatttcctaccctctctttctggctctcttggtcatggtctactctcgctctccgtctctctcaacttcgccgcatacatagagaaaaaaaaaaggggaaacaacaacggctgagaacagcgcaagcgaagtttccctgcttttctgtttttgtacggctttaatattccttttttgcctcgcgcaacactgaagaaaattctggaaaggtagttgacaactaaaaaaattattgggctaacatttttgtgaattgttatacgtatgtacatatgtatgtatgtagatccacatttaaattcaaaaagtgagtcactattggcgaggaggaagagagcttacgacactataggcgcagcaagatccccgcgattcctcgattgtgttgcataaaactttcaatttttctgatatccggtttggccaccaactttgttgttgctgctgtgtggccttcccgcggcctggacctcgactccttttcctttgcctcccacttttttcgttatgtttatgttgtgtaaatacagcgagcgacaaaatagtagcattttaaagataacacgaaaaattttaaccaatatcgaaatatttctgaaatttttcttaaatgattcttaaaagtttaaacatgcaaacaattttataagacttaggttgtgtttattttgctagccaccactgtatgtactctcagaaaatgtttacatgttgctgatactttttttgttgtactggttctggtgttgcaacatgagttattttcgttgttttggttgttgttgggcgtgctacagggaactcagaaatatccaaacccccgactttttcccttttcctatcctttggccgtctgcttcggttttgtttattttttttcctcttacagcctgcctgccttggcgcgcaaaactggttttgaactcggctctgttgctcctgtggtccctcatttgttgttgttgctattttgtgtattgttgttgtccgtgcctcatgtagaaaatgaaaacttatacgatccccacaaatatcagcacagggatatcggattcgtattcggacccagattcgagcgacttgtgttacagatttaatcattataatatatgtacatatgtatgttcttatatacatacatatacttgtatgtatgcgtgcctatatgtgtgcaaaggaattgtaacctatggaattcttaggaaaataaatgcgcgggaaaacgatcagtacgtgtttctggatttgtttatgttttgattgtgctaagcgtagcggataaaatgaaatagtatattcttgcatagcgggcaaatacttgattcctatatagtatgcaataaatgcaatagaaatgcttgttatttgaaataaaaaatataagatatttttttattttgaaataattaagcaactaatcagttattgttatatcttttaacgatagaaatatattggcagtgcaaaaatgacacactagaaaaattttcggttattgaccaaaacattttaaaaagcttaaaaacaatatcaactgtatttacatatatcaaaatgtattttacttctgctctgcaggatgcggctggaccctcgctagacttttatgtatccgactcgatgcaggagatgctgaacgtggacatccgcgcagagatcgccaatgtggtgggcagttccagcagcgacttgacctcgtccctggaccaaacactggaagctatatccgcgataaacaacaaccagagcaatggaaacagcagccagtcagcttcttacaatgcgaatgcgaattttctgaccagcagcggactccacgcctcacccacagcgaaatggatgggctcgtcggccaatttttggtccaacagcgattactatgcggatctgggggcatgtgtgaaccccatttccgtaatgccactgataaattcgacttctgcaggaatgttctcgccaaaaaaaaacaagacagcctcaagtacgcagggaagatcgggagcggtgccctcgtcgcccagcgccgaaagggatcagcacaaatcgcacctgacattttcgccggctcagatgaaggtcagtgcaggatccatgcggcgggaccaggtgatggcacacattcccaagcaaatatccgtggtcacgggcaccggaaccacagcgcccgccacaatggccaccaattcggtgcttcaacggcgtaattcctcggccgtggatgctgtacgtaaggatttggtcacagagctgcgtaaagcacaatccagtccagtgcccaattccttggaggagctgggcaagggaaaaggatcaacactgctaaatgccagtgttggggcgaccaacaccattaaactggcgcccggtatcggtgggttaacctttgccaacagtgcagcctaccagaagctgaagcaaacatccttggttaagtcaccaggcggtatttcgccaggagcaggatccaatatgggtctcaagcgggaggactcaaacaagcgaggactgcaggccagcaccacgccaaagagcattgcttcggcggcaaactcgccgcatcatcaaatgcagagcaactacagcctgggatcaccttcatcactgtcctcctcatctgcatcctctcccctagggaatgtgagcaacctggtcaacatagcgaataacaatacaagcggagctggatccggcttggtgaagcctctgcagcaaaaggttaaactgccacccgtgggcagtccatttcccaaaccagcatactcgtactcctgcctcatcgctttggccctcaagaattcgcgagcaggatcccttccggtctcggaaatatatagtttcctatgccagcatttcccttacttcgagaatgcccccagcggctggaagaacagtgtgcgtcacaacctgtctttaaacaaatgctttgagaagatcgaaagaccagcgacgaatggcaaccagagaaagggctgccgttgggccatgaatcccgatcgtatcaacaagatggacgaggaggtgcaaaagtggtcgcgcaaggatccggctgccatacgtggagccatggtatatcctcagcatctggagtccctggaaaggggagagatgaagcacggatcggcagactcggatgtagagctggactcgcaatcggaaattgaggagtcttcggatctggaggaacacgaattcgaggacactatggtggatgcaatgctggtagaagaggaagacgaggaggaggacggggatgatgatgagcaaataatcaacgattttgatgcggaagatgagcgtcatgccaacggaaaccaggcaaacaacctacccatcaaccatccactacttggtcagaaaagtaacgacttcgatatagaggtgagtttgaaaaatgatattcgtgaacgttcaattttataatacccatttatttttcaggtcggggatctatacgacgcaatcgacatagaggatgataaggagtcagtgcgtcgaattatctcgaatgaccagcacatcattgagttgaaccctgccgatctgaatgccaccgatggctacaaccagcagccggcattgaaacgggctcgcgtcgacattaactatgcaattggtcctgctggcgagttggaacagcaatacggccagaaagtgaaggtgcagcaagtcatacagccgcagcagcatccgcccacctacaacaggcgcaagatgccgctggtcaaccgcgtcatctagagcggggcacagcccaaaaacccattacattaatcaattagttttagacctttggcatttaagaaacccatgctacgcttaaacgtaatcctagaagccccatcattcaatatcgaatatcagttttcagtttcgtgtgcaaaacccaaattgttattaaatctcccttcctatttgtagttcagtttggctgctgtttgattttaaatctcgattagagcctgtgccaactgaaaaagagagataacttgtgcccttttgtttttgcttaatttaaatctttctatagtcgcttctcgaataaatctgtattatattgttcgaaaagaactgagatattgctccacttgacgatatttccgttttaattcgcctgacgcttgaggagaaaaactcaataggttccactgacgacgcatgaagcatgttaatactttttaccagactcgagctggtttgagttgcaacttttgatttgatctccctactgacaaataaattttcatccttcaatcgataagaaacttgacaatgcatttatgacaaacgattccacgcttagtcgtagaataatattaatgtgcaacacaacgattactttgacaacgaaatgtgaacagtaggtttatatttcgaacttttgttgattatttcaccacatggtgacaatttgcatttgtttcgaacattttcagctaacatttaagaaaattgaaagagaattgatcacacatacttgccggtccagtattcgtaagcgaggtatattgaggatttttacagaacttttatacgaattgtactatatatacatggaaaaccaacaattaatgtcggaaagttcagtcaattaataatatggatattttataaggcggttccgtatgtaaatagtttacacgcagagaataaattgtatactatggcatagatgtaagtaatatgtatgtaaaataatttgtaaacgaaatccgaattccaaataatacaagatacgaaaaccaataagacttaaaagaagcgtaccagactaatgaacatgatcaggcctcagaagtaaatagtacaaagagctagacttttgggtccaagcagttacaaagccaactcaaggatggctgatggaattaaaccgtttttgttattacccttttcttttgtgatgcttcgacttagcttgcgcatttaacaattccatttacgaaccaggaacatttatgcattttttgttgtaatattagcacctaaatattgtatttaatcattaagtgaagctctgtaaatctttaagctaagaaaaacaatttttgtatagagttgttagaaaatcaattgacaaaaacaaattgaaaccaaaaaaaaaataaatataataaaattacaccaaatgttgtattattaccatgtactttcgaaacaaaacacaggtatgtaactaatttttaaagctattgagatttttgatgttcgagaataaaaaagactgttttattatttcattgaccatttttatttcacatacataaatagttttgacattttaaaatttcagttttcaaattacttttatttttcaacaaccaatagaacttagatgctagctaagcatttcgcaatttgagcaaaaccagttcccacaaaggaaatgctggtaattatcgtcggtttcttgggccgtacagagcatataattcagatgtgtgctttctaggactagactgttggataccgatgcagttcgtgtcctgcgtatctcataccccttagttgacttaaaaaaacagtttcgctagctgctcgtactcttatccaaaatggcataaaatactctgataagcgcctctgttaaaatacatgtttcgtaataaaatgattccttgtagttaaaatatacatacacgtacgcttatgaatctttatgtataattaatatataggtatggtaaattgtattgtttcaaaattgagtgttcatctttgcacatttaaggcctgttgtttacttagcttaggtttgtgttttgcgttttgagttttgagctgggtgttcctctagaacttgaacttcaacttgagcaagctgttcgatgtgagctgtgttccttcgctataatctatatccttcctgactaattcctctgagtgcgcgtgtgggtgctaagactatgtgtgtggtgtgcgccgtgcgctatgatatacaagatcgtttgttgaaaccagacaaaactgatgccacctccaaacccatcgttatcgtagacagttgattacaattattaatgcacatgtacttaaactaaaacgtatcctacgaatacagatcaggccagacaagaccagacgatgctgtcgcactggctttcaacttgcttgctctctggac

SEQ ID NO: 7862 - DNA, 3887 bp, DROSOPHILA
atttttcgttcgaattctgaccgggcgggtttattttatcattgctccgcgacttcgaatacgagaccggtgttgtgcgctcctgataactgcgatatattgagcgcgagcgccatgtccttttgctggaagtagaatttgaaaagtgcagagatcacggcttggattgccaaggaacaacggtgttgagactgaatatattttttgtgcgctgtttcgaaatagaaccgttaattggaattggcagtaagaagcagagaggcggacgatattccggtgaaatcttcgccaggcggaaacatcgatcaaaacaaagtgcatgctaaaaacataaaagattcaacatgttcgaactagaggattattcgagcggcatacatgagggattcttcagcaaatatgcggatgcggctggaccctcgctagacttttatgtatccgactcgatgcaggagatgctgaacgtggacatccgcgcagagatcgccaatgtggtgggcagttccagcagcgacttgacctcgtccctggaccaaacactggaagctatatccgcgataaacaacaaccagagcaatggaaacagcagccagtcagcttcttacaatgcgaatgcgaattttctgaccagcagcggactccacgcctcacccacagcgaaatggatgggctcgtcggccaatttttggtccaacagcgattactatgcggatctgggggcatgtgtgaaccccatttccgtaatgccactgataaattcgacttctgcaggaatgttctcgccaaaaaaaaacaagacagcctcaagtacgcagggaagatcgggagcggtgccctcgtcgcccagcgccgaaagggatcagcacaaatcgcacctgacattttcgccggctcagatgaaggtcagtgcaggatccatgcggcgggaccaggtgatggcacacattcccaagcaaatatccgtggtcacgggcaccggaaccacagcgcccgccacaatggccaccaattcggtgcttcaacggcgtaattcctcggccgtggatgctgtacgtaaggatttggtcacagagctgcgtaaagcacaatccagtccagtgcccaattccttggaggagctgggcaagggaaaaggatcaacactgctaaatgccagtgttggggcgaccaacaccattaaactggcgcccggtatcggtgggttaacctttgccaacagtgcagcctaccagaagctgaagcaaacatccttggttaagtcaccaggcggtatttcgccaggagcaggatccaatatgggtctcaagcgggaggactcaaacaagcgaggactgcaggccagcaccacgccaaagagcattgcttcggcggcaaactcgccgcatcatcaaatgcagagcaactacagcctgggatcaccttcatcactgtcctcctcatctgcatcctctcccctagggaatgtgagcaacctggtcaacatagcgaataacaatacaagcggagctggatccggcttggtgaagcctctgcagcaaaaggttaaactgccacccgtgggcagtccatttcccaaaccagcatactcgtactcctgcctcatcgctttggccctcaagaattcgcgagcaggatcccttccggtctcggaaatatatagtttcctatgccagcatttcccttacttcgagaatgcccccagcggctggaagaacagtgtgcgtcacaacctgtctttaaacaaatgctttgagaagatcgaaagaccagcgacgaatggcaaccagagaaagggctgccgttgggccatgaatcccgatcgtatcaacaagatggacgaggaggtgcaaaagtggtcgcgcaaggatccggctgccatacgtggagccatggtatatcctcagcatctggagtccctggaaaggggagagatgaagcacggatcggcagactcggatgtagagctggactcgcaatcggaaattgaggagtcttcggatctggaggaacacgaattcgaggacactatggtggatgcaatgctggtagaagaggaagacgaggaggaggacggggatgatgatgagcaaataatcaacgattttgatgcggaagatgagcgtcatgccaacggaaaccaggcaaacaacctacccatcaaccatccactacttggtcagaaaagtaacgacttcgatatagaggtcggggatctatacgacgcaatcgacatagaggatgataaggagtcagtgcgtcgaattatctcgaatgaccagcacatcattgagttgaaccctgccgatctgaatgccaccgatggctacaaccagcagccggcattgaaacgggctcgcgtcgacattaactatgcaattggtcctgctggcgagttggaacagcaatacggccagaaagtgaaggtgcagcaagtcatacagccgcagcagcatccgcccacctacaacaggcgcaagatgccgctggtcaaccgcgtcatctagagcggggcacagcccaaaaacccattacattaatcaattagttttagacctttggcatttaagaaacccatgctacgcttaaacgtaatcctagaagccccatcattcaatatcgaatatcagttttcagtttcgtgtgcaaaacccaaattgttattaaatctcccttcctatttgtagttcagtttggctgctgtttgattttaaatctcgattagagcctgtgccaactgaaaaagagagataacttgtgcccttttgtttttgcttaatttaaatctttctatagtcgcttctcgaataaatctgtattatattgttcgaaaagaactgagatattgctccacttgacgatatttccgttttaattcgcctgacgcttgaggagaaaaactcaataggttccactgacgacgcatgaagcatgttaatactttttaccagactcgagctggtttgagttgcaacttttgatttgatctccctactgacaaataaattttcatccttcaatcgataagaaacttgacaatgcatttatgacaaacgattccacgcttagtcgtagaataatattaatgtgcaacacaacgattactttgacaacgaaatgtgaacagtaggtttatatttcgaacttttgttgattatttcaccacatggtgacaatttgcatttgtttcgaacattttcagctaacatttaagaaaattgaaagagaattgatcacacatacttgccggtccagtattcgtaagcgaggtatattgaggatttttacagaacttttatacgaattgtactatatatacatggaaaaccaacaattaatgtcggaaagttcagtcaattaataatatggatattttataaggcggttccgtatgtaaatagtttacacgcagagaataaattgtatactatggcatagatgtaagtaatatgtatgtaaaataatttgtaaacgaaatccgaattccaaataatacaagatacgaaaaccaataagacttaaaagaagcgtaccagactaatgaacatgatcaggcctcagaagtaaatagtacaaagagctagacttttgggtccaagcagttacaaagccaactcaaggatggctgatggaattaaaccgtttttgttattacccttttcttttgtgatgcttcgacttagcttgcgcatttaacaattccatttacgaaccaggaacatttatgcattttttgttgtaatattagcacctaaatattgtatttaatcattaagtgaagctctgtaaatctttaagctaagaaaaacaatttttgtatagagttgttagaaaatcaattgacaaaaacaaattgaaaccaaaaaaaaaataaatataataaaattaca

SEQ ID NO: 7863 - protein, 719 aa, DROSOPHILA
MFELEDYSSGIHEGFFSKYADAAGPSLDFYVSDSMQEMLNVDIRAEIANVVGSSSSDLTSSLDQTLEAISAINNNQSNGNSSQSASYNANANFLTSSGLHASPTAKWMGSSANFWSNSDYYADLGACVNPISVMPLINSTSAGMFSPKKNKTASSTQGRSGAVPSSPSAERDQHKSHLTFSPAQMKVSAGSMRRDQVMAHIPKQISVVTGTGTTAPATMATNSVLQRRNSSAVDAVRKDLVTELRKAQSSPVPNSLEELGKGKGSTLLNASVGATNTIKLAPGIGGLTFANSAAYQKLKQTSLVKSPGGISPGAGSNMGLKREDSNKRGLQASTTPKSIASAANSPHHQMQSNYSLGSPSSLSSSSASSPLGNVSNLVNIANNNTSGAGSGLVKPLQQKVKLPPVGSPFPKPAYSYSCLIALALKNSRAGSLPVSEIYSFLCQHFPYFENAPSGWKNSVRHNLSLNKCFEKIERPATNGNQRKGCRWAMNPDRINKMDEEVQKWSRKDPAAIRGAMVYPQHLESLERGEMKHGSADSDVELDSQSEIEESSDLEEHEFEDTMVDAMLVEEEDEEEDGDDDEQIINDFDAEDERHANGNQANNLPINHPLLGQKSNDFDIEVGDLYDAIDIEDDKESVRRIISNDQHIIELNPADLNATDGYNQQPALKRARVDINYAIGPAGELEQQYGQKVKVQQVIQPQQHPPTYNRRKMPLVNRVI

SEQ ID NO: 7864 - DNA, 26370 bp, DROSOPHILA
ttttaaacgtttgaatttaatttttttttgaacaaccaaaaattagtgttcacaatcatggagtttttaagcactggcttactaagctaagttaaccacccaaccagtccgtgtcgcgcacccatcatattgcattagccgagtttcttaccaaactagcgctgccaacgcgttcgtaagtactaagcatttattatcaatatcgatacgtctatcggtatgctgccaagtagggtatgtttaaacgaccgacaagcggtcacacgagtgcaagttggattccaattcgatccgtcgcggtgcgtggaaaaaatgcacagatgtagataaatcagcaagcaacgctagcagatcagatagagctatatcgtcgcgaaaaccgattaatttgccatgttcagcggatcagcctgcggatcaattaaaccgtaaaaaacagagcaggcgagcgtaagcaagagagagaggtgaagccagaggcggaggcgcaagacaaagtgcattttcagggcgtgtttttgagacccccctcgccagttaagctcacccagcctcccagccgtcgacaagaagtttgccgacacaacattttaccaacatgctgcaaattcgcaattgcacctgagcggccactagaacaacaaatcagataaatcgcaaacttcctttttcctccgtgcgtgtgtacttctgtgtgtgcgtgagtgtctccaatcttttttgtctactccaaaaacgcagaaagagaaagaaaaatgtgtgcgtgtgtgtgtgtgaaataaattaaagcaaagcaaaaggcaaaacggcaaataattgagcaaaaggccaagagagaagagttaaagctgaagtatataacaagaaaagcaaagcaaataataagtagtagtagtaagcgaataagccgtagcagcaggagccgagagaagagagagaaaagtgtacaagttgttgttgctgcgcaagagcgaaaaaccacccaaccacccactggcaaatgggggctcagcagggcaaggacaggggcgcccactcgggaggaggcggctcgggggcccccgtcagctgcatcggcctctccagcagcccagtggcctccgtttccccccactgcatctccagttccagcggcgtcagcagcgcccccctcggcgggggctccacgctccgtggctcccgcatcaagtcctcgtcctccggcgtggccagtggcagcggatcgggcggaggcggtggcggatccggatcggggctgagccagcgtagtggcggacacaaggatgcacgctgcaatcccaccgtgggtctcaacatattcaccgagcataacggtaagttcctgcaagtgttggaaaacaggcatcgaaagcatgctaagtacacagagcaaaaagcatattttcaaaatttgaaagccttgttaagtcaaattaaacgaaaaacgtctgtacatagtgcacgctcaatcaaaatcgtttttataaaattaggtgtgcactaaaattttgttttctattcgaagttatttagtggtttgatcattttgtgtttcgatttctgtaagcttgacttatttctcattggtgtttcttcttttacattggatcttagaattattttcttgcacattgtagtttgagttaaaaaggcatcaatcgtagaaatcatctggaccaaatcgatctgtataagtgttgtgtaacatacatataaaagtcagaggatgcacaaacatgcatacatttggaggtcccattcacttacacactaattgtaaaaaattgcatgcagcctccaaactcaggtgtaaattccatcatagtattgtgacttttcttattatacatggaaattgttgttgctgtattgccaattgctcagagttgtgttatctcacatccaccacaatcatttcaattcgtgatgaaatcttttgatattccatacaacagtttttaaggacattcaagaaatcagtaactaaaaacttattcaatgggggtactttcaataaaaaaatgcttttttaagcgtgctcttgccattaaatctcttttgtaaatatcatgtaagttttgatttatctgccagtttgggctgcacagtgttgtatttattgttcataaagtgcagtccactcggctttccctttccccctctctccttctttatgatccccgcccttcctctatatacgctgctttccaattgagccaatttcttttttcctccatttcttccgattatataggaaattattgttgttattgccggctagtttcatacttgttgttgcttttccgctgcttttgtttactggagagaaggagaatgaatgagaaagaaaagtgaaggagagaagagaaaagagagagagcagcacgcgttgctgttgtttttgtgctgcttggggcggtttcaatccgcattcgtgctctccatcatcctttatccttcggccttcctcgtggcacccttatccctgccacccgcacagtggttgaaattgcgacccacaacaccgttatcccacccccgctgacatattgccatttcctccacttttccgcatttccccttgcatttttcctgcccttcacgcactcacgcacatttttatttgcctcatttttttgtctaatacttttccattatttgccctgccaagctgcataattttttctttacatcctccccgtttccgcattttccgcacacccacttattgggagacatttgccgtttctaatagcttttttatgtccatgtcgacgaagtcctaccacaataggacccacaatcgggtggcattcgggattttctcaagactaccggaaaaacatttgtcaggttataatagttacgcagactcagtggtagaactttttttttaacaaaaagcataactatgtatgagaatacatgacgagggtcgtattaatagtaaggtagttttttaacttgaaatcgtgttgccttattcccctgacaattgcaagccattttcgcaacagctgtttcaaactgaaagtggacttttccgagttttgatatttacacgcgcgacaatctgttcctaaatgtattaaatccataaatttgcttaagttcgaaaattgaaatttaatcctttattattttactttttaacttttgatgtaaatacttccttttgcaaactattcatctcccaaacgaatggcttggccaaagtattgatttttccttggcactccaagctgagccacttttcccagatgatttacaataagctgtagatttttcttcttgctcttctcaactggaagccatttcttatctcgctctcgcagaggcttccgtctcaccaagcaatttgtaatcaattaatgctatttttattataattagtcgcttattgtgtgcattaagttcagtcaatctctcagctggtacgctgataagccggttttcatataaatatttattgacgctactattgagtcatcgctccgtgcgatgcaatacatatgtacatatgtatgtgaccatcatcggaaaacaaacaaacgacattttccagcttcgtgcggtgttatttcccagaaaaacacagaaaattcgccaacgaaaatgcacatctatttgccaaactagcagagtctgtgtgtgtctcatcatccaaaaaggtcgaaatgggggcctgcaattgcctttttcgtgtgtctggcctgcgaaatgcaattacagaattacaatgtaaaaacggtgtgtctggctcagcagattacaaggcagcacaaatcccaaaaaccgaaacggaaagccagccagccggactcaccgcaattgtcagtccgggtggatctcggacttttaagtgggcgaatttggggggaaagtcgcgctatgcttctccgactcaatcaaagttaaatccacccaccacacacgtaactaggcacagtgggataaaaccattaagtaattgttgaaactacaatattacaatagtaaacacatcgttaagtattaagaacttgtgtgcatattgttatcttcaagtaaacaattaaggcacttaataaatacaagcaaaggtgttaaagctctattatttttagatttttaaataaatttgcagtctcaaaaattaaaaaatggcataaatttctcttgctctaattaacagaatgtaacagaaataaaaaacaaagtgaatgaaattcttcggcttattacagtgctttaggctttacagtgctttaaggcttcttaaaagataagaaattaatatgacattttttagactaataatccagctacgacgtagcaaaagcaatgttcagaaggcgtaggcgttgtgctagttgccattgcaattgcaatttcataaccttgttgttggtcgtaatgcgatacaatgtaattagatactttggggcggcagttgcattggccaagggattgttggattgtgtgtcgccctgggaaaataccatagaaccggtgcagatgcagatgcataatcagttggagacgcctcaatggagttgccaattgcagttgcaaatgcagcactgctggaaacccggggccaccgtagccaccactttgcaaccaactcacgcaagttgacgactcaaaaatagactcaagtgggagagaagccacaactctttccatcgaggagaaagaaaatgtgcataaagtgcgtttgtccctgcacttgcaaaagaaaatatgttttacaaattccacaacttttctgtattttgaaaccagtcattttgctatatcatcaaaatattttggaatttaacaagtgttgtttgataaccatttacagttacctggattggtttgcaatttattttgaccataatacattttacactttgaaaaatgtatgcatgtctacattgtaaattaattgtaattctgaattgcaatgtaagcggtaagcattaggaactcaagagaactaatacattatgccactttgaaatcagaatttaaccaaattataaactttcaaaattttcttgagccttctgtagaagcattgaaaactctcatctcagattttctcgcagtgtacagtgtactctcctctatctttttcgcacaagcagggaaatccgagtgttgtgttggtctcactttgctgacatgcaagcggcaaattatgagccggggcaaatgaacttttcacaaggctaattggtaggaaaaggggcgagaaaacggggggcgggccagtcaggtggcacacaggtgacgcggcaaggagcagttatgtttactcttcgacttttcctatcaccccacaaaaacccctcaataaccaaaaaacaaacggaataatgtagacgtcgcataaatatttccccaatgattttatgtgctcaaacataattgtcataataataaagcactcagagaaagggaaatcagggaggggggagggagcgaaaggcgggggggtgttgttccccatatcgaaggcgttgtctccattaccactttgtaccacaagtcttttctctttcgcggctgcacttctattattagccccaaaacgaaatgtgtatcttccatgctttcagttgttattgtcgtttttatacaatttcctttggcgctgacagagattgaaagttggaggagtcgtcgctgatcaaggggcgtagttgagatggcgaaccgaagggggtcttcaaataataagaagattacgttgatacgagagttaaaaaattaaatatctatgggtaaatagtttttaattaattatgatgaaatgtaatgaatagaataagcattaaaaaagtttcagtaaattcacaaattgttaatcttcgtactttgttatatgaaggaaataaattcttctacgattactaatggtattgacataattggtttagcttgaatattaaatataagtacactggttcttctgcaaaaagtgtgcttattgtttctctttttgcgcgcataaatctatctgttttatggcgccccctcttcgctgacctttgaccgcgcccctgactttcaccagggcagcaacaaagtgcacaactcttcgtgagtttattttgcatgtgcgccatccctttctggcgcggtatttcaccaggcgagatatatatgtatatgtacatacatacatagtttctgtggatgttcctgttctcgatcaagctcgtaaatcctttcgtgctccatgttctttcggtatcggcctctatttgttctttttgttttttttttgatgattgcatgccctgcgctttgatgtttttttttatgtttctatttttagagcagtgcgcttccatttctagttgcttaatatgacctcctcctccttcttgagctccccactcccgcccactttcatatatgggtgtgtcaatccaatgggaaaaacaaagtagcgccaacagctgttcaaattccaattagacagtcgtcgaacagctgtcagtggctcaaataacggtaaagttttatgcatagccagcttttcttaatacaaagaatttttgcgggacttaaattgctgcaatcaaatttcgtgcaaacaaattaatctattaggaactcggacattccagtgacttaagttaaaactttacgatctgtttatatggccatagatcatcataaatctgacatcaccagcgtttcaataatttccccaatcactttaaagtctattttcctcattcatgtgacattatgttcggttgattgcttaactttggttttatgtaatgtgccctcgtcttcattattttaatttcgcattcccagtggagcgtttccgcgaccacgcccctccaaacgtttccgcccaccgaaactctggcccgcattttatttctggagattgttcccccgaggtctttcgccccattgaaaatgctttgcataaattagctgacgaaaatgagggaaattggagaaaaacaaacagaagttgtaaaagaaaatatatttttttccaagagtggggaatacgcatagatgccccaagtataacggcaactaattagaagccaaagaggtttctttcaccccgatacgattctctctattcattttttagctttgaggtcataagtattgacgccacttgattgattgattgacacaacagtgcaggaaagtctttatttctctgtggtttggacatgaatagcatattgatggggtggtgggggggaattgctccacttgatgtatttgccatacttattttcagtgtttaacttgcaatcgccgaaggcaaatacaaattccctctgctttgtgccccctccccccttttttccacattttgtttattaaattgagtgtttgccctctcgctcactctgtctctgtgttaaacaagccaacaaggtcatataaatcagcaaataaaacttttctcttttatatattattatttatgtttattgcacccagtgcatggcaccacaaacataaacaactttgtttggcccattgagcaaatacagtggcttatctttctggggatttggtttgggtatttttctaactaaattattagtgtttactttaggcaaagaaaaagagcctaaatacaaactattgaacaaactaaaaaaaacccacccaaatcgaagttcaaaatgccaaaattgtgtgtgatatagatagatagacatcaaactgtatctgaaagtctctaatttcctgagtgcttactgtgttggagccgaaggcgattggaaaccagtttgtggttcttgtctttgcgggaattgaatccatcattgagccatgagaagtataaagaatcggattccaataccgatttcgagtcggcttctctcttctcggttgcagtgcctgccttctatctgcaggttgaattgcattcgctccaatcacgttcgcaattgcaactgtttatgcgatctcatgggttctctaaagggggggtggtggcagcaatgccggttgagggggagggtgaggtgggtggcaaaagggggcagcatggcacgttcacaactttggatctccgacttgcagtgactttcatacaatatgtatgcatgtatataggcacctttagttcaagctccagattgtgagtttgcagcgtgaagtaatctctgcaaaaagagctgcaaaaaaaaggcaccagctgcagcaggttgattgaattcttctccagtttcccaggtggggcaaataatcccctagaagtggaagaagaagttccccacaaatgaggtgtgaaatgaatggagtgcgaagtgcgaaacattcgcacaaatagagctgtataatggagcttaaagctgcttacttttatttaaaacttcaaactgggatttgcgctaactgaagatatagtaataaagtatattaatgttatttatagcttgttctatgcctgctcttactaaaacttaaaatacgattagcttaagaagtctttatttattttagaaataatattaacattcttacaatttgttctaccaatgcacattaaaaataacaataatatagggccaatgccaaattaatttctttaagccagctaatgattctgcccaatttcttttgcatttaattttctcccacctgccattaatatcccctaattgcgatttcaccccatttaaacattggtgaaatttgaccaattctcttggacggcttatcagtttctctccaaaccattgaaatggacggctccaaattctgtttgttttctttttggccaaacaaattaataaaattgccaaccgcttaaaaagcaaagagaaaagaaatgtgtgcaaaagaaaaagcataacaaatgcaagtgcaaagagaaagagaaagaaggtgaaacctgtttgtctgttttgccggtgggttcgcaacaaagaaatgcctccttctctttcatggcgctaaagctgtccttttcacttcacatagtcctgtctctttctcgcggtggtcagtgaaccgttgaacgaaaacatgaagctgccaaaatatgcctaaaaacaagtgataaccgaaaatatgagccgtcaattttattaagttcacaaagcaattttcaaatatgttcagaattaatgcgaaaattaattcatttaattgccttgccggctttcgtatgtacgtcacttcctcttattctcgtgcctttttttaatactctttaaaataaaattttctaagtggaaatttttttcaaaattaaaaaaatatatatcaatatgaaatctctactttaagaggagtatttagctatgtgattcttacaaaaataagttttttattgtaataaatcaaggtaaactcagatttttttattccaaccgttgactaaactttgatccttacatttttttttaaagaaagaacgaactgtaacgaaacaccccgacgacttttaactgaagtacaacaagggtatttgtttcgggctttcgtttttaggatttttttaatgctccgcttggatggttcattcaaaagtttgtttggcctttgtctggcgacgacgtctgtcaatttttatgccgtctggtaatatttaaacgacatccacatccgcggcagcctgacgctccgttcgtcgtcgtcgtcgtccgtttcatttcatttatagcaattgcacttgcttccaagaaaaagaaaccgagagcagaaaaggaagcgggcagcaaaaaaaataaaagaaaaaatggcagaaaatgaagtaaatgaatcaccaagatggttcttttatgcactcatcatagatatcattcctctgctgccttcttcacctgggctttaaatagttttccccgtctctggcttttcaatttttccagactttccgaccctttttcctagttgatttcgcattctgttctcacaatcgcgataaacgaacctttttccctcgaagaacttgtcctgtcgcaaacagagagaaatgaagtgaagatttcaatcagtcgggcgaaatttagctgtgggaaaagccgaattgctttcgaaatgctcaacaacttgctgggaaatgggaaaaactaagccgaaactgtcgagtcattaattacttgtgcaatccttatcaatcgttcgttcaccttttcgttggttgtaccagcaggtgagaaaaatcagcacaagtgctagactttcactttgcactggcttttcgattttcattttcatttcaattccattgaccactgaaaataaacaaatcaaatttgagtaacaactctgttaattgctgactcaatcgatcaatcattttcatggcggccagacaaaatataagaggttttcagcgattttacaacaaatttcccacttctccacgctcgacttaagttaagcgccgaaaaatgaaaaacgaaatcatggaataaaaaataagcatgaataaaagcgaaaaatagttgaaaaagcagacacctgaaatgaaaaatcattagctgtgaaaatggtaattattattattattataaaagcagacaggcgagaaaagtgaaaacggtgactttgtttctgacttgttttttttttttagtgcgtaattagtatgaacaaaaatttgttaatttacaatgcggtaagacgcggaatgatgtaaacattagttggacaaagaaaaaccgcattaaatgctataaatgcggaagtactaaatgctaaataatataaaaattcaatattttatatattcttatagttgctaaacattttgaggcagaaaatcgtatcgtatcgtaattattaaagttgtataatttatgcatcgcacccaaagagttttaaatgattttttgttttcgggggaaattcgttgtcattatccaacaattagccagacaaacgaacggatatgcgatggacgtgaccggcgggttacgtaaaatggtattaaatgctattgcgacaatgacaatgatagaaatgaacggggaaaaccagagaaaatagaaaagggccaacaaaaaaaaaaaacttatgaaaattgcgcgcattaaaaagcttttaggctgactgccataaagataaagataaaaatcaaattttgtctaccgagtacggagataactttgattggataggtggataaattcacatttttgtatatttgacacaagtaattacacgcttggacaaacaaacgtacaggcatttaagtttggttgcacttcgatctctcaatttcattatttctgtgtatttttcggttgctttcaattggggaattacgtaaaactaggcgacagaggttaatttgaagcacgctttcaactcgaggcggagtttcccaaggtttcatctatacctttgagtcgaatatgttttttacaattcccaaacaatgcgagttttccgcccacgcactcaagacttctttttgtggctgtcaacttttcccaacacatgaatgcagagaaaataattcagaaacaccatcattgtgtccgagacttcctcacatccatctgttgttttggccctctacattgacttgagttttatctccccctgagagcttttaatatttgtttatctagaactggaaaaaagaaaacacattttaatggtcaaatgctttttatcgcctgctcaaatttattatctgaaaaatgtatgcccacgcaaaatgtttgagtatgtttccctgccagctgacatgcaaatgaataagtgcaaatatctaggaaaaaacgtatgacaaatgcctgttccccacccgtttggccataaacaataagccataaaacataaacaaaacaaaacagagcaccggcatacacagaaaccataaaaaaaggcaggtcaaaaaacgaaagaaggaataccaagcccgaaacagaaaacaaacaaaaaaagaatcatgaatgaatatcgtgtgtgaatttcaaatagtctgtccatagaaaaaatgtacggtggtcagaaccaacaacctttaaattattacaatgcgttgtattatcttctgtatatggtgctattgtgatggaagtttcataatggaaaaccattattttattttataaacattttaagaaaataacttaatctctattggctactttcaaattaaatatccaacactgcttgagcttaaaaaaaaattgcacggtcacactgactcttactgttaatcctggaaactttcttgttagcaaattatacaaatagcttaaacacttcaggttttcatgatcgaatcatacatatctcgttctttccacacagtgtgcactgtgttcgccgagtgagtcattcactcgacactcacaattgaattccgactctttggccaacgcgtcgtattagcttcttctttttccctgctctctgggcccgttctgtttgtcatttgcatagccacacaaattgtgcatgccaatggtttttgtgccttgttttgtttgctttctggtcatcgtcgacaattaaaagtcaatttcattcacactagaccagaccatggagacgacggaccctcggtcacgtgataatggacaccatcacggcacaatgggtgaaatttcctgtgaaccttgcagactgtaattgataaagttggccgatatcaagggcccagattccgtacgagataactttgaaagaaactttcccctgcccattatgaaaagccttttgaaaggcaaaaatgttgcagctttgtgaactttgcagcaaggacaggatagcgatgcacatgataggggggggacatggatcgataggaccttcgccacaaaattgctaccttttcataatcccatggcgagtaccctgcaaatgttttgtgtgccatatcagttactatatagcttaggacatacactcgtagatgttcaagtgttggaaagctaaaggtatttttcttctttcttttttgtaacattgtaacttggaaatatttgtaaagggtattggcagcttcgtttcctcccgtgcagtatacgcccattcatgtggcttgtcgcatcatttgtccttcaccttatccctcatatctccacccatttcccctgcgcctgcatttcgggtcctccggtggcctggatgctggcattcaattaatttgctggcgatgatgcgattttatggatgacactcatcgcccgactgtggcggaaaaggttttcattattgatttttgtaccaccttttttttcgctccgccgtcgtctgtctcactttaatatgtatttattgcactcacttgatttccatcaagttcctcctcgcaaatgcaggtcttaagggaactgagagggtgcactcggaaaaactacgagtttttcaataaaattaacttcaaaaagctatcacttttgctagcaagctcactttaagcataaacattaaaagattattggaaatttcgagtacttctcaaatgataatgaagtacttggaatataacctattgattgtgattatgattttctttgcagtatgcacttcaaatgcacttttaagtgcgaaatgttttttttttctatttctaagtgtatgagtgagatcgactgctgcgacgcacgtcacattaggttgcatgcatccctcgactttggtccttttcccctcggagcccgcgttacgtaggctagtgagccttgagtgcggaatccttagaaaagtggtaaaatgtcctgtggccaaaggggggggaatgtcgaggggcttggttcgtgctttgtcagccaagggtggatttcatatttaacattttttctttggtccttttgccaagtgcagggccaagtcctggccacctctgcaccgccgacaccccttagatccttcggccctctggctctttgcctttacataactttccttttgttcgcgcatcttctgtttcgctctggccactcgccatctctttcgctgcttgtagtttttcgcataacatttttttcgcacttgaatgcaaaggggaggaacttgatcgcaaggctaggggtgcaaaaaactaaactaaacaaaaaagaaactaattaaattctttcacattttttcctgcatttcctacatgttggatgtttgccccgtcggttaccagttgcttttttcccaaaccatatcgaataaggaacattaaacgggaaacttaaattcccagataaccatatgctgttctcaaaagttgggcagggaaaactttggctttgtaggttaatttcttcatgtttccctaattaaccagccccggtttccatttcccttcggggcgcatttgctgctctaatcgggtctgccagcctaatgatctcaagttccgttcaaaagttccgcttcaaaaggtatcattaggccatacaaagatgaaaaatgcatttctactctgttcagcgggaaaaagtataattaatttgttctttttcttaacaatattacttaaaatgtcttttatataggtttatatatagttttattaaattaagatttaaagattctgaatgtcaaatataattacataacattatttactaagatcgggttgcgtcttgccctttaagttaatcaaattgaaagactgaaaaaaggctgaaatcaaacccccgagaattcccttacattttacccatgaacccgcgtttgcaacggaagccagagaaatgactaattaaatttacaccgtaaaagtttattactgctgactggccacgccccctgccccttaatttgtatatatgtgtgcagttactatacactcgtttgtatgtataaacgtctggatgtctggccaagaggccaaaggcaaaatgtgaatgaaatccgacaagtaaagtaagtgagggggtgataaaaatgggagacgagacaccgaggccaactgaaaatccctgccaggttaagtcacaaaagcccttgagctgaaaacacaaaaatacgtagaaaaaaaaaagaaaaaagaacaaagctaatatagagtagaaataaaaaaaaagctactaagagtccaaagcagaacgtgctgaaatgcaatgagcgaaaaaaaaaatgcgagcaaaccagaaaagtgccacaaaaatcaaacccgcagaagaacgaacaagtgcatgaatggcctgtgtgaatggatgacagacttgagcgaatgatataatgaatgagcagctaaagatgcattgccataaatcacacattgaagcagctcgatttggatggggaacgaagagaaaagcatactatatccacagataacaaatggcagacacatcaagtttaatgctcgccggacaaggacggaccgtcaaacaaaggacggatactacagaaatctcaagatacaattcgcaatgagtatccgttagaaccaaggatgtaatgaaaagcgtttcagtattctacttgtatatatttctatagtactttattgcagaagtgcagaccagctagttttctagacttagttgttgataatgataatctactaatactcagattagaagttctgcagtttgcttataaatgtaaatatagttgagtttataagttcttgtttcgcaggcactactgtagtttctatatcgttgcatagtttgtagagggggctcaactgctgatgcggttgattccaatctgtgcttactcaacacacttactttagtctttgagtagttgcgggcggaaagtgggtggattggaggattggaggattgggggcttgggtggtgcggttatgccagtgggtgggaaagcggtaccgcgcatcatttcactcgtgatcagccctcagctcgagatgctccaaattcgccgctaataacctgcataagcagtcgctagatggcggatgtgcatggcttgagacatgtttctatcgccgtctctttctctggccatacctccgactctttctcacccaacatgtgtagaatttttgtgactttaaagttcattggacccattccgcttgagcagcagcttaagttctctgaatggggcatatattccaccgttcttttctacacactcccccttttttttttttgtcaaatgtctagggggcgtgttacactacaaaaaatatatattttccagcaattgggaatggccacgcttattagcttaaatgtatgtaaaacatgtgtaaaaaatttgtgtaagtgttaatgtacaaatatgctataatttaaaataaaacaataacacatctttcagtgtgcacacacacacacactcgcactatggactttccagaatcactgagatacttttcactcgtctgagaaattaccgcacttactgaagccatcatctggctgctgttgttattactcttcttcttgttctggccgggtcgctaattggcctttctgcggttgcaagaccctctaattctgtaatgtctcttcgcttttgatgtcagccatccgctaactgtatatatgtacatacatatacatacatagttcgctgtacatgtgttgtgttctattacttacctagagttatgactaagataattgtatttaatttagtttcatcttttgattttgtttgtaaaagtttgtttctttgttttgagccccttcggtctaccattgtagttcatcgcatttgccgcccatcgtcattagatgataacatgaaaaactgcctgctctattcatagatactaccagattaccagtcggctgacaacttgcctctcacccaaaatctttctatttctttctgtttctgcaggtaccaagcacagctcttttcgcggccatccaggcaaatatcacatgaacttaggtaacaatcacaaaaacttcaacacaccatccaaaaaaaaataaagaagaaaattccaatgtaaagtccgcatgagaagtgtcattctaaataattaaagagcggttcccaaccgatgattggggtattttcgttatacatatattgcacgataatattgggggtttataaacagtgatgagaaggcatctgttcttcgcatttgagagaaatcaagttcttagaactcgaacgacataaatatattttgaaatctttttttgtttcctatggtacttagtcatatttgtactcaatgatgttaatcattctttgtgacataaaaatccaaaataacttatgtgaagggataatcaacttatcaaattcgcctaaatattttattagtattcatattttttgaactaaactaaactgaatcgcttagattcagactaactagctcgttataagtttcctattaaatccgcttagatacaattatgataattcgattttatgcaacatcccaagctgacttaatatcactagacttccacgattacccctaaaaactgagtcaatactaaagtattctcgatacccgcgcccagtaaaacaattgcccacatgactcatggacccaacaacatacataaatactttaaaattgaatgtccgagattgcatagaaagtgggtgtatatgtatattcagcggctaatatttggttgcgggatttagacaggcagacagaccaccattggtgaagcgtacatttccgctctaatctgtcccgatatattattcccttttatacccccgaaaaacccactccacacacctattactcgctattaatatttcctgtctcgcgcgcataaattaacagtgtgcgatggggaacccttttcaaatgcgttacaatatgatttggatcggtttatgactgcttagcacaccgaccgcagaccaaagattcccgattcccggccactgaatgacttccacttcacccaaaaatttatgcacaattgtgtccatgaaagtggagaacttttgtgcagcggaagtgtttgctttggtcaaacaaaaaactcgcacgcactcaaaaaagaataataataataataatggggaaatatgtaaatttgtacaattatttcgaaggggacattgaggcgaaagtctggtttaattccaaagaggtaccctattatagaagcttgattcggacaggtttttgcatctgacaagttggcgcagtctatcaagcgaaacttcatctcgaaatggtctgcaatattctgtagaacaacattgtacaggaaaatgggctggcaggtgatgtgtgtcgactagtagatacctttttaatatgatacaatataattcttggctaacaatctgttctgctcaacctttgaaggtctatcaaaaaatcgttcccttgtcggaatgcatcccacagatttggaaagcattcctgctatggatacccagttaaaaaagagagtgtgggaggcggaagaaaagaacgacattgggtggggggttcatccgacaaccgactgacaatcagttagaacttcccacaataaaatgcctcgttgagggattcctggtccaccgctggctggctggtaggccacgatttgtgtaattttattccgcttaatgcataatttattccattccctcaatggagcacggagttgcgctccccattccccgctggccagcacttgctccacaaattgcccgcattcttcgaaaagaaacaggtttacctgcattgtcttttcttactacacctttaaaaaataaaagcgatttgcaaagatgcctctaatgaatggcgtgtaatcgcacaaaatttatcatcgaagttcaattaaaatgtaattgtacaatttgtaacagagcaaggactataaaaacacgagctaccttctagattagattttgaaaccgcaaacaaagcaagtgtaactttggcaattgtaatcaatttgccgctaaccatgacctcagatagtataattattaaaccatcttatttttttgacccttaaatattggaaacaaccaaggtttgcttgttcgtaatcggtgtaaccacgcttttggactttaaattcatattttaccatcttataataataattttctctttgtctctactttacagaagccctgctgcagtcgcgtccattacctcacattccggccggcagcacggcggcctctcttctggcggatgccgctgagctgcagcagcatcagcaggattccggtggactgggactgcagggctcctccctgggcggtggtcacagttcgactacatccgtgtttgaatccgcccatcggtggacctcgaaggagaacctactggcccccggacccgaggaggatgatccgcaactttttgtggcgctatacgatttccaagccggcggagagaatcaattgagtctgaagaaaggcgagcaggtgcgcatacttagctacaacaaatcgggggagtggtgcgaggcgcactcggactccggaaacgttggatgggtgccctccaactatgtcacgccgctcaattcgctggagaagcactcctggtaccacgggcctatctcacgcaacgccgccgagtatcttctcagctccggaatcaatggcagtttcctggtccgtgaaagtgaaagttcaccgggtcaaaggagcatcagtttgaggtgcgtagatgggatctttcgtgggaactttgattgtattgtgatatccccatacccatcttcttctaaacagatacgagggtcgcgtctatcactaccgcatctcagaggatcccgatgggaaagtcttcgttacccaggaggccaagtttaacactctggccgagctggtgcatcatcacagcgtgccccatgagggtcacggcctgatcacaccgctcctatatccggcgcccaagcagaacaagcccaccgtctttccgctgagtcccgagccggatgagtgggagatctgccggacggacatcatgatgaagcacaagctaggcggcggtcagtacggagaggtctacgaggccgtttggaagcggtatggcaatacggtggctgttaaaacgctcaaggaggacaccatggcactgaaggacttcctcgaagaggcggccatcatgaaggaaatgaagcaccctaatctggtgcagctcattggttagtaaccaactaaaaattaaagttaaaattttactaagcaagaagcaagaggaaatgccataaatatgtttgcttatttcaggtgtttgcaccagagaaccaccgttctatatcatcaccgagtttatgtcgcacggcaatctgttggacttcctgcgctccgccggacgcgaaacgctcgatgcagtagcgttgctgtacatggccactcagatagcgtcgggaatgagctacctggagtcgcgcaactacattcatcgcgatctcgctgcccgcaattgcctggtgggtgacaacaagctggtcaaggtggcggatttcggcctggcacgtttgatgcgggacgacacgtatacagcacatgccggagccaagttcccgatcaaatggaccgcaccggagggtctggcctacaacaagtttagcaccaaatcagacgtttgggccttcggagtcttgctgtgggaaatcgccacgtatggaatgtcaccgtatccggccatcgatctgaccgatgtgtaccacaagctagacaagggctatcgcatggagcgaccgccaggctgcccgccggaggtgtacgacttgatgcgccagtgctggcagtgggatgccaccgacaggcccacgttcaagagcatacaccatgcgctggagcacatgtttcaggtgggtgacgtcgaggtgtgggacgatgaatatgacgatgataacgatgatcatgacgatgctggcgaggaggcgagtgactacgacggcgacgacgacgacgagctccatcagaacagcggcagcatccacagccatgtgcatagccatagcaatagccataggaataggagtagtcatagtcatagccacaggcaccgccaccacctcgtcgacgtgctctgatcgctcgagatcgagggtgcagcaagtagtgatagcaataatgagccacatggtgcccatctctccttctccgctcctccgcaggaatcgtccatcaccgaagcggtggaaaagcagctgaacgccaacgccaccagcgcgagcagctccgctccgagcacatcgggcgtggccaccggcggaggagccacaaccacgacggcggccagcggctgcgcttcctcatcctcggccaccgcctcgctaagtctcacaccgcagatggtgaagaagggtttacccggcggtcaggccctcacgccgaacgcccaccacaacgatccgcaccagcagcaggccagcacgcccatgtcaggtgagggtaaaccctttgcacattaccttccagtcttaccagtgccatatccttgcagaaaccggatccacttccaccaagctaagcactttctccagccagggcaagggcaatgtccagatgcgtcgcaccaccaacaagcagggcaaacaggcgcccgccccaccaaagcgaaccaggtaagacgacgacttctcttgatgggtggatcgaaatgagctgttcaagtgaatgtttagtaaaaccattgataatggaaaaagcccaagaaactaagagctcatctaatttcgatgtaattatagcctgctctcgagcagtcgggactccacttatcgcgaggaggatccagccaacgccagatgcaatttcatcgacgacctcagcacgaatggtatacacaaattgaaaactgccaactatttcagccagaccctctcaagaaatttcaagacccaaattccaacccaccatacacaccaaatacgtacacaacaacaacaacagcaacagtccgtacaacaacaacaacaaatagtaccattgtcagtacaacaacaagcacatcaacaacagcagaaacaacaacagtattccattaagaaatcgtcctcctgcagtagttttctttacgacatcctatttcgaggtattttgtaaccggagtccatagcgaaaatctcctattcaaaaaaattatattttggttcctgtgttatttgatttgtgttacttgtttatgtttaattgtaattggtttgttactacttacataagtttctgcatttattggttgttcattgtggaagtaagtccttcatagttgatttccgcgttggtaattttctaaatttagttgttacaaagttatattcgtgtcgatgatttcctaatgtaacttcttttttctgtctgatctctgagcattaacatttttcatttgatgtttctctaaccatcccattcccacttattatattgtttggtattgttcgttattttattgcttttatttttattttttgcctgctatcattatgttgtgtgttttttttagttatgattattttaactatcatatggtttatatccttgaaagttcgtattcttttaagtataatctcgtgtttaacttatcttgtgatcttagttattttgcaatccttgtagggctgtcaaattcgatggatcctatattacccaaaataggatggactttaagaatattaaaactcaattttaagaaatcaatgaaaactagttgtaatgcatcctttcaaggttataccagatattttcccaaacactcatttaattataagttgataatttggtgttttctagttttactcgctcgacaaacatcaacgcacacatacacaccacaagactttggtcaggattaacccatacccaagtgccagtgatgggatgtacctatatagttcggtactcttaataaactccagtttttctataccgagatataaatacaattttaattaattctaagatctagaaggtatttcccatcactgaccattaataccacccagcatcaagcacctggcacgacgcattctattaaccaagcattatacattgattccaagctaatcatttacatttaaccattcactttggcaggactagcccgggacatcaacagtttgacgcagcggtacgattccgaaacagatccggcagccgacccggacacagatgccacgggcgatagtctggagcagagtctgagccaagtgatagccgctccggtcaccaacaagatgcagcattctcttcacagcggaggaggaggaggaggaataggtcctcgatcctcgcagcaacacagctccttcaagcgaccgactggaacacccgtgatgggtaaccgaggactagagacccggcagagcaagcggtcccagctccattcacaggctccgggtccaggaccgccatcaactcaaccgcatcatggcaacaacggcgtggtgaccagtgctcatcccatcactgtgggtgcgctcgatgtgatgaatgtcaagcaggtggtgaaccgctacggaacactaccaaagggtgccagaatcggtgcctatctggacagtcttgaggatagcagtgaggctgctcctgctcttccggcaactgctccttctctgccaccagccaatggacacgccacgcctccggctgccagactaaatccgaaggccagccccattccgccacagcaaatgatcaggagcaactcgtcgggcggagtgaccatgcaaaacaatgcggctgccagcttaaacaagcttcagcgtcatcgcaccactaccgaaggcaccatgatgacgttctcctccttccgggcgggcggttccagtagctcacccaagcggagtgcctcgggagtggcttcaggagtccagccagctctggccaaccttgagtttccaccgcctccgttggacttgcctccgccgcccgaggaattcgaaggcggaccaccacctcctccaccggcgccggagagcgctgtgcaggccatccagcagcacttgcatgcccagctgccaaacaatggcaacattagcaatggaaacggaacaaacaacaacgacagcagccacaacgatgttagcaacatagctcccagtgtggaggaggccagctccagattcggtgtgtctctgagaaaacgcgagccctccaccgactcctgcagctcgctgggcagtccacccgaggatctcaaggaaaagctaatcaccgaaatcaaggcggccggcaaggatactgctccggcctcacatctggccaacggctcgggcatcgctgtcgtggaccccgtctccctgcttgtcaccgaactagccgagagcatgaacctgccaaagccgccgccgcagcagcagcaaaagctgaccaacggcaatagtactgggtccggattcaaggctcagctgaagaaagtcgagcccaaaaagatgagcgcgccaatgcccaaggcggagccggcaaataccatcatcgacttcaaggctcatctgcgccgggtggacaaggaaaaggagccagcaactccagctccagctccagctactgtagccgtagccaacaatgccaactgcaatacaacgggcactttgaaccggaaggaggacggcagcaagaagttctcgcaggccatgcaaaagactgaaatcaaaatcgacgtaacaaactcgaatgtggaggcggatgcgggagcagcgggcgagggcgatctcggcaagcggcgaagcacaggtagtattaatagcttaaagaaactgtgggagcagcagccaccggcgccggattatgccaccagcacgatcctccagcaacagccgtcggtggtaaacggaggcggaacaccaaatgcccaactgtctcccaagtatggcatgaaatcgggggccatcaatacggttggcactcttccagccaaactgggcaacaagcagccaccggctgcccctccaccaccgcccccgaactgcaccacctccaactcctccaccacatccattagcacctctagtagagattgcaccagcaggcagcaggccagcagcacaataaaaacctctcattcaacgcaactcttcacagatgacgaggagcagtcgcacacggagggcctgggatcgggaggccaaggatcagcagacatgacccagtcgctgtacgagcagaagccacagatccagcaaaagccagcggtgccgcacaagccaacaaagctaaccatctacgccacgcctattgccaaactgaccgaaccagccagctccgccagctccacacagatatcacgggagagcattctggagctggttggcctgctagagggctcgctcaagcacccggtgaatgccatcgctggatctcagtggctgcagctgagtgacaagctcaacatcctgcacaattcgtgcgtgatcttcgcggagaacggagcgatgccgccgcactccaagttccagttccgggagctggtcacgcgcgtggaagcacagtcgcagcacttgcgctccgccggcagcaagaacgtccaggacaacgagcgcctggtggccgaagtcggtcagtcgctgcgtcagatctccaatgcgcttaacaggtaaatgataagacgggggatggacgcgcccgaccaacatcagggcatctggctggatgccgagggtaacttcattaagcgcaagtgatcgggccccaatttgtagacccaatcgtccaaccacaccatcccccgtggaagcggaactggaaacggaaatggaagcaaagatagcaggccggaaacaggaggagcagaaacaggaaacgaaaattcaagcccagcgaagaagaaatgacaactacattagcaatagcagcaactaaaatcggaggaggacacctatgtatcgtacttggtagcgtgtagtagtagcttctattatatatacccatatatatctagtcagatctgtgcagagccccgacgaacgcttccagaaaaccaagaaattagaaaaccgaaaacaaaacaaaactgaaatgaaatgaaattaaatcattaaacaatgagttgctaagcaaatttgggtaaggtctcgcgggagtatccttgtttttaattgtaaagtgagagcacacctcccacccactcaacacccttctcccccccccccatccagcaacccttcaaacgtattcgcgcttcgtttgttttatatacatagaaagacacaagacatggcttaagaatgaaaggaaatatattcatagaatatctcaataaacttagtaattacgaagaaaacgcaatgcatatatacatatacatacatatatttacatatactagtcgtaaaatgttttattaaacctatacatttacatacttctacaagataaaaagataaagataaagatattatattatattatacatttaacgaccacaaaacaccccctttgagaaaatggaaacggaaaggaacttgatacttcttcggaatacgtaggcgcgacttcttttcgatcgtgtgttttaagccccgcagtatacatatatagtaaaattgttgttttatttatgagtcgaactaatgtcccgtcagttgactaaggacaacg

SEQ ID NO: 7865 - DNA, 4515 bp, DROSOPHILA
atgggggctcagcagggcaaggacaggggcgcccactcgggaggaggcggctcgggggcccccgtcagctgcatcggcctctccagcagcccagtggcctccgtttccccccactgcatctccagttccagcggcgtcagcagcgcccccctcggcgggggctccacgctccgtggctcccgcatcaagtcctcgtcctccggcgtggccagtggcagcggatcgggcggaggcggtggcggatccggatcggggctgagccagcgtagtggcggacacaaggatgcacgctgcaatcccaccgtgggtctcaacatattcaccgagcataacgaagccctgctgcagtcgcgtccattacctcacattccggccggcagcacggcggcctctcttctggcggatgccgctgagctgcagcagcatcagcaggattccggtggactgggactgcagggctcctccctgggcggtggtcacagttcgactacatccgtgtttgaatccgcccatcggtggacctcgaaggagaacctactggcccccggacccgaggaggatgatccgcaactttttgtggcgctatacgatttccaagccggcggagagaatcaattgagtctgaagaaaggcgagcaggtgcgcatacttagctacaacaaatcgggggagtggtgcgaggcgcactcggactccggaaacgttggatgggtgccctccaactatgtcacgccgctcaattcgctggagaagcactcctggtaccacgggcctatctcacgcaacgccgccgagtatcttctcagctccggaatcaatggcagtttcctggtccgtgaaagtgaaagttcaccgggtcaaaggagcatcagtttgagatacgagggtcgcgtctatcactaccgcatctcagaggatcccgatgggaaagtcttcgttacccaggaggccaagtttaacactctggccgagctggtgcatcatcacagcgtgccccatgagggtcacggcctgatcacaccgctcctatatccggcgcccaagcagaacaagcccaccgtctttccgctgagtcccgagccggatgagtgggagatctgccggacggacatcatgatgaagcacaagctaggcggcggtcagtacggagaggtctacgaggccgtttggaagcggtatggcaatacggtggctgttaaaacgctcaaggaggacaccatggcactgaaggacttcctcgaagaggcggccatcatgaaggaaatgaagcaccctaatctggtgcagctcattggtgtttgcaccagagaaccaccgttctatatcatcaccgagtttatgtcgcacggcaatctgttggacttcctgcgctccgccggacgcgaaacgctcgatgcagtagcgttgctgtacatggccactcagatagcgtcgggaatgagctacctggagtcgcgcaactacattcatcgcgatctcgctgcccgcaattgcctggtgggtgacaacaagctggtcaaggtggcggatttcggcctggcacgtttgatgcgggacgacacgtatacagcacatgccggagccaagttcccgatcaaatggaccgcaccggagggtctggcctacaacaagtttagcaccaaatcagacgtttgggccttcggagtcttgctgtgggaaatcgccacgtatggaatgtcaccgtatccggccatcgatctgaccgatgtgtaccacaagctagacaagggctatcgcatggagcgaccgccaggctgcccgccggaggtgtacgacttgatgcgccagtgctggcagtgggatgccaccgacaggcccacgttcaagagcatacaccatgcgctggagcacatgtttcaggaatcgtccatcaccgaagcggtggaaaagcagctgaacgccaacgccaccagcgcgagcagctccgctccgagcacatcgggcgtggccaccggcggaggagccacaaccacgacggcggccagcggctgcgcttcctcatcctcggccaccgcctcgctaagtctcacaccgcagatggtgaagaagggtttacccggcggtcaggccctcacgccgaacgcccaccacaacgatccgcaccagcagcaggccagcacgcccatgtcagaaaccggatccacttccaccaagctaagcactttctccagccagggcaagggcaatgtccagatgcgtcgcaccaccaacaagcagggcaaacaggcgcccgccccaccaaagcgaaccagcctgctctcgagcagtcgggactccacttatcgcgaggaggatccagccaacgccagatgcaatttcatcgacgacctcagcacgaatggactagcccgggacatcaacagtttgacgcagcggtacgattccgaaacagatccggcagccgacccggacacagatgccacgggcgatagtctggagcagagtctgagccaagtgatagccgctccggtcaccaacaagatgcagcattctcttcacagcggaggaggaggaggaggaataggtcctcgatcctcgcagcaacacagctccttcaagcgaccgactggaacacccgtgatgggtaaccgaggactagagacccggcagagcaagcggtcccagctccattcacaggctccgggtccaggaccgccatcaactcaaccgcatcatggcaacaacggcgtggtgaccagtgctcatcccatcactgtgggtgcgctcgatgtgatgaatgtcaagcaggtggtgaaccgctacggaacactaccaaagggtgccagaatcggtgcctatctggacagtcttgaggatagcagtgaggctgctcctgctcttccggcaactgctccttctctgccaccagccaatggacacgccacgcctccggctgccagactaaatccgaaggccagccccattccgccacagcaaatgatcaggagcaactcgtcgggcggagtgaccatgcaaaacaatgcggctgccagcttaaacaagcttcagcgtcatcgcaccactaccgaaggcaccatgatgacgttctcctccttccgggcgggcggttccagtagctcacccaagcggagtgcctcgggagtggcttcaggagtccagccagctctggccaaccttgagtttccaccgcctccgttggacttgcctccgccgcccgaggaattcgaaggcggaccaccacctcctccaccggcgccggagagcgctgtgcaggccatccagcagcacttgcatgcccagctgccaaacaatggcaacattagcaatggaaacggaacaaacaacaacgacagcagccacaacgatgttagcaacatagctcccagtgtggaggaggccagctccagattcggtgtgtctctgagaaaacgcgagccctccaccgactcctgcagctcgctgggcagtccacccgaggatctcaaggaaaagctaatcaccgaaatcaaggcggccggcaaggatactgctccggcctcacatctggccaacggctcgggcatcgctgtcgtggaccccgtctccctgcttgtcaccgaactagccgagagcatgaacctgccaaagccgccgccgcagcagcagcaaaagctgaccaacggcaatagtactgggtccggattcaaggctcagctgaagaaagtcgagcccaaaaagatgagcgcgccaatgcccaaggcggagccggcaaataccatcatcgacttcaaggctcatctgcgccgggtggacaaggaaaaggagccagcaactccagctccagctccagctactgtagccgtagccaacaatgccaactgcaatacaacgggcactttgaaccggaaggaggacggcagcaagaagttctcgcaggccatgcaaaagactgaaatcaaaatcgacgtaacaaactcgaatgtggaggcggatgcgggagcagcgggcgagggcgatctcggcaagcggcgaagcacagatgacgaggagcagtcgcacacggagggcctgggatcgggaggccaaggatcagcagacatgacccagtcgctgtacgagcagaagccacagatccagcaaaagccagcggtgccgcacaagccaacaaagctaaccatctacgccacgcctattgccaaactgaccgaaccagccagctccgccagctccacacagatatcacgggagagcattctggagctggttggcctgctagagggctcgctcaagcacccggtgaatgccatcgctggatctcagtggctgcagctgagtgacaagctcaacatcctgcacaattcgtgcgtgatcttcgcggagaacggagcgatgccgccgcactccaagttccagttccgggagctggtcacgcgcgtggaagcacagtcgcagcacttgcgctccgccggcagcaagaacgtccaggacaacgagcgcctggtggccgaagtcggtcagtcgctgcgtcagatctccaatgcgcttaacaggtaa

SEQ ID NO: 7866 - protein, 1504 aa, DROSOPHILA
MGAQQGKDRGAHSGGGGSGAPVSCIGLSSSPVASVSPHCISSSSGVSSAPLGGGSTLRGSRIKSSSSGVASGSGSGGGGGGSGSGLSQRSGGHKDARCNPTVGLNIFTEHNEALLQSRPLPHIPAGSTAASLLADAAELQQHQQDSGGLGLQGSSLGGGHSSTTSVFESAHRWTSKENLLAPGPEEDDPQLFVALYDFQAGGENQLSLKKGEQVRILSYNKSGEWCEAHSDSGNVGWVPSNYVTPLNSLEKHSWYHGPISRNAAEYLLSSGINGSFLVRESESSPGQRSISLRYEGRVYHYRISEDPDGKVFVTQEAKFNTLAELVHHHSVPHEGHGLITPLLYPAPKQNKPTVFPLSPEPDEWEICRTDIMMKHKLGGGQYGEVYEAVWKRYGNTVAVKTLKEDTMALKDFLEEAAIMKEMKHPNLVQLIGVCTREPPFYIITEFMSHGNLLDFLRSAGRETLDAVALLYMATQIASGMSYLESRNYIHRDLAARNCLVGDNKLVKVADFGLARLMRDDTYTAHAGAKFPIKWTAPEGLAYNKFSTKSDVWAFGVLLWEIATYGMSPYPAIDLTDVYHKLDKGYRMERPPGCPPEVYDLMRQCWQWDATDRPTFKSIHHALEHMFQESSITEAVEKQLNANATSASSSAPSTSGVATGGGATTTTAASGCASSSSATASLSLTPQMVKKGLPGGQALTPNAHHNDPHQQQASTPMSETGSTSTKLSTFSSQGKGNVQMRRTTNKQGKQAPAPPKRTSLLSSSRDSTYREEDPANARCNFIDDLSTNGLARDINSLTQRYDSETDPAADPDTDATGDSLEQSLSQVIAAPVTNKMQHSLHSGGGGGGIGPRSSQQHSSFKRPTGTPVMGNRGLETRQSKRSQLHSQAPGPGPPSTQPHHGNNGVVTSAHPITVGALDVMNVKQVVNRYGTLPKGARIGAYLDSLEDSSEAAPALPATAPSLPPANGHATPPAARLNPKASPIPPQQMIRSNSSGGVTMQNNAAASLNKLQRHRTTTEGTMMTFSSFRAGGSSSSPKRSASGVASGVQPALANLEFPPPPLDLPPPPEEFEGGPPPPPPAPESAVQAIQQHLHAQLPNNGNISNGNGTNNNDSSHNDVSNIAPSVEEASSRFGVSLRKREPSTDSCSSLGSPPEDLKEKLITEIKAAGKDTAPASHLANGSGIAVVDPVSLLVTELAESMNLPKPPPQQQQKLTNGNSTGSGFKAQLKKVEPKKMSAPMPKAEPANTIIDFKAHLRRVDKEKEPATPAPAPATVAVANNANCNTTGTLNRKEDGSKKFSQAMQKTEIKIDVTNSNVEADAGAAGEGDLGKRRSTDDEEQSHTEGLGSGGQGSADMTQSLYEQKPQIQQKPAVPHKPTKLTIYATPIAKLTEPASSASSTQISRESILELVGLLEGSLKHPVNAIAGSQWLQLSDKLNILHNSCVIFAENGAMPPHSKFQFRELVTRVEAQSQHLRSAGSKNVQDNERLVAEVGQSLRQISNALNR

SEQ ID NO: 7867 - DNA, 4819 bp, DROSOPHILA
ggaaagaattttggttggattcaaatacgaagcagctttggtaacaactaaggttctgggttagtcatgattcaccaacaggttagacttagttttgtggcaaaatttaaccaatgacgtccaagttctaactaaagtaatatcgttactttgttattttatttttggatattctcgaaagtttctggaattctcaagaaaacttaaacaatatagagtcgcattatatggaaaactcattgattcattcttatgtttgttattttgttattaaattccaattgatgatgccagtgtctaaataaaaacgaagacctaattttcaaccaaaaatcaggttttctgggcttgtccgtattaaacatttttgataattatttataatatattgttattttttgctggcttcaaaacatcaacaaattgtgtatgataaatgacgatgacgttgttgttgatggcgatcgcgctgtgggaatcagatgaaatgtcaattaagtttgcatttatatctttgattgaagctctaagatttgctttgccattttatgcggaagttaagctcggtcagttcttgaaaaagttcccatgggagcaagttatttgttttttgacaataagaagcgtttatttaaaatggcttattatggcctcaatgattcctaataggcgtaacttactggttataaacttgtttaatatcgtttcattttaaacctggatgacagaaaatgaatttcggttcaaatacaaatattacaatagaaagtatgatatttagctccgataaacatttaacaattttagtattttaatggtgaaatggtaaattccgcgcatgaaaagagatagaagagatgacatatatggaaaccttaaaaacgtaacggttgcttgggttttataacaatcagtcagtgacaggcatttccagagttgccctgttcaacaatcgatagctgccttcggtcgctcgtcactaactttcctttaggcaacggccacactgtctggccaccaaaatcccaaacttaattaaagaattaaataattcgaataataattaagcccagtaacctacgcagcttgagtgcgtaaccgatatctagtatacatttcgatacatcgaaatcatggtagtgttggagacggagaaggtaaggcgagaaacggcgagccgcatggtttcgatttcggctgagccgtggcaggaacaacaaaaacagggttgttgcacaagaggggaggcgatagtcgagcggaaaagtgtgcagttggcgtggctacatcatcattgtgttcaccgattattttttgcacaattgcttaatattaattgtacttgcacgctattgtctacgtcatagctatcgctatctctgtctgtctctatcaagctatctctctttcgcggtcactcgttctctttttctctcctttcgcatttgcatacgcataccacacgttttcagtgttctcgctctctctctcttgtcaagacatcgcgcgcgtgtgtgtgggtgtgttcttctttagctacatatacataaataggagagcggagagacaaatatggaaagaatggaaaaagagtgaattactgcaattaaccagtcgcgaacagttaaatcatatttttgtcggccattgcagtaaataaaccgttggctttccctcttcactttccacctcctttctttgacgttaatttttttcagttaatcgcgccgctgctttgaactcgaacacgaattttagccgcaacataaaataaaatcaagtaactcttttaactcaaatataaaacaacaattccaattctttcaacaggcaatctgtgtttttatgtcagatacgtgcgcgtgtgtgtgtgtgctgtaattccatcgcccctttcgattccgagttcgttaggaacagcattagttcgcctattttagtagtagcctagtccgattttaagtgaaacaggatactccaacaccatatactcaataattagttacaacacccactcaaccatacagcaacaacaagtttaacgagttttttgtattatcattacttagttttttggttaataatacacaagtgaagagcgaactgcaggggagcgagatatcacgaaacaatccaaaatccacacacactcaaacagaaatcaaaagcttcgctctctcgcacacacacgcaccaaccaactatcaactatcacaaacaccgcgacagagagagagcggcaagtgaatcacggcgaatcgaaaccgatccgaacccactccggagccgaaaaagaactgatcctaccatcaaacgcatccaataaacacggccgccaacatgcagagcgactttcacagaatgaagaactttgccaatcccaagtccatgttcaaagtaatactctcagtgcgcctgtcgctaagccaagctaatctaatcttctgattccccttcccatccattgccatcttctcccgcagaccagcgcccccagcaccgagcagggtcgtccggaaccaccaacttcggctgcagcgcccgccgaggctaaggatgtcaagcccaaggaggacccacaggagactggtgaaccagcaggcaacactgcaaccactactgctcctgccggcgacgatgctgtgcgcaccgagcatttatacaaacacccgctcatgaatgtctggacgctgtggtaccttgaaaacgatcggtccaagtcctgggaggacatgcaaaacgagatcaccagcttcgataccgtcgaggacttctggagcctatacaaccacatcaagcccccatcagagatcaagctgggtagtgactactcgctattcaagaagaacattcggtgggtttgctgtttattgcaattctgccaagataacctttactaactgatatctcatttgcagtcccatgtgggaggatgcagccaacaaacagggcggtcgttgggtcattacccttaacaaaagctccaagaccgatctggataacctatggctcgatgtggtaagtgcacaaagaaacgagtggtgagcggatggtctatttatagtgaatgtacattcttgaaatgcaaaaatatagaaataggtgtatgattttgcaatataaattataacttatagaaaatatcagctaaaaatacgctagtgctagcttttgtcttaggaacattcaatagtgagcttatatcataaatatttttcgcatatgagtaactacaactgttttgccttccagctgctctgcctgattggtgaggccttcgatcactctgatcagatctgcggcgctgttataaacattcgcggcaagagcaacaagatatgtaagttttcacgcacacccaacttcagcggaattcctttgtttaacgattaatgctttccagccatctggactgccgacggaaacaacgaggaagctgcccttgagattggtcacaagctgcgcgatgccctgcgtctgggacgcaacaactcgctgcagtatcagttgcacaaggacacgatggtcaagcagggctccaacgtgaaatcgatctacactttgtaggcggctaataactggccgctccttattcggtccgatcccacactgattattttgtctttcatttatttatcgttataagcaacagtagcgattaatcgtgactattgtctaagacccgcgtaacgaaaccgaaacggaaccccctttgttatcaaaaatcggcataatataaaatctatccgctttttgtagtcactgtcaataatggattagacggaaaagtatattaataaaaacctacattaaaaccggatacttttgatctttgattttggagatattttaaaatagaaaaaagttaacctatattgtttttgggataattacttgttgtattactaaaacgagcttgtatcctaatatgggcacctaaagcaaaacttccaaatttggaattcaatttgttgctaaaaatacgttagcaatttctagggtggccaaaaaaaaatgtgtatcgatatatcgataggtttcctaaatagacattaaaataattttagctttttacttatattgttagagtaaatacgtttgtatttaaaaaataagtcagtattttttttttattaacctattattgaattttatatgagtgagagcttttccattcagccaagaacggtcacactgcatgtgacatgtttcaattgtgtaggcgcagtcacactggtcgcgtcgctcgtagatatcgtgtaaggatatgtctccgtgtttagctaaataaaatacataaaatatatgtgcaattctaacaagcatagccatttagcgtagagtagtggaacgaacagctcgtaccgggccagtaacaacaaattaacaagcaaacgcactaaagtttgtcgcggaataaagatataataatagaccagctaaccaacacaaacaaacacacacacggccagaagttcgttggcgttgaaagggaaaaatgaaacgaaatgaaaggagaataacagtgcaatagattcggtttacattgtgcaaaaaatcgaagtagcccctgccaacagggtcgctaaaaataaagaaggcgacagcctctgtttatcgttgggaataaacaaatatatggccagcggaggagaatcataacaaaggcgcaagactagccagcataaaagacaaaggagctctcctcccccgcgtccgccacccccctccctttttggggttgaaaaccccccacgcgttgcggtgcagcatcgccccgactatgcgataccctgcaatcgagtttatagtgctatag

SEQ ID NO: 7868 - DNA, 1460 bp, DROSOPHILA
gccacactgtctggccaccaaaatcccaaacttaattaaagaattaaataattcgaataataattaagcccagtaacctacgcagcttgagtgcgtaaccgatatctagtatacatttcgatacatcgaaatcatggtagtgttggagacggagaagttttttggttaataatacacaagtgaagagcgaactgcaggggagcgagatatcacgaaacaatccaaaatccacacacactcaaacagaaatcaaaagcttcgctctctcgcacacacacgcaccaaccaactatcaactatcacaaacaccgcgacagagagagagcggcaagtgaatcacggcgaatcgaaaccgatccgaacccactccggagccgaaaaagaactgatcctaccatcaaacgcatccaataaacacggccgccaacatgcagagcgactttcacagaatgaagaactttgccaatcccaagtccatgttcaaaaccagcgcccccagcaccgagcagggtcgtccggaaccaccaacttcggctgcagcgcccgccgaggctaaggatgtcaagcccaaggaggacccacaggagactggtgaaccagcaggcaacactgcaaccactactgctcctgccggcgacgatgctgtgcgcaccgagcatttatacaaacacccgctcatgaatgtctggacgctgtggtaccttgaaaacgatcggtccaagtcctgggaggacatgcaaaacgagatcaccagcttcgataccgtcgaggacttctggagcctatacaaccacatcaagcccccatcagagatcaagctgggtagtgactactcgctattcaagaagaacattcgtcccatgtgggaggatgcagccaacaaacagggcggtcgttgggtcattacccttaacaaaagctccaagaccgatctggataacctatggctcgatgtgctgctctgcctgattggtgaggccttcgatcactctgatcagatctgcggcgctgttataaacattcgcggcaagagcaacaagatatccatctggactgccgacggaaacaacgaggaagctgcccttgagattggtcacaagctgcgcgatgccctgcgtctgggacgcaacaactcgctgcagtatcagttgcacaaggacacgatggtcaagcagggctccaacgtgaaatcgatctacactttgtaggcggctaataactggccgctccttattcggtccgatcccacactgattattttgtctttcatttatttatcgttataagcaacagtagcgattaatcgtgactattgtctaagacccgcgtaacgaaaccgaaacggaaccccctttgttatcaaaaatcggcataatataaaatctatccgctttttgtagtcactgtcaataatggattagacggaaaagtatattaataaaaacctacattaaaaccgg

SEQ ID NO: 7869 - protein, 259 aa, DROSOPHILA
MQSDFHRMKNFANPKSMFKTSAPSTEQGRPEPPTSAAAPAEAKDVKPKEDPQETGEPAGNTATTTAPAGDDAVRTEHLYKHPLMNVWTLWYLENDRSKSWEDMQNEITSFDTVEDFWSLYNHIKPPSEIKLGSDYSLFKKNIRPMWEDAANKQGGRWVITLNKSSKTDLDNLWLDVLLCLIGEAFDHSDQICGAVINIRGKSNKISIWTADGNNEEAALEIGHKLRDALRLGRNNSLQYQLHKDTMVKQGSNVKSIYTL

SEQ ID NO: 7870 - DNA, 5143 bp, DROSOPHILA
ttggcccaacggcaattagctacgtcctgcccaaggataatgaactgggcaatagaaaacttgagttccactgctcaaatgtcatccacgtatataaatgagtgatttaatgacttttatatgaaccatctatgccggatactgcagccacagtgcggcatgtaatgtaattaccccaactaattgaaagtactttatggctttcttctgaaggccaagttactgtgactttactgtgtggctgggtcgttttattaaaggaaatgagtcagttacagttttgaagtaatagaaaagtttctaaaagagatttagattatatattgatttaattttaaattcaaatttatacgaaataaactttccttcttaaataaatgattaccaattaatgccaccactttgcaagtttccatagatcatgacgattgttggtttggaccaacaaagtggcgttgaaagccatggcgagacagttggttgaatagaacgatagatgcgatgacacgctgaatcaacagagtgatgcgaaaataatatgattgcggttggagtcggggcgccgacagtctggtcgataggaatcaaaccaatgatttcgcggtccaagtggacctgccgaaaatggcacagtttttcggacagaccgaagccactcgggcgtatgtgtaatgcaaactcataccgagggaatcaaatagggaataaattctcttaaaaagtatgccaagccattaaaaaagacattaaaaatgcggaaagagcaccgaattctttataaaaatctatgtcaaggatattaaaacagattttttatctttttgtgaaaccactttgattgattaccccatataggcccattcaaactcatttcctgtacatttaattagggcagtaacctaagttgggtgtcaatcaattgattccggtctttattaacagctccaaccatcaatgtcagccaagtgaagcctgaggaagtgactccctctgccccaagatgtacggactgctgctggagaacctctccgagtacatcaagtccgtttacggcgaggagaaatgggaggacatccggcgacaggctggcatcgattcgccctccttcagcgtccatcaggtctatcccgagaatctgctgcagaagctggcgaaaaaggctcaacaggtgggtgcccacttttacaaaataaattaaatgagactcgaaattgggaatataaaaacttttaggttctgggcgtttctgagcgggatttcatggaccagatgggcgtctacttcgtgggctttgtgggccagtatggctacgatcgtgtcctttccgtcctgggccgccacatgcgcgactttctcaacggactggacaacctgcatgagtacctgaagttctcgtatccgcggatgagagctcccagctttatctgcgaaaacgaaacgaagcagggtctgaccctgcactatcgttccaagcgtcgaggattcgtctactacacgatgggtcaaatccgaggtaatacttggagacactaatagatgattttaatcttatggattgtaaactcagaggtggcacggtatttctatcacaaggagatgcatattgagctcgttcgggaagagatcctctttgacacggtccatgtgaccttccaactgaccttcgataatcgggccttcacacttgcatccttggccatgacccgggaggagaaacatctgcccatcagtgctcatgtgctgtttgagatatttcccttttgcatggtttttgggtaagtatcattggtttttgattaaatattcgctaatgtttgattaatttgaatttatatttagtgctgatatggttgtgcgtagtattggtaactctttgatggtgattttaccggaacttctgggaaaaaaaattacggcctggttcgatctagttcgtcccttaattgcattcaagtttcagactgtaagtgtgttcctttgatagccataatgtcgcgtaacccttaaatacctatcagatactcaatcgtactaacaacattttcgagctggtcactgtggatccagttacggagagattcgatgtgcaaaacgaggacttactgcagcatgaagatggcagcgaaccggaaaagtctcttagattaaaaggtaaacccaaatactaacgacaaaatcaaaagatcatattaaaattaactcattttcgctaaaaatataaaactgaattaagagaagttgtgctctttgtaatatagtaaacccgtatttttcgcaggtcaaatggtttacatggagaactggcgcatgattatgtttctgggtactcccgtaatgccggatctgacctcactaataaccacaggtctatatatcaacgatctgtccatgcacgacttcagcagagatctcatgctggcgggcactcaacaatcggttgaactgaagttggcactggatcaagaacagcagaagtcaaagaagctagaggagtccatgagattggtaagattttttagggaagaatgcaaaagtgttgatcttagctaacaaggtgtaatccaaagttggatgaggagatgcgtagaacggatgagctgctgtatcagatgatacccaaacaggtggctgataggctccgacggggcgagaatcccattgatacctgtgaggtgagtgttcctcagaacaatatcttaaatataatattatattataatatataaaacattatcccaaaagatgttcgatagcgtttccatcctgttctcagacatcgttaccttcaccgagatttgcagccgcattactccgatggaggtagtgtccatgctgaacgctatgtactccattttcgataagctgacggagcggaattcagtgtacaaggtaggttcgattccatatctatgaggtgaactcaatgctgaaatagatgattcgtaggtggaaactattggtgatgcgtatatggtggtggcgggtgctccggataaggatgccaatcacgccgagcgagtctgtgatatggccctggatatggtggatgcgataaccgatctaaaggatccctcaacgggccagcacttgaggatacgtaagatattttaatctttacttatatgttaatataccaactgatccccatcaggtgtgggcgtccactcgggcgcagtggtggcgggcatcgtgggccttaagatgccgcgttactgtctctttggcgatacggtcaataccgcctcacgaatggagtccaccagcatcgccatgaaggtgcacatatccgagtctacgaaggttcttattggacccaactacaagatcatcgagcgcggtgagatcgatgtaaagggcaagggcaccatgggcacatactggctggaggaacgagagaaccggctgcctctgcaactaaccgctgctctgcaagttcatccgctctcacctgtcccaccgacgcccacacccaagacgaaggccatcatgcctcctgtatccaagccgttgactccgatgatgcccgtttcagtttccctggcagcttccatgcccaccagcaacgttcctgctgtggatgtgatggcttcatcatccagcatttccggtttggcactaacagccgctgcagcggcccacatgtcgctacatcaccaggcggtggtggcggaggcattaactggagcttcagttgaagtggcactaccatcagtagcttctggcgcaacaggagcggcagcgggtggaggtgcaccgtcggatgaccgcaacagtcgcatctactcccccgtgaccttcaaggatgtggctcgacgaagcgtagccaattctccggtaaggagctgtgctcaaccggatcaggagagacgtcgcgagtcccgctccaattccacgggccacgtgtttatgcgaactccttcggaaattttcggctctctcatcctggacaccgaggagtttctcgaggatctgcaaatctcacgttcctccctggcaaacaataacaacaatcagagcccctgcggttttagcccaactcctccattccggattggcagcgcaccgcccaagccgagacctagtaatccggataaatttacaccggaggaactggccgccatggatcaactgacgcctccgtcaacggcaccagccagagaaacggccagctgcagcagtgcatcattggatcgcgacaaggcgaccaagctgaagtaagtttttagatggaatctagagccattagccaacttctcgtttcttagaaaaatcactttctccaacagcagcagtctggatgcaaccactccaactgcgttggctgctgtggtatgtccaatgagaaccaagtcaccgccaatggcagtggctccagtgatgcacatggtacaggctagcaccagcaaaggcgacggccaacgaccaggctcgaaggattcagtatcatccatttccctgcactcacctcctccgcatcgatctaactcggcaccagccaggtgagctaatgagagggtatatgtacatctacccaaaagtaacataaacttccttttccagaccgcactcaatgtcgaaggcggcgcgaaaggccttcctggccgccaaacagaccaaggcaatggaaaagctggacaagatgatcgaagaggttcaagaagtggagtctcagtcggtggcaaaggcggccaacatgcgtctggccctttacggccacgatggaggtggtgatttggctgccggtgggtgtccactgtttctgcctccgccgccgcagcagcagcagcagcagcaacagagcctgatgcccagctccatctcagactccggcctctgcagtcatgggtgagtagagccatgatcacacttttcatatattcctttcaaaagttatattttttaatcccgcgcgacatagtcatagtcatgcacccagctgtcatcatatggatccgaagatgaccaacagccagagtttccagcattctccacgtggcggaataacccatcagtgctgcagcggctttggacatggcaatggacgtcattcgcaccggatgcactcgaatgcttgccggattctgtagaggagggggcagcacgagcacacccttcatcaattccatatcatgtatactgactc

SEQ ID NO: 7871 - DNA, 2212 bp, DROSOPHILA
atgtacggactgctgctggagaacctctccgagtacatcaagtccgtttacggcgaggagaaatgggaggacatccggcgacaggctggcatcgattcgccctccttcagcgtccatcaggtctatcccgagaatctgctgcagaagctggcgaaaaaggctcaacaggttctgggcgtttctgagcgggatttcatggaccagatgggcgtctacttcgtgggctttgtgggccagtatggctacgatcgtgtcctttccgtcctgggccgccacatgcgcgactttctcaacggactggacaacctgcatgagtacctgaagttctcgtatccgcggatgagagctcccagctttatctgcgaaaacgaaacgaagcagggtctgaccctgcactatcgttccaagcgtcgaggattcgtctactacacgatgggtcaaatccgagaggtggcacggtatttctatcacaaggagatgcatattgagctcgttcgggaagagatcctctttgacacggtccatgtgaccttccaactgaccttcgataatcgggccttcacacttgcatccttggccatgacccgggaggagaaacatctgcccatcagtgctcatgtgctgtttgagatatttcccttttgcatggtttttggtgctgatatggttgtgcgtagtattggtaactctttgatggtgattttaccggaacttctgggaaaaaaaattacggcctggttcgatctagttcgtcccttaattgcattcaagtttcagactatactcaatcgtactaacaacattttcgagctggtcactgtggatccagttacggagagattcgatgtgcaaaacgaggacttactgcagcatgaagatggcagcgaaccggaaaagtctcttagattaaaaggtcaaatggtttacatggagaactggcgcatgattatgtttctgggtactcccgtaatgccggatctgacctcactaataaccacaggtctatatatcaacgatctgtccatgcacgacttcagcagagatctcatgctggcgggcactcaacaatcggttgaactgaagttggcactggatcaagaacagcagaagtcaaagaagctagaggagtccatgagattgttggatgaggagatgcgtagaacggatgagctgctgtatcagatgatacccaaacaggtggctgataggctccgacggggcgagaatcccattgatacctgtgagatgttcgatagcgtttccatcctgttctcagacatcgttaccttcaccgagatttgcagccgcattactccgatggaggtagtgtccatgctgaacgctatgtactccattttcgataagctgacggagcggaattcagtgtacaaggtggaaactattggtgatgcgtatatggtggtggcgggtgctccggataaggatgccaatcacgccgagcgagtctgtgatatggccctggatatggtggatgcgataaccgatctaaaggatccctcaacgggccagcacttgaggatacgtgtgggcgtccactcgggcgcagtggtggcgggcatcgtgggccttaagatgccgcgttactgtctctttggcgatacggtcaataccgcctcacgaatggagtccaccagcatcgccatgaaggtgcacatatccgagtctacgaaggttcttattggacccaactacaagatcatcgagcgcggtgagatcgatgtaaagggcaagggcaccatgggcacatactggctggaggaacgagagaaccggctgcctctgcaactaaccgctgctctgcaagttcatccgctctcaccttcgcatctactcccccgtgaccttcaaggatgtggctcgacgaagcgtagccaattctccggtaaggagctgtgctcaaccggatcaggagagacgtcgcgagtcccgctccaattccacgggccacgtgtttatgcgaactccttcggaaattttcggctctctcatcctggacaccgaggagtttctcgaggatctgcaaatctcacgttcctccctggcaaacaataacaacaatcagagcccctgcggttttagcccaactcctccattccggattggcagcgcaccgcccaagccgagacctagtaatccggataaatttacaccggaggaactggccgccatggatcaactgacgcctccgtca

SEQ ID NO: 7872 - protein, 690 aa, DROSOPHILA
MYGLLLENLSEYIKSVYGEEKWEDIRRQAGIDSPSFSVHQVYPENLLQKLAKKAQQVLGVSERDFMDQMGVYFVGFVGQYGYDRVLSVLGRHMRDFLNGLDNLHEYLKFSYPRMRAPSFICENETKQGLTLHYRSKRRGFVYYTMGQIREVARYFYHKEMHIELVREEILFDTVHVTFQLTFDNRAFTLASLAMTREEKHLPISAHVLFEIFPFCMVFGADMVVRSIGNSLMVILPELLGKKITAWFDLVRPLIAFKFQTILNRTNNIFELVTVDPVTERFDVQNEDLLQHEDGSEPEKSLRLKGQMVYMENWRMIMFLGTPVMPDLTSLITTGLYINDLSMHDFSRDLMLAGTQQSVELKLALDQEQQKSKKLEESMRLLDEEMRRTDELLYQMIPKQVADRLRRGENPIDTCEMFDSVSILFSDIVTFTEICSRITPMEVVSMLNAMYSIFDKLTERNSVYKVETIGDAYMVVAGAPDKDANHAERVCDMALDMVDAITDLKDPSTGQHLRIRVGVHSGAVVAGIVGLKMPRYCLFGDTVNTASRMESTSIAMKVHISESTKVLIGPNYKIIERGEIDVKGKGTMGTYWLEERENRLPLQLTAALQVHPLSPSHLLPRDLQGCGSTKRSQFSGKELCSTGSGETSRVPLQFHGPRVYANSFGNFRLSHPGHRGVSRGSANLTFLPGKQ

SEQ ID NO: 7873 - DNA, 9931 bp, DROSOPHILA
tgggatctataaaatgtaaacaaaatagttttgcgaactagtcttaaataaattttagttcaataattttgtatgctaattgtaactattaattaagtgatagtgtgaagacaaagcgtcaatattagtaaaattattttttaagttatcctaatcctgcggggatcgtttaaatatatttcgtatgtttacttacataggagttttaattttaattagttttttaaatttcgaatacctgaattttacaactttttggcaaagttgtttacatttatcacaatcatcgatatattatcagcataattcaattgtaatttatagcataactaaatcatttaatatttaatcgaaataattttgtggtaagaaatgaatcgaatttaccattttcaggcaacatacataatttccatattaccgcttattcctttaactcccaatttttcagccggttgtgcatgaaatctgatatacttatttaatttacaacatttcctcgtagttagtaaggttatcaaacgaacgatcattgcactttttatgggttcctatgggttattgcgggtccggctggcccatgaggaaaaccactcgaatgaaaggggcgggggaaacggcaactgcatatcctgccagcctctattctcctgccagtcgtcctgcctgcctgcctgctgttgtagctgccgcgcccattaaaaaaaaaaaagaaaacctcgaaaagttgcagctgttccctcagcgctccttctctgtttgttttgtgactgccagccagaatgccgatcccaagcgatccgatcgctgagcgcttagcgatggggcaggcagacgggctgatcatgaatggcatctgcccgggattaatgggccgtgcacgggagtacggagttttaatgctgcttctatcacagttccagatcgaagcaccctagctgtgaaagaagtgtccgacaacaggtcggaattgaaaaaaaagagaaaaactgagacgagaatgaaaatgtcagaggtgccacgcatcaaggtcttccgacccacctgggaggagttcaaggactttcccaagtacgtggcctacatggagtcccagggtgcccacaaagccggtttggccaaggtggtgcctccgccggaatgggtgccccgtcgcagtgggtacgccgatctcgatgctctaaatgtcacaattccggcgcccatttgccaggtggtaaccggcaaacagggatactaccagcagattaacatccagaaaaagccactcacagttaagcagtttagcgagttggccagcaccgagcgttacgccacacccaaacactttgactttgaggatctggagcgcaaatactggaagaacataacatatgtggcgcccatttatggggcagatgtcagcggaagtatcacagacacagaccaggatgtaagttcgttagggttagggtttaggtttgggcattagctgatgattcgttgcctttgcctttgccgttgcagagctggaacatcaaccggctgggcacaattcttgactatgtcaacaaggattataacatccagatagacggcgtgaacacagcctacttgtactttggcatgtggaagacgacctttgcatggcacacggaggacatggatctctattccatcaattacttacactttggggcgccaaagacgtggtatgtggtgccgccggagtgtggtcgcaaattggagaaggtggccaaccagtactttccggccagttacaagaattgcaacgcatatttgcgccacaagatgacgttgatttcaccacagattctcaagcaacatgacgtgcccgtcagtaaggtgcgtttatcggtagtaatcctgtccatagtggccgtactaaatccggctcttgcagatcacgcaggaggcgggcgagatcatgatcacatttccgttcggctatcatgccggcttcaatcacggctttaactgtgccgagtccaccaactttgccatggagcgctggatcgagtacggcaagcgggcggtgcagtgcacctgcagcaacgatatggtcaagatctcgatggacacatttgtcaagcgcttccaaagcgatcgctacgatctgtggatggaggggcgtgacgtggggcggcatccggaggatccgccaaacgcggtgctcagtgcagcacccctgccaccacatctcgatgtcttgctgtgtgataaaaagtaggtttccttgcgctacttgtggggctaccagcgagtcttattcctatctcctgctcctccgcagaatgaaaaagcaatgcaatcctaccaaggccaagagtttcaaagagcgtaatcccgatctggacctggatgaaatccagcagaatcccaacgtccccgacgacgtcaaggccatgctgaaggagagcgtgctgacgctggacacgggcgatctggccacggatgaggctgattttcccaacgaggatgccatgagtctacagagtccggcgaatctgaagaccaagcaggagctgcttgagtacattgacgacggcacaggtgtgtgggccggcaggtgcccttcaaaacgatcatcttcccctttccccagcttaactataatatgtttcctttctcgcatctgttctttgtcttcccctttttgcctgttgacagaagatgatgatgaggaggaggacttcaagcggcgcaagcagaagcggcgctatgatgccgactatgacgacgattggctggcgtccaagcgcaagactaactcgcgaaacaatcgcggccgtagtccgcgcaccaaggacgaccgttccatatcgccggcctcctccacctcctcgacgtcgaggggtgcaaggcgtggcaaggccagtggcacgccccgaaagactcctgcgcggcggaaaaaggactcaatcaccacgtctccggcggttagttctgcagcaactgccgtaaaaacaccgacatccgccgtagtcgctggaacaacatcaatagccacaaccacaacaccaccagcagatggcggaggaggtgagagcagcagcttaggcagccactgcaccactgcatccccataatcacagcttcacctatccacctccaagccatccaaattctctaacccaatgccccaatgtctcttttttagcaaaaatcattccaaatttcccagtagttttttgttctaaccaaattgacaatgtttcaagcagtttcacatgtatcgttcatcgtttttgttttgcgattaatgtacaaataaatcgttctatctaattgtaagagtgcgccagagaaatatacgatcacgcttttaagtctatgctaaaaactaaccgaaaaccaaaactgttttactaaaccgaattcaaggtgttggtgctgtctgggccgaatccgttcctcttgttttgccgcccccagaatccgcttcacttgctctttcgctttgactacacatcctcattccacccaaatcgcattgcctcctatccagaaaaccccccgagtccacatgtgtgtatgtgtgtgtatctgtgtgtttacaccaacagtaaccgtatcaaccgcatttattcacaaacaattgaaatccttgcctgatcaagtactaaactttatcgattgacgtttttcagatgccaaaaaggagcgacagtcgctgcagtttatgcaacaatcgcgtaaatttgagggcaagataccaaaactaagtcaaacgagtgcagcaacaggaggagcaacggcagccgcagaagcatccacatccaagtctagtcaagggcagcagcaacagattgtctacgtcaacatgttgcccgcggccaataccctgaatggcattccacagcagcagcagcagcaacaatatgcgagcacggatggaaatgtctatcagctgcaaaatgaaatactctgtgatgcaaatggacatgccgtgactgccgccacggcctcatatcaaactacggccagtagtccgcagcagcagcaacagcagcagcagcagcaacagaatgttgcaactagtgttgccggtaagtgtacaacttgaatttgttcgcttttacgttaattaatttgtttgttggttgtagtctttgtgtatggtttaacctaaccctcttgtgtactcgtatttggtgtttaagttgaagctattaccactaaccgctctcattgtaaatacaaacgcactcacacaattatgattttgaccgtcaaccgaattggccaaatttgaatccaatcaattgtaaatgttgtcgcacatccatgtcatccaatcgatatcatcctgactttccaaattcaaactgcattttgagttttcaactttttgtgccaaaattcaaatgcgccactaagggagaacgtttcgaatgagagcaaacattgaatttgacttccatttgtgttccgtgttcttgtcacacctttgaacctcccaaaaaatgaacaaaatacaaaagaatataaacgaaataaaaaggcaatgaaatcttcaattaaccattaccgacctatctcaataaatcgaactccaatcgcatcgcccaattaataacaacaaccgctttcaactgctccacacactacatgcttgtctttaatttgcgacaccatttcccaggtctgtgtcctgtctctactcgaattgtcgagagcattggaaaaatcaaataaataagtgcacaattcatttcaaccgagggagggagctccgtacaaaacagtaacgcgtcgaaaaaggctcaaaaacaattgtcgatcacgtattattttactttattagctagtttaaggttttgcagttcaaactttggcgcccaagcagcagtgagttcaatgagagcatcagtgctgcccatgcgcgcgctgactcttggcagcacttgcgcgccaaattttgaaaatagagtttataatttatagatttgcgtttatgatttagttacttttagcaacgacactttcccgtcttttctatctctcacttattgtttcccactctttggacacaacacaaacacaatccgttgccagctcctcctgctccgccccaagcgatggaggaggaggaggagtctacacaaagttggcaccagtttcatcctctcctctgtccacctgttaccaccacctcagttaccgaagtcgattatttatttaactttatttagtacgtattgagttgcgagtactgtaccagagttacgaattacgattgctgtaatgtagatctaagtaaacacaaattctaccgacaaacaaaaaccaattcactcactttctatctatatgtcctgtattgccttatccaatcgatttgataaagaggcccgcccgtaaatgcagcagatgcactgcatctgtggcatttgccttttttgctgttggccgcaagtagatttcattttgcacaacatttgttttatgcgaacctgatttgagtgaattgttgattgatttcgatttcaattacgaattgatttattgatttatgcaaatattacattcaaacacatcttttatgaaccaaaccaaatatgtattttcaaaatatatataaacaaaagacaatgtggtcacaactattagttcgtcctccatcctgcacacgaacgccaacaccaacggagtggacacattggccgccacacagcaacaacaacaacaacagcagcagcagcagcagcaacaacagcaacagcactaccactatatcaccaccaccggcgaggatggacaaaccccgaccaccatagtgttcgagaactacaacggcggaatgccagcggtcagttctgccgcaccaacgcccgttcccgtgtcgcaggccaacgcacccgcgaccacgaccaccactgccctggtcaacacggacggcacgatcatcgagttcgacgggagcacgtacgaggagtatcatgtcctcaaaagcgagcccggcagcagcgattgcctgagcaacggcagcagtgccgtggccgccgacataatcaagtacgatccccagcacggtgtcgtcggcgacgaggaggacgacgatgagaacggcatgctgcatgtgaagtacgaggagcagagcctcgaacacgatccggaaaacgagcacgatgccgagcaggagcatgagtacgaggagtaccaggtgatcaaggccgaggtggaggccgaggcggcggagctggcagccggcaccaccagctatacgatcagccaggagcagacgggttcaggcaacacggtgctgtcctcaatggtgcccaaatcgggatcagcggcggccgccaagcagaagcgcaaacgcaagacgcgcgtaatcgccgacgacgagcagggcgagtacctggaaaagatgagtgtacgtggcctggacattgcccgctacgagcacatcatcgacggcgtggcttactgcctggtctgcgccaagaacgatatcttcaagacgtttaagaacaagtatagcttccagagacacgcctacctctttcacgagggccaaaaccgcaagatattcgcctgccccatttgcaacaaggagttctcgcgtccggacaaaatgaagatgcataaaaaggacaagcacggcgatgttcccatgccaccatcggccaccacgacgccgctaaaggctgacggtccgccggctaagcgggcgcgtaccgctcgtactccgcgcgtccgcaagacgaaggatggcagcacgccgaccaagaagcggttagcgcagatcgacagtgttctggacgacgtgcaaaatggggagtctctgaccatggcgccagtcagcgtgagtcactcccagcaacagcagcagcaacagatccagcacagcatcacaacgctggctccctcgacgccatcgcagccgcagcatcagctgcagacgctgccatcgctggacttcagcggcatgatcctgcctggaggcgcacagctggcactggccaatccgggcgccaccagctccgtgggactgcaacgaggaccagccacgccgaatggtcagccggcgccgcccaccaccacgttgatctactcgaatcaactggaactgcagcaggcgctgctgcaacagcagctgcaaggtcagagcatcatgatccaggatcaagccggcaacctggtgcccctgcagctggacggaacccaggcgatatacacgacggcgccgcaggctcagcgccaacagaccacggccacatatcagacgacgcagcagcagcaacagcagccagcgcagcagcccgccggccaggcgcaacagcagcctcactacgagttggacaacgttacctatttgagctccacggcggcggccacaccgacatcggccgagcagcagcagcaacaacagcagcagcagcacgtgatcggcacggttcagagctatcagatcctgacgcccgacggcctccagaacttccaacccaagctggagacggccgagctgggcgacctgtgtccctattcgcagtacaccttcacgacgcacgccggagcgcagcccacgctgaatgcgaacgcgctggacgcgcagacccagcatcagcagcaccaccagcagcagcagcaccatcaccagcagcagcaacaccaccagcagacgcaactactgcagcagcagcccttcgccacgcatcacaatccgcaccagcagttcatggagctgaagaacgagctgctgattaagggcggcgacgcctacaccctggacactgcctccatgtaccacctgcccttctcgcccacctcgatgatcaatgcggtgaacgatgtgaacacctcgtcgctgctggaaaccaaagaaattaggtaaacgctctttccaactaaccatgcccactattgcccaatccccaatacccccttgtctgctcgatttttctcttagtgtaacgcgctcgattagattgccgctctgtatctgtatctgtactatatctctgtatctgtacctgtatctaaaactctatccatattgctatctctgccaccgtaaccccttttacttgcgactgcgactccgatctttctttcacgtattttgaaacgcgaatcgacggtgtactttatacaaaaaaaaaaaaagaaacacttaacacccgatggccgcctacaaaacacgaaaactaaacatcatgggaatgggggataacattaagtatgacttgtttagttttaaattaggattatgcatatattagttgtattatttttgtaatcatccaattatgtacatctttatttattacgtacttatattacttagtagaatttaaccgagtttttcagttggtaatttagtcgtatgaattgaagtttgtgcatttatttatttatttaccaatcataacccactgaggtatcgcactctattttgaatagattgttccttgtgtggcttgttgttgctttcttgtaaaattgatatgccatcaaatattacccaattaataccacgaataacaataaccaatacaaacaccccctttttgtttcgaaaaatacttgtgttcaaatacgttttatacttcaatgcaattttgttctttttctttcttttctcttgttttattttatgtacacacaaccaatccaacaaccaaccaatcaatcaaacaatcaatcaatcaatcaaatcaacaacgaaatacctaatcaaaaaaaaaaaaaaacgatttgtaactatagctacgatatatcagaggcagtgctattagctctctgaataaaacgatccacacagaaagctgcagccaaagtaccaaaaattctatttaacgaatacaagactcaacaccgagttcgcaatgaatacgatagctaaacgaatcgagtttaaaagtgaataccacccaatcataatccccaaacgaaagcaacgcaaatggaagacattttcaatgtttgcccagatcaacggacaagcatataaataaataatccaccaaactaacttagcgaagcatttgtgtacttacatccgacacatcacatactcataatagtcggttgcttgaggagatctcgtctcgtctcgccttattcattgattcattcactattccatcgtcacttgttgtgtgtgcgtgtgtgcaagagcagcaacgagcaaataccaaaaaaatcgaaagaaacaagcaaataatgatctctccatgaaacataaaaaataaattaaacatataaaaaaatattggacaattagtgaaaggtatgtgtacttttgtttattcgccttattttctcgttgcccctttttgttttgcataacacgtttctgtttttgttactaaaccatgttcccttgggttaactgcatcctaacacccggaaaaatgggaagcccactgctcagatacttttgtgtacaaaaggggtgtaagtatctgagatggcattctactgaccacactgaacactacccactgactgtccgagagcaacactctctgatccatccacacatccacattcgatccatttaagctatcagtcataagagcccttatcatttactaaccaaaattgactttgatttaagcatatctaacaactaaattaaataaaaggagtcgaaacgatcgaaactaacaccaattgaaatgacaaatcagcaaatatgctaatcaaattgtttttattttttctttttcacccgacaacattttacgttcgtctgttgtttgtgttcttgtgttattccctatgatttgcacacaaaaattcataatcatgcaacacaacaaccacatcaacatcatcatcaacaacaacaacaacaacaggttcttctaaacacgacaaccaccagaaacaaatgttcaagaggccatacaacaccacaccaagcaacaacaacagaacccagaacaccatcaccaatccaagtccgaactcgaattcg

SEQ ID NO: 7874 - DNA, 2341 bp, DROSOPHILA
atgaaaatgtcagaggtgccacgcatcaaggtcttccgacccacctgggaggagttcaaggactttcccaagtacgtggcctacatggagtcccagggtgcccacaaagccggtttggccaaggtggtgcctccgccggaatgggtgccccgtcgcagtgggtacgccgatctcgatgctctaaatgtcacaattccggcgcccatttgccaggtggtaaccggcaaacagggatactaccagcagattaacatccagaaaaagccactcacagttaagcagtttagcgagttggccagcaccgagcgttacgccacacccaaacactttgactttgaggatctggagcgcaaatactggaagaacataacatatgtggcgcccatttatggggcagatgtcagcggaagtatcacagacacagaccaggatagctggaacatcaaccggctgggcacaattcttgactatgtcaacaaggattataacatccagatagacggcgtgaacacagcctacttgtactttggcatgtggaagacgacctttgcatggcacacggaggacatggatctctattccatcaattacttacactttggggcgccaaagacgtggtatgtggtgccgccggagtgtggtcgcaaattggagaaggtggccaaccagtactttccggccagttacaagaattgcaacgcatatttgcgccacaagatgacgttgatttcaccacagattctcaagcaacatgacgtgcccgtcagtaagatcacgcaggaggcgggcgagatcatgatcacatttccgttcggctatcatgccggcttcaatcacggctttaactgtgccgagtccaccaactttgccatggagcgctggatcgagtacggcaagcgggcggtgcagtgcacctgcagcaacgatatggtcaagatctcgatggacacatttgtcaagcgcttccaaagcgatcgctacgatctgtggatggaggggcgtgacgtggggcggcatccggaggatccgccaaacgcggtgctcagtgcagcacccctgccaccacatctcgatgtcttgctgtgtgataaaaaaatgaaaaagcaatgcaatcctaccaaggccaagagtttcaaagagcgtaatcccgatctggacctggatgaaatccagcagaatcccaacgtccccgacgacgtcaaggccatgctgaaggagagcgtgctgacgctggacacgggcgatctggccacggatgaggctgattttcccaacgaggatgccatgagtctacagagtccggcgaatctgaagaccaagcaggagctgcttgagtacattgacgacggcacagaagatgatgatgaggaggaggacttcaagcggcgcaagcagaagcggcgctatgatgccgactatgacgacgattggctggcgtccaagcgcaagactaactcgcgaaacaatcgcggccgtagtccgcgcaccaaggacgaccgttccatatcgccggcctcctccacctcctcgacgtcgaggggtgcaaggcgtggcaaggccagtggcacgccccgaaagactcctgcgcggcggaaaaaggactcaatcaccacgtctccggcggttagttctgcagcaactgccgtaaaaacaccgacatccgccgtagtcgctggaacaacatcaatagccacaaccacaacaccaccagcagatggcggaggagatgccaaaaaggagcgacagtcgctgcagtttatgcaacaatcgcgtaaatttgagggcaagataccaaaactaagtcaaacgagtgcagcaacaggaggagcaacggcagccgcagaagcatccacatccaagtctagtcaagggcagcagcaacagattgtctacgtcaacatgttgcccgcggccaataccctgaatggcattccacagcagcagcagcagcaacaatatgcgagcacggatggaaatgtctatcagctgcaaaatgaaatactctgtgatgcaaatggacatgccgtgactgccgccacggcctcatatcaaactacggccagtagtccgcagcagcagcaacagcagcagcagcagcaacagaatgttgcaactagtgttgccgctacgatatatcagaggcagtgctattagctctctgaataaaacgatccacacagaaagctgcagccaaagtaccaaaaattctatttaacgaatacaagactcaacaccgagttcgcaatgaatacgatagctaaacgaatcgagtttaaaagtgaataccacccaatcataatccccaaacgaaagcaacgcaaatggaagacattttcaatgt

SEQ ID NO: 7875 - protein, 717 aa, DROSOPHILA
MKMSEVPRIKVFRPTWEEFKDFPKYVAYMESQGAHKAGLAKVVPPPEWVPRRSGYADLDALNVTIPAPICQVVTGKQGYYQQINIQKKPLTVKQFSELASTERYATPKHFDFEDLERKYWKNITYVAPIYGADVSGSITDTDQDSWNINRLGTILDYVNKDYNIQIDGVNTAYLYFGMWKTTFAWHTEDMDLYSINYLHFGAPKTWYVVPPECGRKLEKVANQYFPASYKNCNAYLRHKMTLISPQILKQHDVPVSKITQEAGEIMITFPFGYHAGFNHGFNCAESTNFAMERWIEYGKRAVQCTCSNDMVKISMDTFVKRFQSDRYDLWMEGRDVGRHPEDPPNAVLSAAPLPPHLDVLLCDKKMKKQCNPTKAKSFKERNPDLDLDEIQQNPNVPDDVKAMLKESVLTLDTGDLATDEADFPNEDAMSLQSPANLKTKQELLEYIDDGTEDDDEEEDFKRRKQKRRYDADYDDDWLASKRKTNSRNNRGRSPRTKDDRSISPASSTSSTSRGARRGKASGTPRKTPARRKKDSITTSPAVSSAATAVKTPTSAVVAGTTSIATTTTPPADGGGDAKKERQSLQFMQQSRKFEGKIPKLSQTSAATGGATAAAEASTSKSSQGQQQQIVYVNMLPAANTLNGIPQQQQQQQYASTDGNVYQLQNEILCDANGHAVTAATASYQTTASSPQQQQQQQQQQQNVATSVAATIYQRQCY

SEQ ID NO: 7876 - DNA, 3011 bp, DROSOPHILA
gggctctcgcaccagcacctgcatgggctgaacctcctgcgggacataaccaatgcggacgtggtgggaaactacttgctctcctccacagtggagttcacgccgcgcaccattttggacaacacgtatcgcgtggaaacgcacacggcggccagcattactctgatttatcagatggcgctcccagtacttctctttgccggacgcccgtcccgcctgatcgtatccgggggcacgaacgtcgactttgcgcctccggtggaatacatgcaggaggtgctgctgcccaacctaaaacacttcggggttagtttcgacctgaaggtgcagcggtacggcttctatccacgcggccaaggcagatgccagttggacgtgcaacccgtgaccaagctgaattccggaaaattagtggctttcggccgcatcaaatcggtcagcggagtggcctactgcgccggccgcttgccggtaaatattgctattgacatgcaacagacggctcaacgcgagatacatcgtttgtggccgtcccagcagtgcagcatcgagccgattaagcattcacgccagaaggcattccacaacggagccggcatcctgatgactgtcaacacgacctccgacgttgtcctaggtgcttctgcattgggcaaaaagaggatcgacggacacgttctcggctcagaggcgtcgtgccaactgggcgactacatgcgcaaacaggtctgcgttgatgattacatgcaggaccagctcatcatctacatggccctggccgtgggccgctcaacgatgcgcacaggcaagctgaccaatcacacgcgcaccgccatcaatgtagccgagcaaatgacaggggtcaagttcgatgtggcgatggagcccggcggccagatgctagtcagctgcaagggcttgggacatgtgaacaagttgatttaacaatcgatagatctctttactctaaggaaaccttaaattaatgtctacatatatagagaatatacgtgtcctaaaggcgccggaaaatggccagaaaatgatcgcccttgtttcgaaccaccttagcgccctcctcgctgctttggtacagcttcggggtgatgggatcagcattctgtgggtttaaacgtaatgattaatgtgtgacttggctgcgtgatctcggttttgaactacgtacggcctcctcttcggtaagacgctcgtacagcggatgctcctccatatgtgtcactatccacttgtgcaagtcctcaacgtccgtcatggtgtacaacagaccctgggtaagcagactaagcagtaagcagaccgcatttcgagtactttcaggaaactgttggacttacccccttcctgaggatataggcatattcggagagtagagcctggttgataatacgccacttgtgcttggcgcgcttgaaatgtgggtccgggtagaggaagaacatcttctccagctggccctttacgaagtagttgggcagatacttcatggcgttggtgcgtaagcaggcaatgttctggtatgcacccgtatccgcgcatcgtcgacgcagtgccgcaatccggtccaccacgtagtccgacaccttgacgcggatttccatgccgatggacagcttctcggggaacatctcccccagggtgacgagaaagccgccatagccgcagcctatgtccgcaaaacttacctgctggccctgctgaatgcctgggtacatggagcgccagtccacatcttccgggcgagcaggactatgtgaaggagcctttagtgtgtgcagtccatttcgtggtctactcactagtcgaagctgtggtccgcaatgggattcgagtgcgcacgctggcggtagtagcgcttttgtggcaaccccgtcaccgccgacgtggggtttagcacatccggctcctggttctggccctgatcctgagcctgtccaccggtggccaccattactagaaattagcagaagcgagtgatatcaggcaccgacgaggagaagcagcagcacgttgcgaacgcttttgaaaactacataaatatactaaaatataccgaggcatacgttcgcttgcgttgggggcattcaaacgatattttcgtttaaaatcagaaaactttaaaaatacttatattttgataagtaaatattcatttattggctaagaattacacaattagaaaaagtaatgtttcgcaaagctaatcacatataaaaacaatttccatcacttgatttccaattttgtgaaagggttatcatgatttgttgcaaaaaatttaaatgattaaagttttattacgaggtaaacgaggtatttggaccactgtaatgcaccattttcgacgcaataaaatgcaaagtttccctggtttcgacaccaggggatcagaaatcatagcaggtgccagctggtttccgcaagaacatgaaaataactgttttgttttccagtaatttttcgaccaatgggaaatagctatgtggaaggcaaccgtaaattaactttgagaaagctacagtaaaatgtgacaaaatccatgaaaccaaatggtccttggtcacctcctgaaaattatgttcgactagtgtctgaacccagagaaagttgctattttgtactaagtcttgtttcagcccgcggacgagatctttattttcttgtatcgtttttggtttccgacaccaggcaaacagaaatcatagcagttgtcagttggcagcacagattaaaaccaaaacatctgatataattcatgatggctgctgtctatgcatttccagtcaatattcgaccaatagaaaatcaagaggggaagttaaccgttaatttgcaactaagcacatacacactagagccaatcacgacaggcctgaaataactgtaaatttcgtagtactttgagcttgagaagtaatcagctgatcgatgcacgccctattcttttttctgttcgcctagtgtcgtagattcaaaggttaccccaaaaaagg

SEQ ID NO: 7877 - DNA, 828 bp, DROSOPHILA
tcgtcggtgcctgatatcactcgcttctgctaatttctagtaatggtggccaccggtggacaggctcaggatcagggccagaaccaggagccggatgtgctaaaccccacgtcggcggtgacggggttgccacaaaagcgctactaccgccagcgtgcgcactcgaatcccattgcggaccacagcttcgactatcctgctcgcccggaagatgtggactggcgctccatgtacccaggcattcagcagggccagcaggtaagttttgcggacataggctgcggctatggcggctttctcgtcaccctgggggagatgttccccgagaagctgtccatcggcatggaaatccgcgtcaaggtgtcggactacgtggtggaccggattgcggcactgcgtcgacgatgcgcggatacgggtgcataccagaacattgcctgcttacgcaccaacgccatgaagtatctgcccaactacttcgtaaagggccagctggagaagatgttcttcctctacccggacccacatttcaagcgcgccaagcacaagtggcgtattatcaaccaggctctactctccgaatatgcctatatcctcaggaaggggggtctgttgtacaccatgacggacgttgaggacttgcacaagtggatagtgacacatatggaggagcatccgctgtacgagcgtcttaccgaagaggaggccaatgctgatcccatcaccccgaagctgtaccaaagcagcgaggagggcgctaaggtggttcgaaacaagggcgatcattttctggccattttccggcgcctttaggacacgtatattctc

SEQ ID NO: 7878 - protein, 256 aa, DROSOPHILA
MVATGGQAQDQGQNQEPDVLNPTSAVTGLPQKRYYRQRAHSNPIADHSFDYPARPEDVDWRSMYPGIQQGQQVSFADIGCGYGGFLVTLGEMFPEKLSIGMEIRVKVSDYVVDRIAALRRRCADTGAYQNIACLRTNAMKYLPNYFVKGQLEKMFFLYPDPHFKRAKHKWRIINQALLSEYAYILRKGGLLYTMTDVEDLHKWIVTHMEEHPLYERLTEEEANADPITPKLYQSSEEGAKVVRNKGDHFLAIFRRL

SEQ ID NO: 7879 - DNA, 8335 bp, DROSOPHILA
actctgctcaggctgagaataatcagagatatccaacagaaatgcatcgccttcaattattgaagtttggtttgggagtttttcatttccgtcctctggtattcgagtatctaacaatgggtatatctaaatatatacgtatatttttggatcacccactagcgcgatgtctttgatgttccttagtcgccgagcgcacgtttccaactgaatggccactcataattgctttaaaaattccactcaaaagttttccaaaatattctttttgaacttgaaagcttccagtgttgaacaatcaccattaaattaaaagtcaccatttgttgataatataaatacatttaattagaattatcacaaacataaattgcatcataaactaaactattgcaagttacaagtataaatagttaagggctaagaaaaatatatagattgcaagttaatttttggcacataatctttgttgtgatgggggagccataaacccaaggcgaatcttcggcaatgaccagatgggtgttccgtccgttgtgatccctgtaatggaggggaaaatcttagcggagcgtattaatagctgtatatatagagtagtggtactccaaccccattggcattccaagtgacttccatcaattgtagtttgattggaaagacaatcggagaagttgttccccggcaagaaactgagccaactgctgggcataaatcaccattaattaagtgcatgcgccccaattgaagtgtgatgccgttgttggcacaacagttaggggcaaatgggtaacgagccacaaggaagctgcgccgccagacactaccactttctccgttaagtggcgcccaaagtggagcgcaattagagccccgacatggaggttccactaccacccgggtactcaccaaatgacatgccttcggtctttggtctaggaatgtgtggcatatgtcatgcttaatactcttaggctattgatttggttccctccgactaccaaacgctgcactttttctgagggttcatcggtgagccgaggggacaattgaactcccgcgcaaagtcaacggagttcgagagcgtcccaatcacccggaaacgacctggactgtggatggccgtgttcagcttgttccggatggcctccggtcgcatcgctccgcaccaaacctgaccgaagttcaggaagaacagctgcggccctgtcatgttaagtcctggcaggatctcgtccgacacctcgctgggatgctcctttagccagcgctgatacgcgtggaaggcctgccggaggcctccattgtctgcgatattctcacctgagataaatcgttagaaattattaatacacaatatatgattgtgacttggaatgactaaaccattcacaatgattgtgattaactctacaatcaatcgatcatatttttggaccatattcgtttggtcaacagcaccatatttgaatcaaatcgacttaccctgcgtactctctccattcaggacgattcccacctcctcgacggtatagttgctatattgggcaataatgcagcgggcgcgctcgtcgaacccgcgaatcgaggagtccgtccaccacttatgtatattgccgttgcgatcgaagagcctacccttgtcatcgaaaccgtgggtcagttcgtggccaatgaccacaccgatgccgccgaagttcagcgacttcggaaagtggcggtggtagaagggcggctgcaggatgccggcgggaaacatgatctggttcttgttgcggctataataggcattgacgatggcaggagctgtctgccagttggtcttgttgaccctctcgtggagcttggcctgctccgttttggccgtgtgaagcagaacattcagagtgttctcaaaatacttttccggatagatttctatgcccgcgtacttgctatttaactcactgggattaaggataaagtctggatagccgatcttcagggacatggcgttaaccttttcctcggccaactgctttgtggtgtcgtccagccaatcagtggttttcaggatatcccgaaaggcctgctgcagatcgtgagtcatccgcaaggtgtcccgcttgctgttgttgtcgaaatagcgactcacgaacatggaacccactgccatgcccatgttggtgttcacctgggcgatgcataccttccatctctgcggactctcctcgcggccaaagagggcgtggtagaaactctgtttgatgtcatcgaatcgatcgtccacgttgttgatcctgtgccgcacaaagcgccacatcatgtaattggaaaccgttcggggatccgtttcatctagaagagtcaccagcttgctcatgtactccaccgcgtagatgaccacttcctcggtgcccagaacttcgcgatcttgcagactctgcaggtaagctcgccacttgatttccggaaccaccgcctgcagttggtccagcgtcatgcgcttgtagagctgcgtgaaatatgaagacgtattaaaacgttttagatattctatagaaatatgtttcgaagcaaaatatattaagtactagtaagaataatttaaaagtcttagaagccactcaccttggtgacgttaagtcgttgctccgctggagctgtaatccccgccagctgcgtttcgaacgccaccagctcgctggccacccgctgggcatccgccttggaggcgcccattttgtgcatcacctcggccatgtagcgctggtaggcctgtaggtacttggcgttgctcggctggaggaagtactccctggtgggcaggcccagacccgtctggtcaaactgaacaatgttctcctcggagttcttgatgtccgcccccacccactggacgatgaggatgtcgttgttgtaacgtctaagggtggcggctagcacctgccagttaaagttggactcactccattgggactccaggactggccagccacctagttcccgaatgagcgtgtgcagcggttccaatccccgcttggccagcaccgcgctgttcacgcaggaccggtacagattctttgcttttagctgggcatcttgatggggctttaggaaatcggtgggcacatgtagttgctcttcgttatccgacttgtccttggttttatcctttggcaggacaactggtggagcagcttcctcctctttggttctctcccgtggggtttcgatgaggcgtttccttttcgttccgttggtataccgcttgtagcgcaccagaacgcggttaagcaactgcctcttactgacaatgtgccgacgcaggcgttccgccgtaagttccgccgcctggtcagcttcgccctcaccctcgccctgctcattaagcttaaatagagtattccgcacgggactttttcgtagctccgctgcggagtgcacaggggtatttttctccagaagatttcgtagcaccaggtccagactctcacgcagcatttcgaaggtatcgaagccggccttatccttgggtattggatgcaggcgctcccagttgccgcaggcgtacttgtagaaatccacgcagggatccactttgttatccatgtagcgcttcatggttttggcctgggtcatgcgaatgccctcccgagtgccttcctcgttccagaaactctgcagagcggcggtggcctcgctgatctcggcactggcctcctctgcatgacgttcggcctcgcggcgctcccgtattctgatcttctccagccaatacggagctatgtcctggtagcgcttcttctgcctctggtaggcctcctcatctatgggtttaatgtccagttcaatgccgctgccgaggcactctcgcggaatgcccagtggcaggaaggaggttcgggagtccttcatcagcgtgttgcgctcctccaactccatggactccccgttcccgtagcgatatggttggcagcgacgcgccctctccgcggccaaaatctgcagttgggtccgcttgctcgccggcagtatgaactcctcgttgatcaggtcgttgtaggtactaccctccggtaaaagggcttcgtaatcctccatatagacaggcacctcgctgtgagagttccgcagatccctcatcctctgttcgttcaattgcagcgccgccagcatcccgtccagccgcatgatcaggatgagcaccagggtcagtggcagcattaccactggaagaagtagaagcattttgcagcaggtcagaccgggacaccactgcacacgacctgtccgctgattaacacccagtccgagcttcacgctccgggctttggcgttcatcggcgagccaggagcggtggctggagctccgtgaaccgagggcatcgctagcttcagttggctgtggcgactcatcccacgagcagccgtaattgaggagctcgctggcctgtatactttaattaaacgcaatttttcgcgaaacgcagtttgccgagccgcactggacgtaacccaagccgagaatgccgagctgcagatcggatgccgcaggctagaagctggaagctggagaccgaagactactgcggccgagtcgcgctcgcatcgccaactgaaagcgccgcgcggagatgcgcaatcacggcgcgcgacaaacaattgagcggcgacagcagccaccagcaaccagcgacatcagcagcagcagccgtcgcagcagcagcagcaacatcagtcggcgcagcagcgactatcaactggcaacatgcaatcaatggatctccagccggaggaggagaatcgggggatgctgctgggggtgatcttgatttcaaaaactacttatgccgatctaaggacaggaaatatccggatttccgcaacagataactgcaatgatttgaccccttaacctcaatcgcttcattaattcgcctttatatctcagttaatcaacaggaacgactacaaagcagatcgttcaaatatttgtgtcattatcactggactagcaataacaaacgcgcatctatagcaatttatacacagaaaataaagcaagttgaactttcatatcgatatttgaaatctaagatatttataaaactaaacatgttttcgttgatataaaagatttaaaaaaaagtgcacaaatgatgttaataatatcaaatatcaaataatatatcaaatcatttttatatctctatgtaaatattacatattagctaataaagttgtcatcactatgtggaagaatagtacgagtttcaaaatacacctttaaattttctaatagttcaacgtgagctaatcaactaaagatagtcaacagcttccattagtcaatttaacaaccacctcatattttcttcgtgtgcacagctgccacccaagcacctccgcattgacctctgcccgaagagcgtctaaattcaatcaatttaatttaatttcacaaaataattgaccagtccgccgacggacagctggccacgggtaacgtactcaagtggacgcggtggatcggaactaagctttcgactggcaaagaaccccagatattgtagatactacaaatggtacggatacagatgcgtttaaaggctgtcaacagcgcccataactcggcacttaagcctgaccattcaagtgtaatagagatggcgtcattgggcgccactaactactcgagtcacacgtgtttttggggaatgtaatccccatcggggcgtcatctagtgtgccactatttaaagggaattaaagctctgcgaggcgtaaccgtaagccaaattggcccttcagagtgcggagggttcggcgggttagtattacaagattatgcgggtaattggtggcatgcgatgccatctaatgtgcctaaaacaacacccctccgcccgccggccaccttactttgcatacgtatgtgtatggagtcgtatgcccattttggtcggcggatcgctaggggtgtggaaatccagaaggtatggcttttgttcacgtcatgtatttcagtctcatgaacaccaagcacgcaggtgtatctatgtaagatgagtgcgagtgtgtgcggttgcgggtgctggtgtatctgtatctgtatctgtatctgtgcttatgctgccgggggaaatggcgattgcttcatatgctaattttagccttaaaccttttaattagcgactatgaccgagattagtcgactcgtcgtccattcgtctatctcatatgcagcagaatgccgcagtgcaatctgcaacatgtgtataacaacatgtggcctttcgcaaggaaagggggaggtgggtaaatggaaatggaaatggaaatggaaatggcctgcagcccccactgcaaatgttatgcaatttgccaacgctcggatggattctaatttcaattggcttttgtgttcacttgatctgcggttcaagaccaacccgtcgacgcatgacccactgagccaacatgcgacgctgcggcacacaaacacacattcgattgcggcatcaggtttgcgagaggtaaacgaacgagtcgtgaatcaatcaattgatgaaaataaatatgcccggggatcgagtgtactacgcatatagactacggattgcatttggatgcggtgggggatccgagggggtaatgactattgaactcgggttatcgacaccgccagattaattaactcaactaacttaatcattttagacggcaatccaaaaggggagaacgggctggacgtcattcattttctggctttgttttgaataaatgcactcactggcgtacgcataattttattcaagtgtatttttttgtaactttataattagatattatgctagagaagccaactgtttttttctctttaattagcaatgtaattggtaggtgaactaattaaagcagctattaagttttccaataaagttttactgccatagtgtaaaacatagccataaaattgtaaaacaaattgaaattgtaataaatttaagtgttagactgagaagaaatacaattacataaattaagagcactattctgcaataaatatgataagaactgaccaagtctcggagatccaatcaaaatgttgactatgcattaaggaatatgaaagctttatattacttattcaattatatcacttttccgccttcaccacacttcacaataggtcgaatgcaggtggataaaggttccacctggattgctctttcgttggataaggcggtcaaaaggacttgacttgggagtgtcattaaacaaacaaactcactttatggttgcaccacacttcaatacttcaaaaggcctagatcgctggattcgtttcagtggaggattagggagcactgccgctgcttgcgaagtcgttctaagactgatttcaatttgaatttagaacgtggaactacgtcgctgttaccggcgtgcttggtagtgatccatctgctcgttatcgcctggggcttttaccactgagctgtctgctgttttccaaagggtatactttgatatagactgttgagttgcgattgtaagggtctaattcgtgctcgatcgtcatcaatggaggtgattcacggccattcattcacttgtgcacaggagattggccgacgctaaattttacaatttcaatgacatttttcgcaaaacctactactcatatataatataaagataataatatattatgattttgaagattcgttaacatatgaacaccaataaagggaaaccttactgtaagatacttggatttatgaaacacgattccttttcatcgtagtcagatagataaacatcagatccggatcaagaatatatatacttcaaaaacgcttccttctaccagttatatacatcataacaagtctagcataccttattcacctcttagtctggcaccccttaaacatgcgaaacgatactaatagtatgctttaaatttattaaattgattgactattgcgccactaaaacaaatacaaaaatgtagaacataataaacattttaatttacactttgaatattttttgtctgctaaagttcaaacaaaattctgaatatgattgcaagtgacatgtagatagttaacacacttcaaatccatgttcatacccgtgtcattataaaaatgctaattgaattcagcaaacacaatatgccattgacaactccatctggcaggcgagtagttttattaatttaaagcccgctaaaagaacataaatcacacaatcccacaatcattgatttatccactcacgttgtttgctgtcggctgacaagaatatttcaattacaatttgattggctaagaccacacct

SEQ ID NO: 7880 - DNA, 3154 bp, DROSOPHILA
ctgaaacgaatccagcgatctaggccttttgaagtattgaagtgtggtgcaaccataaatggtaatgctgccactgaccctggtgctcatcctgatcatgcggctggacgggatgctggcggcgctgcaattgaacgaacagaggatgagggatctgcggaactctcacagcgaggtgcctgtctatatggaggattacgaagcccttttaccggagggtagtacctacaacgacctgatcaacgaggagttcatactgccggcgagcaagcggacccaactgcagattttggccgcggagagggcgcgtcgctgccaaccatatcgctacgggaacggggagtccatggagttggaggagcgcaacacgctgatgaaggactcccgaacctccttcctgccactgggcattccgcgagagtgcctcggcagcggcattgaactggacattaaacccatagatgaggaggcctaccagaggcagaagaagcgctaccaggacatagctccgtattggctggagaagatcagaatacgggagcgccgcgaggccgaacgtcatgcagaggaggccagtgccgagatcagcgaggccaccgccgctctgcagagtttctggaacgaggaaggcactcgggagggcattcgcatgacccaggccaaaaccatgaagcgctacatggataacaaagtggatccctgcgtggatttctacaagtacgcctgcggcaactgggagcgcctgcatccaatacccaaggataaggccggcttcgataccttcgaaatgctgcgtgagagtctggacctggtgctacgaaatcttctggagaaaaatacccctgtgcactccgcagcggagctacgaaaaagtcccgtgcggaatactctatttaagcttaatgagcagggcgagggtgagggcgaagctgaccaggcggcggaacttacggcggaacgcctgcgtcggcacattgtcagtaagaggcagttgcttaaccgcgttctggtgcgctacaagcggtataccaacggaacgaaaaggaaacgcctcatcgaaaccccacgggagagaaccaaagaggaggaagctgctccaccagttgtcctgccaaaggataaaaccaaggacaagtcggataacgaagagcaactacatgtgcccaccgatttcctaaagccccatcaagatgcccagctaaaagcaaagaatctgtaccggtcctgcgtgaacagcgcggtgctggccaagcggggattggaaccgctgcacacgctcattcgggaactaggtggctggccagtcctggagtcccaatggagtgagtccaactttaactggcaggtgctagccgccacccttagacgttacaacaacgacatcctcatcgtccagtgggtgggggcggacatcaagaactccgaggagaacattgttcagtttgaccagacgggtctgggcctgcccaccagggagtacttcctccagccgagcaacgccaagtacctacaggcctaccagcgctacatggccgaggtgatgcacaaaatgggcgcctccaaggcggatgcccagcgggtggccagcgagctggtggcgttcgaaacgcagctggcggggattacagctccagcggagcaacgacttaacgtcaccaagctctacaagcgcatgacgctggaccaactgcaggcggtggttccggaaatcaagtggcgagcttacctgcagagtctgcaagatcgcgaagttctgggcaccgaggaagtggtcatctacgcggtggagtacatgagcaagctggtgactcttctagatgaaacggatccccgaacggtttccaattacatgatgtggcgctttgtgcggcacaggatcaacaacgtggacgatcgattcgatgacatcaaacagagtttctaccacgccctctttggccgcgaggagagtccgcagagatggaaggtatgcatcgcccaggtgaacaccaacatgggcatggcagtgggttccatgttcgtgagtcgctatttcgacaacaacagcaagcgggacaccttgcggatgactcacgatctgcagcaggcctttcgggatatcctgaaaaccactgattggctggacgacaccacaaagcagttggccgaggaaaaggttaacgccatgtccctgaagatcggctatccagactttatccttaatcccagtgagttaaatagcaagtacgcgggcatagaaatctatccggaaaagtattttgagaacactctgaatgttctgcttcacacggccaaaacggagcaggccaagctccacgagagggtcaacaagaccaactggcagacagctcctgccatcgtcaatgcctattatagccgcaacaagaaccagatcatgtttcccgccggcatcctgcagccgcccttctaccaccgccactttccgaagtcgctgaacttcggcggcatcggtgtggtcattggccacgaactgacccacggtttcgatgacaagggtaggctcttcgatcgcaacggcaatatacataagtggtggacggactcctcgattcgcgggttcgacgagcgcgcccgctgcattattgcccaatatagcaactataccgtcgaggaggtgggaatcgtcctgaatggagagagtacgcagggtaagtcgatttgattcaaatatggtgctgttgaccaaacgaatatggtccaaaaatatgatcgattgattgtagagttaatcacaatcattgtgaatggtttagtcattccaagtcacaatcatatattgtgtattaataatttctaacgatttatctcaggtgagaatatcgcagacaatggaggcctccggcaggccttccacgcgtatcagcgctggctaaaggagcatcccagcgaggtgtcggacgagatcctgccaggacttaacatgacagggccgcagctgttcttcctgaacttcggtcaggtttggtgcggagcgatgcgaccggaggccatccggaacaagctgaacacggccatccacagtccaggtcgtttccgggtgattgggacgctctcgaactccgttgactttgcgcgggagttcaattgtcccctcggctcaccgatgaaccctcagaaaaagtgcagcgtttgg

SEQ ID NO: 7881 - protein, 677 aa, DROSOPHILA
MTQAKTMKRYMDNKVDPCVDFYKYACGNWERLHPIPKDKAGFDTFEMLRESLDLVLRNLLEKNTPVHSAAELRKSPVRNTLFKLNEQGEGEGEADQAAELTAERLRRHIVSKRQLLNRVLVRYKRYTNGTKRKRLIETPRERTKEEEAAPPVVLPKDKTKDKSDNEEQLHVPTDFLKPHQDAQLKAKNLYRSCVNSAVLAKRGLEPLHTLIRELGGWPVLESQWSESNFNWQVLAATLRRYNNDILIVQWVGADIKNSEENIVQFDQTGLGLPTREYFLQPSNAKYLQAYQRYMAEVMHKMGASKADAQRVASELVAFETQLAGITAPAEQRLNVTKLYKRMTLDQLQAVVPEIKWRAYLQSLQDREVLGTEEVVIYAVEYMSKLVTLLDETDPRTVSNYMMWRFVRHRINNVDDRFDDIKQSFYHALFGREESPQRWKVCIAQVNTNMGMAVGSMFVSRYFDNNSKRDTLRMTHDLQQAFRDILKTTDWLDDTTKQLAEEKVNAMSLKIGYPDFILNPSELNSKYAGIEIYPEKYFENTLNVLLHTAKTEQAKLHERVNKTNWQTAPAIVNAYYSRNKNQIMFPAGILQPPFYHRHFPKSLNFGGIGVVIGHELTHGFDDKGRLFDRNGNIHKWWTDSSIRGFDERARCIIAQYSNYTVEEVGIVLNGESTQGKSI

SEQ ID NO: 7882 - DNA, 3362 bp, DROSOPHILA
atttaaatttaagctcactatatttagtgtgcagctaatttaagcaaaagatgacacaaaaatattacacaattcaccataaaatatttacttgagtgacttgtaagatataaacatataatgtatcttgtttattactggtttctattgatttatcagatcgataaaccggaaaacacttcataatcatcatgcgaaatcataaaactgttgctgctgcgattaaaataacgcttactgaaatcattctatggccgacaattctataaaatggtgcatgcccaaatggaaaacaaatcgcgaaggcaattcggaaatgttgaatgaaattgcctagaaataaacaaatacgaaatcacagcgaaattccataaaagcgaatacgatccgtcatcaacgtttcaggggagaggatcgatcacaaaggggctacggaaagtatctgatgaaaattatacaagaaattttaatttatttgtattttgaaagtgcagaaatactttgagcccacaatgacgtcagtgggcataaagataatatatgagaaggcaaaaagaaatcattttcgatttttggcacatataattacacaaaagtttcttcgttcttcgagaagagaacagctgcaaatttaacaaattatatgcatgaatcgaacggcaattggaaagcggaaggaaacccccataccgaatagtattgggcattttaaacaaacctcgaagaattcataaaatttcaagggaattcggatgagtgcgattctctcataaagtcgatacattattgatccccaaattctagacgatgatagttgtgcaaccacttcatataaatcattaaggtgctctaatcaaatgtattattttcacacaaaaccatttttcgttataaaccactatcttctcaataagtgagcaaatgtttgacattctattgttaattaactgtcttcataaatgataaaatatcacttaaacttcaattaactatatgttttcagttatatcatgtttgtaaatttgtaggaaatttattttagtatcatttatggtacaatattcgattgattggtcagcgaacaatacccaaatgatgaggttttgcttagaaactatttggacatgtacaacaattggattgtacacttctttaaatgttttgattaggatctgatactgaaaactaccaccgaccccgaccaccgccgccgccgccaccgcctcctcgtcctctgttaaaaccgccgccgccgccacctcctccattgcgaccagcacctcctcggaatccgcctccacctcgtccgccgccaccaccgcgaccacctgttgataaacacaagttaggactttggggtgcactcatgaaattcactatcttacctcctccgcggccgccacctcggcctccaaatccaccgccaccgccgcctccacctcggttatttgtgaaggctttcttggcgccttttggttgtggaggtttcggcagaaatctggcgatgggtaacagctttccagggtcgataaacagtttctgatttggcttgaagctgttggcgtagacgttgtccgacagcttgatggacacgctgtagtcccgaactgttccaaagatttcgtcgattttgcctacttgctccttgttttcaaggaaaatgggcgcgttgaagtagggaacatcctgaatatcaactttgcacacaaggtcgttttggcaggagtaaacatagttgcccaaggggatgactctctctggtggacctacaattaaaaaaataagatatattattaaagtgacaaaatggaaatgagtatttggcaatttgcctgaacatagcaagcatttaagacagcgtatacctataggagacttccagatgtgtttttagctaatatatttatatatatagcccatgattatagcctacaacggcttggctattcaaaatttgagagaacaacgtggttattgtaattctattcgcacaatctgtattaactgcttgttttaagtgacgtagttagccttagttcacaggctagcttagtttggatgattagttataggaatagttggcgactttcattcacttaccagtgtcgaaggctccacggccgccaccacgtccacctccacctcgaccgaatccgccgccacctccgcgtcctccgccacctcctcgtccacctccacctccaccaaatcctcgtcctcctccgcctccgcctccaccgaagcctcttccgccgccgccaccgccgccacgaggtttaccaaatcccattttcaaatattattaaaattgaacgcaaaaacacgtgcgcgttccgatcaaccaaaatatttagagacggaagaaattcaaatttcgttatcgacttatcgatagccacggccatgtgtttcagtatatacggttgtatattatacggtcacactaggcacaaggggcggattttttgaaacttctatttcaataaaattatttaaaactatttttaacaatcgacctgattattaatttcttagtctttttttttaaaaacagttatttttttatgcatatgaatagttttaatgaagatcgtttaactaagacaaattcctggtgctttttttataagcattaaatattcactaagagaacataaaacattgagtaagagagaatcatcaaaaacatcatcggatgcattatagatatatatatatatagatatctatagccgaacagctgttgagacatctaccaaaaatatagacaagcaaagtgaaaatgaatatttgaattttctccaactgctgagagcagttggatgccagccgtggacgaggaagcgagaaatagaagctaaatctattcgatcgtgtcgcgacgtcgaaagaagcagatacataaaattctatatgcaaatagataatatagcaaaataatttcaaaaattttcggacaagtgcagactttaaaagtttcagaaagtgcacaatacatacatataatacgaaattgcaatcgaaagtgatataattacccgaggcatattttcatatgtggaatatgaacgcctcgttgggcagttaaaaatagattaatagatggctaaatgacgagcacgagcacaaagatagatcgcgaaagtagcacacgactgcggctggacaagatggagcagccgatggacgccaggcagcagcagcgccatcgaaggcgcctgggtcgcagccaccgggaaccgacgcccgtcactggagacgccctgccccaggacgatgccagtccggatgccctccctgatccatcacctcagatggtgcgcatgcagatcaggccacccggctcgatgtccgcccacgag

SEQ ID NO: 7883 - DNA, 971 bp, DROSOPHILA
ttccgtctctaaatattttggttgatcggaacgcgcacgtgtttttgcgttcaattttaataatatttgaaaatgggatttggtaaacctcgtggcggcggtggcggcggcggaagaggcttcggtggaggcggaggcggaggaggacgaggatttggtggaggtggaggtggacgaggaggtggcggaggacgcggaggtggcggcggattcggtcgaggtggaggtggacgtggtggcggccgtggagccttcgacactggtccaccagagagagtcatccccttgggcaactatgtttactcctgccaaaacgaccttgtgtgcaaagttgatattcaggatgttccctacttcaacgcgcccattttccttgaaaacaaggagcaagtaggcaaaatcgacgaaatctttggaacagttcgggactacagcgtgtccatcaagctgtcggacaacgtctacgccaacagcttcaagccaaatcagaaactgtttatcgaccctggaaagctgttacccatcgccagatttctgccgaaacctccacaaccaaaaggcgccaagaaagccttcacaaataaccgaggtggaggcggcggtggcggtggatttggaggccgaggtggcggccgcggaggaggtggtcgcggtggtggcggcggacgaggtggaggcggattccgaggaggtgctggtcgcaatggaggaggtggcggcggcggcggttttaacagaggacgaggaggcggtggcggcggcggcggtggtcggggtcggtggtagttttcagtatcagatcctaatcaaaacatttaaagaagtgtacaatccaattgttgtacatgtccaaatagtttctaagcaaaacctcatcatttgggtattgttcgctgaccaatcaatcgaatattgtaccataaatgatactaaaataaatttcctacaaatttacaaacatgatataactg

SEQ ID NO: 7884 - protein, 237 aa, DROSOPHILA
MGFGKPRGGGGGGGRGFGGGGGGGGRGFGGGGGGRGGGGGRGGGGGFGRGGGGRGGGRGAFDTGPPERVIPLGNYVYSCQNDLVCKVDIQDVPYFNAPIFLENKEQVGKIDEIFGTVRDYSVSIKLSDNVYANSFKPNQKLFIDPGKLLPIARFLPKPPQPKGAKKAFTNNRGGGGGGGGFGGRGGGRGGGGRGGGGGRGGGGFRGGAGRNGGGGGGGGFNRGRGGGGGGGGGRGRW

SEQ ID NO: 7885 - DNA, 3810 bp, DROSOPHILA
atttgaaaaaaaaaaaaaatgaaaatctcatttctcccagacggggaattgaaccccggtctcccgcgtgacaggcggggatactaaccactatactatcgaggaccttaaaaacttcggacataaaaagccaacaagtgtttccgtatcattgcaatagactcacgtgtatcacttcgcatcagtgccgatctttcggtggttagtagcagctcctcctgcagtttgggccactcgatgaacatgaagtcgccaacgctctggacatggttctccagcaacagcttctccagagcagctggcgtgtgtgcttcctgggtcattggcgtaggagatagctgcttgaattccacagaccatatttctaatgggaaatgcatgccgtttagaaatatgaatggataatgaatttgcacctaccattgtcgctgaaggcgttctgcagttcggcgatgagcaactggccacgactggtctgttgtgtgtagatggccacctgcacagccgttttgatcggaattttactcagactcaaaatttccgtcgagggcaaattgactctgcgattgcaacatttaggtataattggaaaaacgccgccagacatggttgactcacctgtagactgtggtggtgcgccaccacatgggcacgccaattccaatgatgaccacgataaatgctagtgtagccccgatccggaacttatctgtaaagttaaagagaagtgtttgattagttcctgatttatcgcggtcgtaagcgttctttgggttcacactttattacttcgacaaaaaactataatattttgatttgtgttttataaagtttattatgtaaattagtttctgtacaggagaacggtatgaatgttaatagtccttgacgagtaattgtgcgcatgttgtgaaacaggatcacatgctactccttgtagctgcacgaaataacaaaaacaggtcccttttcaaggggcgtgttgcgcgacacgtatttggtgaacttggtggtgccctcgcaccggtatactatgttcagggcgttgtccaccggcgtgatagtaagcagaacggaatcgtcctcttcctcgtcatcgtagtccgatcgccttccgtccgtcggtgcttttgctgttggcatttcggcgtcgggtgcgaggtatgtgatcaccgctgctccttctgccgcgttcaggtagtaaaccaggtccaaagtgttctcctcgctggtcaaaccgtcgcccagcactgtgtagttgccgtgggaccagcgctgcagttccacgctgcatgttggactttcggcatcggtgcctgccaaatccagatcggtgaaatctcgcagcaaatcaaacatggcgtggctacggaacagttgcagtagttccagtatggtgcctctggctgttgtcaaatccagcacttcatagttgtgtgcgtttgcgggtccctgtcttcgccacttcaaggtatccgaatcggccaacagctgcgaccgggccaattcgaatttctctcgcttgaagaactcgtataaacaaatctcggagttttcttcgatccgcttttggatgctccggcgggtggccccctttagatacacgttgtttagaaacaggccaagcggtggcctattaaggccatcaggttgcaggtaattcaggcggggaaaggcgcgcagggagtcggccacgaaggcctcattggtatcgccgtggaaccatccgtttatggtaagacgcgggtagtcgaatgtagtaacctcgcctacttggtggaaggagcgcgagcccaccttgaagaaggcaaactggttgtctttgggggcgatctttcgctgcactggaaactgtggaaagcactgatcgtcgctaccgaagatctctaggcatccgccctgctcatccgtccattcctccgctccttcccaaggcgatagatagtaaatgaaggccacttgtcggtccttaagcagatcgtcgtgcacgagcagatagtcgccgcaggtgtacatgctgcaggaggcggacacatagtccagcttgaggttggtaaccttctccagccagggacgcacttgtttgcgcagcacctgcaggaagttggtcaacagtcggcaagcgggcatgttggagaggtcggcgctctggtagaactcatacaaatccatctgtttgcgcgaccactgcaccttctggatgatctcggcgaccagcgcctggctttggcccttctccagcatgccgggcagaaggcagatttgaaagggatccgagaagacctgagcaccggtttgcgtctccttggtcccttggctcttctcctccgtccaggctgtttggagccacttggtaagttccggttgctgatacgcctcgttcaggagcacttcgttcgtttcaaggatgtcgcccaggcgcaaaagcttcctgtgcggctcgcccacctgatctgcggaatcctcctgctctgcacgaccatctgcaagggcaacatagtgaatgggtttgcattaagcgaggcaaacaggggcataccttaaactttaatttggctattttttacgcacaccagcactcacacacgcgttatcaaaggcaaaggcaaaatcaaaggcaccgatgtgccggcacacctcgctttatcgttttggggcagatttctcactgtttccacttaccttcgtccttgtcttttctcctgggctttactggactggagctcgaggtttccatgatgctgtgagtcaaattttcggttaaaaacgtgaatttttgccagggaaaataaaaaaattggcttgtgcagctagagatggtagctcggaaatatcggttgttctgtgcaagtgttgggtagttagcttattccacgcagtatcaaatacctagctaaagtttagtagctaaaaacttttggcattatattgtaaacaataaagggcgtatataagtaataatatataatataataatatattgaaggcattcagcattagcattcaactcactaatcacactttcattttatactgatcatcactgattgtacgtgagtgtcgtgtgtttcgtcgtcgcctcacgcctccatccctagccaattagtaacgaacaattgctcgatcggctccacgtaaataaagtttagatcacagctttgttgattgcttatcgcggtggcaaatatagttattcgtttatggctgtaaactttcgaaacggacgtggacatagccggtaaattaaaacttgaagataaaacctagctggtgacaaagaaattccaattggagcagtccaatgccgtggaatgaccttggaagaggcggagccaccattcagccctccatattataaacaaaaatactattgtggaatgttcacagctattttgtataaaaaaaatatttggctatcagtctgtgcgtgctagggccaaacagctgattccgcctggctgccacctgatttgttgggggtgtgagtggggctggggctgtggtattctgtatgctcgcgatgatctcattgtgttggaatcggagcaaaagctaaactaaacaacttgacatgtgttcttctgctcctgtgtagctacctagtgttggaggatacggaggagcaatgggcaaggatcagcatttgctggaggcttcgcgagccggcgacatcaagacggtggacaaactgctggagcactcgagcaaacgacatggcccgctgtccaggtgagtcaccagcagcaactgttgttattccaggtagtttactacaggttttcctttacagttttaggcgaagtcccagca

SEQ ID NO: 7886 - DNA, 568 bp, DROSOPHILA
ctgcacaagccaatttttttattttccctggcaaaaattcacgtttttaaccgaaaatttgactcacagcatcatggaaacctcgagctccagtccagtaaagcccaggagaaaagacaaggacgaagataagttccggatcggggctacactagcatttatcgtggtcatcattggaattggcgtgcccatgtggtggcgcaccaccacagtctacagagtcaatttgccctcgacggaaattttgagtctgagtaaaattccgatcaaaacggctgtgcaggtggccatctacacacaacagaccagtcgtggccagttgctcatcgccgaactgcagaacgccttcagcgacaatgaaatatggtctgtggaattcaagcagctatctcctacgccaatgacccaggaagcacacacgccagctgctctggagaagctgttgctggagaaccatgtccagagcgttggcgacttcatgttcatcgagtggcccaaactgcaggaggagctgctactaaccaccgaaagatcggcactgatgcgaagtgatacacgtcctcgatag

SEQ ID NO: 7887 - protein, 164 aa, DROSOPHILA
METSSSSPVKPRRKDKDEDKFRIGATLAFIVVIIGIGVPMWWRTTTVYRVNLPSTEILSLSKIPIKTAVQVAIYTQQTSRGQLLIAELQNAFSDNEIWSVEFKQLSPTPMTQEAHTPAALEKLLLENHVQSVGDFMFIEWPKLQEELLLTTERSALMRSDTRPR

SEQ ID NO: 7888 - DNA, 5028 bp, DROSOPHILA
cagtaggaagcgttttcgtccttgaattctgaatcagaatggaatgggggagttagtcgagttcatcgattaaagctagcttttagtttttctgagatgcacttgtcctactctcgcattgagttcagcatcaactttttgggtatcagaatccacttaattatcttgaaatcggcgagtggacttccaaaacatcccgaatttagagtcggcggcaagctgctggttcagtttggtgtctgtctcccacttcctgttttgaattcagcagccaaagcaatagaggaaccaaatgcccctgaataaatttccaagaatattagcagcaatgcatgacatcgaaagagataaggagaaaaagcagcagcaccagatggacagacaaaaacacaactgacttataaaattatgcacataacacccacatctatatatacattatattatataaacatgagatcgggttgagaaatctgtaaaacttaaatcgaattaaaattttattgtaatgcaaaggcgcagcgaaacggaaaatataatgttgaaaaaacaaaaaaaaaaaaaaaacagaaagcaaatacaaattacctacaattgatagtaattacgcatagagaaaagtaacgaaaacaagaagtgaaaaacaattcgattaaattcggtatgtatttatgttaggcattagcttaagtgtttttattttttttttaataaaccattacaaaaaatcaacattaagaaacgaaaacaagccgacaaattttcattacaacgaaagatttcttctgaatgggtgaaatttgttatatattttgaatatatatatataaatatttcagaagtgacacaagcgatcagttttatataatacatatatgtatatatagtttatttgcaaatgcaatccgtttaaaaaagatagataataaatgtacattgagcttagcgtagacgagcagaagcgatgaggccaacaagaaaggatcagcaagtcgggagctcaattcgagatgagtatatttggctcgatggagtgcaggacgttgaatcctttgtgaaggatacaggtgcgctggacaccgcaggccaccagaaagtgcgagaactgcgaaatagggaatgactttagtttgcaaagaagcttcaattgcgccagtggatgccccacctccacggagtgctgatggatattgctcacgcagacgacgatcttgccgcggagctgcgcctccaattggggcacctgcagggcctccaatcgctgttcacccaactggacggtggcgaacggtatgttgatgctatgcggcacatggacgcgtccgaactcgactacactgcgcaaatcgatgagggccagctccgctggcgaattgtccaacaggaattgcacatccttggcgctgatccgggggcactgctcctgttgcaggtgcttcagctcgacatccgccacgccaatgtcctgggggagagagaaacgatctataacatagaacatgccatggctttgctcgagactcaccaacgcctgtggcggctggaggcgcaacgcgtgctggcgatgagtaatactcttcggtgtggcttcgtacatcttctgtgactccagcacacagccatccatcacgatatcgggcaggtcggagaagagcaggatgcactcgttgaaaccggaggtgagcagcgtgcttctcagctggcgcaatatggcgatgccaatgaacagcggatacgaactatcgcccagcatgagtttatcccacaaatgcaggatcttgtgcagcgggaatacatctgcaagaaaatggagagtgggtattcgatctattcaaactatctatcagtggtgcagacagcaacttacgcgagaacatggttaggaaccacgggatggcaaacaactcgggtataaagctaatgctggccaaatgctgagcgagaagcggctcatggaaggcagtcagctgggagaacttgctcaggtactccttgatcaccgccgaattatccttgagaaagaaccattgcagatactttggaatgaacttgaacaagctgaggaaggccaactctatgggcgggtaaagcgttacaacagagatacctatggaaatccctgctcaccttcattgttaaagttgagatagagaaacggtgccgtcagtgagtccagtccctgccagtagacgtactgcggatgggcggtgacccaggccttgagcagccgcctcagcttgcggtggccatccggcgaggagagcagctcatcgtactgatggcagcgcggtatatccacctcgatctgccgatccgtgctcgtagacgtaaacttgtcgatcttcgcgtaactgccattgggcacaacctccagcagggcggcccaaatgggacccctcagtagcggcggcacatccacggctgcctcgcgctgcagctgctccgccgtatgcggatagccctggagcaggcgcgcaaaaagtcgcacgcgctgaaactgatactcgatgtccttttcgcggatcaccagcggcagttcctgcaattcgcgggcaaagtgggcgggaaaacgcggcgagtggagcaggggaaagtagactgcggccggcaggccactcagtcgctggagcagcgccttcaggcgcagcggcaccacgcgatcgtccatcagctgcgcctggcttcggccgggacaaacgctggcgccgctcaggcgaacgatttgtggcagacccaaaatgggtgcctcactccggatgaggccctcctttttcagctccgcctgcacatctccgccggccagttgccacaggtggtagatctgcgacaagggacatcgcagcagcagcggtaaatgttcggtttctgggctcagtggctgcatcttctgtttcttcaaatccaataggacttcctcgaaaatgggatgttccaagagctcacctggcagtggtctcctcttgggcagtacacttaaacagctctccagcagctgtcgcaggcgctgatccatctgcacatagcgctcgtgacactggtgctctcgcgcaatcttctccaacgccccgttgctcttgccaaaggccaggatctttctaaccacattcgagagcttgagcttcggccacagctcgatctgcaatattagctccaccattaccagggccagcgaccaaacgtcgctcttcacattgccattcagaccgagcagtcgttcgggtgccatgtagcgaatgttgccaatgggaaagggcacataggcaccgcccttggtcatgtgatgcagcccgtagttgaagagcttcacccgctgcccatcgctggagagtagaatgtgcttgggctccacgttgtgggccaccagatggtgtcgactcagcacattgatgccgcacgccacctggtagaagattctcagtatctgggcaatggccagcggtggatgacgcatggcgtagtcctccagtgagagtcccagatactccgaaaccacaatggtgcgctctgaaatgaaggggtttcgcgttagaagtgagtcgtggcagtcgtggaattagtgagtgttatccgtagatgaatctgtaatcttggcacgtgtggaattaatgggagttttgtggggaaacgagatgtaatagtgggtgtttccggattctcgccggattagaccggttgcttggcttcctgggcgctggctacccaccgtgtttgccgcggatcacatccaggtactggcacaggtgctcgtcctgcagctccttcagtttctgggcacgccccaggatcgcaatcgagttgggcgttaggggcaggccgttgctgccgcacacgtcgccgggatgcagtttcgcgaagaaggtgaccgcgcacaggcggcactccctttcgcgctcccgcgtgcccatgatctcgatgcgatttgcaaatcacagcgatttccttggacttcacgccagcatcagcaacaatttaatatttttttttcttttttttttgcgagcggaatgcaaaaacagctgttcacgttgccagacttcggcgagtgcaacgccctcaatttgttggctgatgctagcaaaagcgcacaagtttaagcgaaatatacgtatggtaaattcacaattagggtggtactcatacgccatctataagtctaaagtttatagtttttttttttccataaacagagcaacagttgagagcgcttagccgcgaggcgctgccagaatttacatttgctgtttaactcttattgggaatttgttcgaggtatgatgaaacgtgtttacattaattacgaagtaggcaatgttatatctatctatctatatctactttttgtatatctttacatagttacattacaaattattagaaagctaaaaacgaaacatctggcagctctgcgcaacggcagtagggaagcctcttcgctcggtttgcaacaccaattgctagttatcgcctatcgcttgttttgttgtcgccttgttgttgcttccgtttgttgttgctattggcatagcggttttgtttttattgcgcactcgaaattgttttgttatttgctggcgatacgattcgaaaaacgctcctcagatggtgcaaaatttagtttagtccaatccagacgctcgtcgcgtttaaatgcaagtttgtttgtgtctgtgtcgtaagtaactgttgaatgcaatttggctatttggcaattgcagttgcaactttgcaaactgcaactttgtgaatgagaagcgcgacaagaacgcaaatcaccgaaaaatgtcgctttttgtggaatatacggagccgaagtggcgccacctggatatgcgcgcgctatccgttgacgagttttacctgtacctgcgctcggagttcagcagccagacccatctgtactcactgtccgacgaatgctacacggtaataaattgatggccccatgtaatcacatcgcgcaatcggtttccctttcaattgggtggccatcagtgaattcgattttaattgtattctttgccgttttca

SEQ ID NO: 7889 - DNA, 2646 bp, DROSOPHILA
caacgtgaacagctgtttttgcattccgctcgcaaaaaaaaaagaaaaaaaaatattaaattgttgctgatgctggcgtgaagtccaaggaaatcgctgtgatttgcaaatcgcatcgagatcatgggcacgcgggagcgcgaaagggagtgccgcctgtgcgcggtcaccttcttcgcgaaactgcatcccggcgacgtgtgcggcagcaacggcctgcccctaacgcccaactcgattgcgatcctggggcgtgcccagaaactgaaggagctgcaggacgagcacctgtgccagtacctggatgtgatccgcggcaaacacgagcgcaccattgtggtttcggagtatctgggactctcactggaggactacgccatgcgtcatccaccgctggccattgcccagatactgagaatcttctaccaggtggcgtgcggcatcaatgtgctgagtcgacaccatctggtggcccacaacgtggagcccaagcacattctactctccagcgatgggcagcgggtgaagctcttcaactacgggctgcatcacatgaccaagggcggtgcctatgtgccctttcccattggcaacattcgctacatggcacccgaacgactgctcggtctgaatggcaatgtgaagagcgacgtttggtcgctggccctggtaatggtggagctaatattgcagatcgagctgtggccgaagctcaagctctcgaatgtggttagaaagatcctggcctttggcaagagcaacggggcgttggagaagattgcgcgagagcaccagtgtcacgagcgctatgtgcagatggatcagcgcctgcgacagctgctggagagctgtttaagtgtactgcccaagaggagaccactgccaggtgagctcttggaacatcccattttcgaggaagtcctattggatttgaagaaacagaagatgcagccactgagcccagaaaccgaacatttaccgctgctgctgcgatgtcccttgtcgcagatctaccacctgtggcaactggccggcggagatgtgcaggcggagctgaaaaaggagggcctcatccggagtgaggcacccattttgggtctgccacaaatcgttcgcctgagcggcgccagcgtttgtcccggccgaagccaggcgcagctgatggacgatcgcgtggtgccgctgcgcctgaaggcgctgctccagcgactgagtggcctgccggccgcagtctactttcccctgctccactcgccgcgttttcccgcccactttgcccgcgaattgcaggaactgccgctggtgatccgcgaaaaggacatcgagtatcagtttcagcgcgtgcgactttttgcgcgcctgctccagggctatccgcatacggcggagcagctgcagcgcgaggcagccgtggatgtgccgccgctactgaggggtcccatttgggccgccctgctggaggttgtgcccaatggcagttacgcgaagatcgacaagtttacgtctacgagcacggatcggcagatcgaggtggatataccgcgctgccatcagtacgatgagctgctctcctcgccggatggccaccgcaagctgaggcggctgctcaaggcctgggtcaccgcccatccgcagtacgtctactggcagggactggactcactgacggcaccgtttctctatctcaactttaacaatgaagagttggccttcctcagcttgttcaagttcattccaaagtatctgcaatggttctttctcaaggataattcggcggtgatcaaggagtacctgagcaagttctcccagctgactgccttccatgagccgcttctcgctcagcatttggccagcattagctttatacccgagttgtttgccatcccgtggttcctaaccatgttctcgcatgtattcccgctgcacaagatcctgcatttgtgggataaactcatgctgggcgatagttcgtatccgctgttcattggcatcgccatattgcgccagctgagaagcacgctgctcacctccggtttcaacgagtgcatcctgctcttctccgacctgcccgatatcgtgatggatggctgtgtgctggagtcacagaagatgtacgaagccacaccgaagagtattactcatcgccagcacgcgttgcgcctccagccgccacaggcgttggacattggcgtggcggatgtcgagctgaagcacctgcaacaggagcagtgcccccggatcagcgccaaggatgtgcaattcctgttggacaattcgccagcggagctggccctcatcgatttgcgcagtgtagtcgagttcggacgcgtccatgtgccgcatagcatcaacataccgttcgccaccgtccagttgggtgaacagcgattggaggccctgcaggtgccccaattggaggcgcagctccgcggcaagatcgtcgtctgcgtgagcaatatccatcagcactccgtggaggtggggcatccactggcgcaattgaagcttctttgcaaactaaagtcattccctatttcgcagttctcgcactttctggtggcctgcggtgtccagcgcacctgtatccttcacaaaggattcaacgtcctgcactccatcgagccaaatatactcatctcgaattga

SEQ ID NO: 7890 - protein, 840 aa, DROSOPHILA
MGTRERERECRLCAVTFFAKLHPGDVCGSNGLPLTPNSIAILGRAQKLKELQDEHLCQYLDVIRGKHERTIVVSEYLGLSLEDYAMRHPPLAIAQILRIFYQVACGINVLSRHHLVAHNVEPKHILLSSDGQRVKLFNYGLHHMTKGGAYVPFPIGNIRYMAPERLLGLNGNVKSDVWSLALVMVELILQIELWPKLKLSNVVRKILAFGKSNGALEKIAREHQCHERYVQMDQRLRQLLESCLSVLPKRRPLPGELLEHPIFEEVLLDLKKQKMQPLSPETEHLPLLLRCPLSQIYHLWQLAGGDVQAELKKEGLIRSEAPILGLPQIVRLSGASVCPGRSQAQLMDDRVVPLRLKALLQRLSGLPAAVYFPLLHSPRFPAHFARELQELPLVIREKDIEYQFQRVRLFARLLQGYPHTAEQLQREAAVDVPPLLRGPIWAALLEVVPNGSYAKIDKFTSTSTDRQIEVDIPRCHQYDELLSSPDGHRKLRRLLKAWVTAHPQYVYWQGLDSLTAPFLYLNFNNEELAFLSLFKFIPKYLQWFFLKDNSAVIKEYLSKFSQLTAFHEPLLAQHLASISFIPELFAIPWFLTMFSHVFPLHKILHLWDKLMLGDSSYPLFIGIAILRQLRSTLLTSGFNECILLFSDLPDIVMDGCVLESQKMYEATPKSITHRQHALRLQPPQALDIGVADVELKHLQQEQCPRISAKDVQFLLDNSPAELALIDLRSVVEFGRVHVPHSINIPFATVQLGEQRLEALQVPQLEAQLRGKIVVCVSNIHQHSVEVGHPLAQLKLLCKLKSFPISQFSHFLVACGVQRTCILHKGFNVLHSIEPNILISN

SEQ ID NO: 7891 - DNA, 2880 bp, DROSOPHILA
gacgagccccattatgaggcaatctggcggtgataactttcgctttcggcgcaagacaagcccgcccatagaaaactatagaaaatccacttaatgctccgggagcaccttctacttgacattgcctgacttgcaaattgagctgttcttctacgcttctttttcaattcaggggtcaaactccaacttcaacaggtgcttaattaatcccatttttgatatgcatgtttagcctagtttattgcgaccacgtagacagacacgcccacttttaaagccttcttaagaccacatccacttaccatatttactatcgatggaggcgaggtcaaagtacttgtatgttgtgccggcctgggagaaagttttctcgaactgggcgaagggattggcgcctgcgacgatacgaatgtgttatataagccacaggattcgggggacagggtatatggtagtcgagggaactgcaaagctccggactggcaacccacctgacatcttattggaactctttactgaacttattccggacgagcaaagcaagaaactgattggagaagcagttcggataggagctggccagccttcgctgtctatcgatagccagcgatagttgcgtatatcgccagtcggatcgacagtgcattttatacattatatatggtgcattatattttataaaacgatagctttatgttcacttctctttttctaaaatgagattatagtgttctgcgcttggtatgttattatcatatgtattaaatgcagtaataactattcggatatttatgtaatacaccatcttttgaaaagcctgaaatttgtgcaattatcagtaaactaaatcgacgaaaataattgaaagttgtataacatatggttcatttttaaaatgaaaactccacccgccaaacctatcagtaatcgacagagctcgtgcaatcgcaacatcatattgcaccgatatgtcgagggaaaattgaaatcgttatcgaaaatacgaggcgatagcacgcgcacgttgttttctttgaatattaggaaaatataatatgaatttaccagcgaaaatggacgtggaaaaggataagcttcgccagatgcactgcgaattcaatcccttgtcgcgttgcgacggatccgtgatgtacagccagggtatagccgtgttttcaactctagtacatggccagaaccggctaacatggtcttgccaatttcaggtgctacaggtctcataggcgcagttctcggccccatcgaggtgaagacccaaaacctgagcatagatggcagctacttggagtgtaactaccgaccaaaagcgggcctgccgcaggttaccgatcggattcgggaggcggccattcgggatgtgctggaactggccctcctgtcggaggctcatccgcgctccaagatgtccgtgcagatccaggagctggaagatcgtggcagtgtatgtttttgaatctccttcatctgtaatccttctaacaatatatatattctatcagattgatgcctgcgccgtaaattgcgcctgcctagccatgctcatcggaggcctgcctttaaagtatagctttgcggctgtccacgccatcatcaacgagcagggcgagtatgtgctagatccggaccaaagtgaaaccctccaccagcgcgccagttttacattcgcctttgattctgtagaaggaaaccttttgttgatccagacaaagggctctttcaaaatagcccagttcaatgatattgagtgcctatgcctggctgccagtgccgagatctttcagttctatcgcaaccaggttgcaaagtatcatggcaggagtgaggcgacggctaagaaggaggacgtcaatgagacgtgatgttaaaacaactgaaactacgattaaagctcattttattgtattaactgtctgctgtgaaagtcggttatgttgctcagctcgaggggcgtgcccttcagcacctgtgagttggattcctcaatgcggacggccaaaaagtcacctactccaaacgattttctggctgtggaatctccagatatgggtacatatatagaaggaactatgaccttgatattggcatcattccgaccgaaccagtgagcatcggacctcttgcttttcccttctataagtatgagctgctcctggccttccattttacgatgtagctgtgtagctccctctcggaaaacctggaccatgcgctgcagtcgctcattcttcacgtttatgggcacatcatctttgtagcgccgatgggcagtggtcttttctcgcatgctgtaggcgaacaagtaggccacgttgtactgcacttgttggataagagatacagtgtcttggaactcctcttccgtttcaccgcaaaagccgcagataaaatcgctggacagccccacgttgggcaaaaactgtctgatgtgctgcacaagttccagataagcctctctgctgtaaccacgtcgcatcctttccagaacttgggtattgcccgattgtgctggcaggtgaagttgcttgcacacattcgggtgatctctgatgacctccagaacttcgtcggagaaatccttcggatgcggcgaggtgaaacggatgcgcatgtctggaacagcttgagccacggatcggagcaatgctgcaaagggagtcccgcctgttttgggcttgtaaacagtgctaaaaccgggcactggagttgctttcagtgagtcctgttcctcctgcgcagttctgtctctgtacgagttgacattctgacccagcagggtgacctccttcacgccctgttccgccaatgccttgacctcagccacaatggatgccagggggcgagagcgctcgcgtccacggg

SEQ ID NO: 7892 - DNA, 757 bp, DROSOPHILA
atacgaggcgatagcacgcgcacgttgttttctttgaatattaggaaaatataatatgaatttaccagcgaaaatggacgtggaaaaggataagcttcgccagatgcactgcgaattcaatcccttgtcgcgttgcgacggatccgtgatgtacagccagggtgctacaggtctcataggcgcagttctcggccccatcgaggtgaagacccaaaacctgagcatagatggcagctacttggagtgtaactaccgaccaaaagcgggcctgccgcaggttaccgatcggattcgggaggcggccattcgggatgtgctggaactggccctcctgtcggaggctcatccgcgctccaagatgtccgtgcagatccaggagctggaagatcgtggcagtattgatgcctgcgccgtaaattgcgcctgcctagccatgctcatcggaggcctgcctttaaagtatagctttgcggctgtccacgccatcatcaacgagcagggcgagtatgtgctagatccggaccaaagtgaaaccctccaccagcgcgccagttttacattcgcctttgattctgtagaaggaaaccttttgttgatccagacaaagggctctttcaaaatagcccagttcaatgatattgagtgcctatgcctggctgccagtgccgagatctttcagttctatcgcaaccaggttgcaaagtatcatggcaggagtgaggcgacggctaagaaggaggacgtcaatgagacgtga

SEQ ID NO: 7893 - protein, 227 aa, DROSOPHILA
MDVEKDKLRQMHCEFNPLSRCDGSVMYSQGATGLIGAVLGPIEVKTQNLSIDGSYLECNYRPKAGLPQVTDRIREAAIRDVLELALLSEAHPRSKMSVQIQELEDRGSIDACAVNCACLAMLIGGLPLKYSFAAVHAIINEQGEYVLDPDQSETLHQRASFTFAFDSVEGNLLLIQTKGSFKIAQFNDIECLCLAASAEIFQFYRNQVAKYHGRSEATAKKEDVNET

SEQ ID NO: 7894 - DNA, 4766 bp, DROSOPHILA
tcctatcgtttgtgtgccatccgcaggcgaacagctgttttttcgggaatcgtaacttcagaggaacttttttttagtggaaacaagcctgcaatgtcggcgtttgtgaaaaccgtgtgcttggcccaaaagctgtgcgccgccaatcccgtcgtggctcgccaggcgatccgcagcagtaagtgtgaatcggggctgcgctggcaacagtgcaacctgccccactgttttgtttacgtaacttttgcatgcaccgaatggctacaaattcgaatttctcgccatttacgttttagtggctggctggaataaggactacaagccgggtccgtatccacagacggagaaggagcgcctggcggcggccaagaagtactatctgttgccggaggagtacaaaccgtatgcggacgatggtctgggctacggagattatcccaaattgggctacggtctgggtgtggaggccaaggactcgtactatccctgggactatccggagcacaagcgcaaccaacacgagcccgtaagcgccaacatcaacggctagcagcagctgctgcataaaaaaagagtcaaaccctgatccatttccattgcagatctcggcggatcatgatctgtacagcgaggatcgctggtcgcaggccgaaccgccacgctacagcaatgcgtactactttgcctgcttcctgggcgtgatgtccggctgcctggcactctactactggctggatgacaagaagatgtaccgccccgtggccgccaagcaatatcccagccctggcgtcaagcactacaccttcgagaagtaggattgtatctatcacgctctcgatcgcactgcgcgcctcgtttttatttcataggcaattaatcaacgcatctatacaattaaaatgaatggaaaccaagctaaaacatggatttgctatcattttgactgcgcatgttgggttgcatttttcattccgttcttaatgagcagcaaaaaacgaaatgaatcttgagatgaacgtttatttcggcgaaaacatgaatgatttggaacgtaactgaaccaagaaatccttaatggatttcaataatgtctctaaactataaacttactgcctaaatacattgtttgtttgggtgagcaaaaaaaagcaagacgcggaaacagaaacttaaccagctagatttagggcatagtaataaactgttgatcggctgggatcactccacaacgtagttgggatgcaccaccagcaggggatcgtcctcctccacgaaatccttttgtacctgaattctcggcttcagcgtggatgtcttgagcggaataatgacctgatcgtgatagatgaggcgatcgataagcttctcgatgagatttttgcgagaaattaactcatcctcggattcgatttggtccgccacctgctccagataccaggtgaccacattgctgcgcttgatgcccgtatcgttgccctccacctcgcagcgcgcctcctcggcgcgcatatgcaacaccagcatggtggacagattcttgtaatcctcgaacgaaagcgtgaacttcttcttctgcacggcgccgctggcggatgtgtccataccattgttctcatccacattggccgctgctccattgttctccatgtcgatgtcgtgctgaatgccatcgtccatgtccagaccctcgtcgtcatctaaatgaatatccggttgctccacgcgaatgatggacttgttgagcaaacggaaggcctccttgacgtgtcgctccagcacgcgattcgagcactccagcttggccatggcctcgctcagtcgaatcatggactccagctgacgcaccgttatcctccaggtgctcctgcccgacgtgcccgtatcgcgctgcctcaaatggccatagttctcgaccagcatgtgtccggcctcctggctaataaccggcttaaattgccgcgcaaatgtcacatagcgaaggacctcttcgcgcgtatatgcccgctccacggactcctcgatgttcgagtgcagatcaacgatcttgcgagcaatggcatagtccaccacctcattgcattcgtccacgagaatgaagaacagatcgaatcgcgacataatcggtgccgatagctgaatattttgttgcaaactcttggagcgatcgtagcgaccattaatgggattggcggcggccagaatcgaagtgcgcgcattgagtgtggctcgtacgccggcgcgtgcaatcgatatggtctgctgttccatggcctcgtgaatggccacctgatcgcgctgatccatcttatcgaactcgtcaatgcagcaaatgccattgtcggccaacatgagggcgcccgcctcgatgacaaagtcaaaggactcctcgtcgcgcacaaccgcagcggttaagcccgctgccgaggatgccttgcccgaggtgtagatcgcacgcggcgagaagtcggatacctgcttgaggaactgtgacttggccgtgctgggatcgccaacgatgcacacattgatgtcgccacgaagcgatgtcttttcggtggtggtcttcgcaacgccaccgaattgctgcagaagaatgccccgcttgacctcatcgttgccgtagatcgagggaaagaggctgctaattagattctggtagagattgcgatccttggacatctcatagatcttgtgccactcggcatctgtcatctgcttcttcatatcctcggctgtcacctccgacatgggcagatcggtgccgccaaaacgtgctgtcgttgcctgaacactgcaggcaaggaaggccatccgatagttgagctctcgcatgcccagtgcctttaggccagtgacgccatccatgccctcgccgggcttgtggcgtgaactgttctccgcccgtgtgcccactccggccaggacactcacatcgggcaccacaatcagagtgcccgtgaaatcatagcgatcgccagcctgaacggtctccaccagctccgagcgcaggataatctccaccgcgcggggaatacagccacgcggcagctcggcttgcgtctcctggatgcgaatcttttgaaagtccaagaacagactcttctccacatccagcatgaaacgcttgcgattggagcacacgggattgcggcaaatggtgggattggtgaacttgaactgctgctctacgttccgaatttccgtctggcaatcgaggcacatgaagacgccggaaacaagctccggatgtacgggatgggtgcgcaccacctggccggagatgcggatgagggtgccgattttggaggtggtcagatcgcgaaccttgtgacgcgtcggcacctccgtgaaggccacatagcaatccttctgggtcttcagtccaatccggtccttaacgtagttcgaaacggattggcaaaggaacggatagatgtggtagtactcctcgataatggcggtggccagattctgatcgtatttctccacatcctcgaagctgacctccagggtgcagcgatccggggattccaagctggcggctgggcgcgtgtacttgatctcgccatcctccttgaattcctcgaggaaatcctgaaacaacttctgggcccgaatgcccacctcgtcttttacgcgcagctggccaacctgagcatctgccacatccattttgggtcacttcttgcttcaaactggtgaattgcgcgctaaattccgagattgctttcgtttcttgcgaatgtttacagctgcgtgctttgctcggttttggcgcctttttctgacagttgcttgggggtggcaacgctcgtgcgcagggatgccagctattcaagagcaaaggtaaacatgtcttacggtcacattaatttattagttcaaatatatataaaaatatatatttttttaattgctgaaagcttacttaaatttcttgcccttgctaatcaacaagtagttttcgaattttttgaatagatcaaatagtccaaaagttgattgagatacgttgttttaataacttaatcggataacttaataatccaagagatgaatgacatgaattataagaataattttatacgagtaaagtattaaaacattcaacttaagttgtttattttatgaacttatagaatttagtacgtttttaagaccgatagttcgcccactcatgtcgcggaacgctgtgcaccgataggcttattccgaaataatcgataccacgcgaatttcgtgaaataattttattgattctattttggctaattttttggctaaacagcaggagcacagcgttgcacgtgtgttcacctgttcgccggcaccgttgtggccatagaagtcggtgtggtaccattggattcatttgattcactgggaccaccgcccccttcggagttttgtccccacaaattgcgaaggagccccggaaaatggtggacgccgccaggcagatgctcgacgagctgatgggcaggaatcgcaacctgcatccctcggaggcgggcgccaaggtcaattgggaggatccggaggtgagtacgctcaggatgtggcgcgccaaagagccacctccaaaataatgggggtttttttttttgtccgcagttctgtcagttctacaacgttaagttctgtccgcacgatctattcataaatacgcgcgcagatctgggcccctgtgcccgcatccacgacgaggaagcccgacatctctacgaggatgctcgaccctcgcagcggaagcgtcagtacgagga

SEQ ID NO: 7895 - DNA, 2766 bp, DROSOPHILA
agcaaagcacgcagctgtaaacattcgcaagaaacgaaagcaatctcggaatttagcgcgcaattcaccagtttgaagcaagaagtgacccaaaatggatgtggcagatgctcaggttggccagctgcgcgtaaaagacgaggtgggcattcgggcccagaagttgtttcaggatttcctcgaggaattcaaggaggatggcgagatcaagtacacgcgcccagccgccagcttggaatccccggatcgctgcaccctggaggtcagcttcgaggatgtggagaaatacgatcagaatctggccaccgccattatcgaggagtactaccacatctatccgttcctttgccaatccgtttcgaactacgttaaggaccggattggactgaagacccagaaggattgctatgtggccttcacggaggtgccgacgcgtcacaaggttcgcgatctgaccacctccaaaatcggcaccctcatccgcatctccggccaggtggtgcgcacccatcccgtacatccggagcttgtttccggcgtcttcatgtgcctcgattgccagacggaaattcggaacgtagagcagcagttcaagttcaccaatcccaccatttgccgcaatcccgtgtgctccaatcgcaagcgtttcatgctggatgtggagaagagtctgttcttggactttcaaaagattcgcatccaggagacgcaagccgagctgccgcgtggctgtattccccgcgcggtggagattatcctgcgctcggagctggtggagaccgttcaggctggcgatcgctatgatttcacgggcactctgattgtggtgcccgatgtgagtgtcctggccggagtgggcacacgggcggagaacagttcacgccacaagcccggcgagggcatggatggcgtcactggcctaaaggcactgggcatgcgagagctcaactatcggatggccttccttgcctgcagtgttcaggcaacgacagcacgttttggcggcaccgatctgcccatgtcggaggtgacagccgaggatatgaagaagcagatgacagatgccgagtggcacaagatctatgagatgtccaaggatcgcaatctctaccagaatctaattagcagcctctttccctcgatctacggcaacgatgaggtcaagcggggcattcttctgcagcaattcggtggcgttgcgaagaccaccaccgaaaagacatcgcttcgtggcgacatcaatgtgtgcatcgttggcgatcccagcacggccaagtcacagttcctcaagcaggtatccgacttctcgccgcgtgcgatctacacctcgggcaaggcatcctcggcagcgggcttaaccgctgcggttgtgcgcgacgaggagtcctttgactttgtcatcgaggcgggcgccctcatgttggccgacaatggcatttgctgcattgacgagttcgataagatggatcagcgcgatcaggtggccattcacgaggccatggaacagcagaccatatcgattgcacgcgccggcgtacgagccacactcaatgcgcgcacttcgattctggccgccgccaatcccattaatggtcgctacgatcgctccaagagtttgcaacaaaatattcagctatcggcaccgattatgtcgcgattcgatctgttcttcattctcgtggacgaatgcaatgaggtggtggactatgccattgctcgcaagatcgttgatctgcactcgaacatcgaggagtccgtggagcgggcatatacgcgcgaagaggtccttcgctatgtgacatttgcgcggcaatttaagccggttattagccaggaggccggacacatgctggtcgagaactatggccatttgaggcagcgcgatacgggcacgtcgggcaggagcacctggaggataacggtgcgtcagctggagtccatgattcgactgagcgaggccatggccaagctggagtgctcgaatcgcgtgctggagcgacacgtcaaggaggccttccgtttgctcaacaagtccatcattcgcgtggagcaaccggatattcatttagatgacgacgagggtctggacatggacgatggcattcagcacgacatcgacatggagaacaatggagcagcggccaatgtggatgagaacaatggtatggacacatccgccagcggcgccgtgcagaagaagaagttcacgctttcgttcgaggattacaagaatctgtccaccatgctggtgttgcatatgcgcgccgaggaggcgcgctgcgaggtggagggcaacgatacgggcatcaagcgcagcaatgtggtcacctggtatctggagcaggtggcggaccaaatcgaatccgaggatgagttaatttctcgcaaaaatctcatcgagaagcttatcgatcgcctcatctatcacgatcaggtcattattccgctcaagacatccacgctgaagccgagaattcaggtacaaaaggatttcgtggaggaggacgatcccctgctggtggtgcatcccaactacgttgtggagtgatcccagccgatcaacagtttattactatgccctaaatctagctggttaagtttctgtttccgcgtcttgcttttttttgctcacccaaacaaacaatgtatttaggcagtaagtttatagtttagagacattattgaaatccattaaggatttcttggttcagttacgttccaaatcattcatgttttcgccgaaataaacgttcatctcaagattca

SEQ ID NO: 7896 - protein, 817 aa, DROSOPHILA
MDVADAQVGQLRVKDEVGIRAQKLFQDFLEEFKEDGEIKYTRPAASLESPDRCTLEVSFEDVEKYDQNLATAIIEEYYHIYPFLCQSVSNYVKDRIGLKTQKDCYVAFTEVPTRHKVRDLTTSKIGTLIRISGQVVRTHPVHPELVSGVFMCLDCQTEIRNVEQQFKFTNPTICRNPVCSNRKRFMLDVEKSLFLDFQKIRIQETQAELPRGCIPRAVEIILRSELVETVQAGDRYDFTGTLIVVPDVSVLAGVGTRAENSSRHKPGEGMDGVTGLKALGMRELNYRMAFLACSVQATTARFGGTDLPMSEVTAEDMKKQMTDAEWHKIYEMSKDRNLYQNLISSLFPSIYGNDEVKRGILLQQFGGVAKTTTEKTSLRGDINVCIVGDPSTAKSQFLKQVSDFSPRAIYTSGKASSAAGLTAAVVRDEESFDFVIEAGALMLADNGICCIDEFDKMDQRDQVAIHEAMEQQTISIARAGVRATLNARTSILAAANPINGRYDRSKSLQQNIQLSAPIMSRFDLFFILVDECNEVVDYAIARKIVDLHSNIEESVERAYTREEVLRYVTFARQFKPVISQEAGHMLVENYGHLRQRDTGTSGRSTWRITVRQLESMIRLSEAMAKLECSNRVLERHVKEAFRLLNKSIIRVEQPDIHLDDDEGLDMDDGIQHDIDMENNGAAANVDENNGMDTSASGAVQKKKFTLSFEDYKNLSTMLVLHMRAEEARCEVEGNDTGIKRSNVVTWYLEQVADQIESEDELISRKNLIEKLIDRLIYHDQVIIPLKTSTLKPRIQVQKDFVEEDDPLLVVHPNYVVE

SEQ ID NO: 7897 - DNA, 14392 bp, DROSOPHILA
aatcaagggaaactatataatccagtcctataaaaatttgtattcacaagactttggacacgtactcccttccatgcgcggtaaatccaaagccgtaggtcaagattggtaaatcgatggcaaaatcgatcggattttcaaagtttataggggtcggtcgtaaccgttacttcaacttgtttagttccattgttgttacttaacaaagatatttatataagactaattattttatttattaatgactttaatgaactattaacacttgtgcttacacagcattttttgtctaaaatagattggtttgttctatacgaacccattttcaagacttgtcacaagcatttgttcaagttaagtgttattaagtgtccaaagttcgtttgtttgtttctaaacgaaatgaacttaagacatttaactacgtgtttgcacgtttgtttgtgtccgaagtataattttctaaccgttgatcgaaatgaaatttgcattaatccaggtcaatgagatgaccttaccttccatccgattctattaaaaagaccacataatttgtatataatttattaaataattgaacatttctatgtatttgatacaaaacgtcatcagtacagatatgcagttaggatatacaaagatatagatgcaatatgtgtagatacaaatgcttatctaaaaatatgtaagaccttttcttcatacaaaaacattgtatttaataatttaaccggaatgtgccataagaatacctaaacgtgtaattgcaaaaatttatacaaatacaaatactaaaaacaaaagttgcaagttggtttggtataatcgatagctgaacaagaccaaaattggaatgaattctctgggaagggaatgcaattggaataaagggaggtgggtattaagtatgatttaaatctataaagtactaggcttttataagttattgcaattgtaatttataattattataaatattttgcgttatgtgtaggttttactagttggctcgaatggttcgatttttgttcatattggtcaacatcaacgagatatatgaagtcagcagatcgtccatcttgtagcccagcgacgtttcacataacaatttcgagcccctaaccagatttccgatggtcatgtggaaatatgtattgcccgatgaccaattcgagatgcgtgtaaatggatgcgtaaccaaaatgtcctgaagttttaaaatgtatcatgttcttggtttatattgtaatagatttatatagtttatagttctcaccttggtcactggatgtatgagactcacgccgtgtttgttaatggctatcaatagcatttcgggataattcggttcggtggtttgcttcacctcaaagaaagcggagccaaaagttggccatctgttcaaatatattagaaaggtagttaaaaaaaaagtctataaatatgattacgttgagatacccacctatatacaatcttcaagaaggccaccttcgcgtcttcggaagtcatgcccccatcctggttataagatgcaacaatcgatcgtttccattcgctagtgctctgtattttcataatatccgatggaataagttccctcagcatttgtctgaaaagtagtttttcgttatttatgttgttctcgatcttaattgaatgatctgtacttacggtatggcctgcagttcttgtttattttcaccaaagcgcacacggaagactagagcggccagcttagccgcctcctccctggaacacttgtgatagccacgcaacagcttgggcaactcctgatgatagtggaatataagatcggcattccgatccttgcctggcactgtgttcgtccacagtttcttcatgaagaagacctggtaagtgaactgcggattcgctccatctcgtatgggacgcgcttttttaatccagtcggtcaaatggcgtacgaaatcgaagaagaaatcaccttcgggaacagagatgaccttatccgcgatctttacaaacagggagaagccctcgctggtgcgcagcgaaaggcgctgcgagatgttgttgcagaaatccttcgctcgagtggagctgtccacttcgaaggcctcgtctgtgtcgtccgggaagtagaccttgtggaagatctgtgtggttttatgctgtatggcttccacctccacctgatgcggcggatatttgcgttgtccatggcgtatagttttctgtagtcgatgcattgagtcctgtgatgtgaattaacaatagaataaagaaaaactaaaaatctaaacagtaaggtcacctgtgaaatgggatgacgcctggtgcgcaggaataatagcaattccttgagcaaaccctgtgaacaggcaaacagtcccgtggccaaccacatcagctcccagcccctctcctcggacattcggttgcgattgtccgttagctgcttcatcagttggcagtagatctcgtcgcgcagaatttcgtgcttcagaggtccatcaaatatgtgatcggttatttcgttgcccatccgcggacgcttggagggcagatcgcccatatatttcagtatggcggcaaacgcgaagcaggcctcctcggcaaactcttccttgctttgcaacttgcgcagcagcggtgccttaatgggatcccgggagtagcgccacaattcctcactccgttttgaactcagagtgagtgttttcgacattgttcgtttcggtggcaaacggaagtgatccagggcatactccatcagcgtatgaggtcgatcccttggttccacagctccaccattggaagccatgcttagacgtcgtccatgatgcgcctcctcgatgttgaacagggccaaaatatcctgcggcggtttgctaagggtgggcagcacgtacacggtttcggcggggaagtctcctcgctcctgggaacgatcgcagcgtcctatgcaccagccgttgttcagtactgattctccacaggattcgtcctctagtatgatcagatctcccttaaagaaagacagaaaacttgttccatccgaaggcgcacgatagtcctgcaaggctatgacatatttcgatctaaaagcaaatgtaaatattattaattaatgttcctactggatatgcaggggttccttaccgtttcttcaggccatctaagaagtagacaaccagatcacggatatcctccgcattggggctctggaaggtgaactcctcgcctcgaacagtggaaaggctgaaagtctgggtgaagaccttgttggtcttctgactggacacggcagtaatctcggggaagctcagttccaacagcacctgctcctgatcatcaaccacatacacgccggtccagttcaccgcaatgatgacatcgtttttgggcagattcggaccggagtttcgatacgcttcgtagaaacgagaaaagagcagaggccacttgtacttggcgtagctaactatatcctccttaattttcaagggtgcgatcttgtccttgacatagtacgattttttataggcctgcagaaccaaagcagcccaacgttcaatggccttgtccactccgctgagacaaaagtcgggtataaagttgggcagaagggtaaacagccgctccattgacatatcggttgagtattcgatgaaatattgctgcgcagctatcatggccaagtcttcctccttgtcgcagcgatattcgccaaacttaacgcctctcaccacctgctggtaaataagattggtggccacctgatcgtgtgtgggttcgtgccaaggtgcaaagatttccttgcggaaaaacagacgccacggggcattccgctcctgggcgccctgctcctttgcatactgctcacattgtgagatggcgtccatcacgtggtccccgccacttcccaaagaactaactttgtcgaacagagctatgtacagggaaaaaccaaactgatctttgagacttatcttgtcggacagttgattgcatagttctcgggccgtggtggcggaatcagccaacagagtctttgtatttccatccataaaggtaatgggcagcatgatgggctttttggatttggtggcctgcaactccagccacgaaggcggttgattgcgagttccattgttgaaagtacgcttcagtcgctcctcgcagtacggtgcatatccaggtggaccctcacggataaaggccctcaagtagttaacaaacttttccgacggagcaaaacatccgacgcacagggataacagaatccaacctctggcatgtgatgatttcaatggattgttcgtcagctgcttgcatatctggcagtatatttcgtcacgcagctcggcacgcaggataccatggccaatgataaaatgcagcttttcaaggttggaggttggacgggattgtagccacgattggtagctatccgccgtgtattcatcatcttgcagtcggcgacgcacatcctcgcccaatttgttctttcgcttcaacgtcagggatacgagtttgtggcggatcgatcgtggcttttgcttaaggaatgcatctggatccaggcccataagctgagcctcttggaactcctgaaagaataaatgttaagcgaaccacttaagtattgctttaagttttaactcaccttactcctgatgaaattgcgccccaaggtggcagtgaccttggacatgaccgaagtggtgtccatacgatccattgtgtgatacttcggctccggcatatcacctgtaaacctcagtatggttatccacaatgcctgtgcagcaagttgatcgccttgcgtatggagcggaagtaggggatgcttcaaagctttcttagcatactgatgattgacatttccttggaagtaggtggcagcgaatttctggaacttgaattccgatagatcctcctcatcctcggatatgtgtatgggtgcaatgatatcgtcctggttgacgttttgcgcgtgaggcagatcgttgaacacggacgtttcacgtccaccatgcggagtaggggcatcgctactggaatcgggaaggaagtcaaacatggcctccaccagtttgccatcgtccaccggctcctcctgtttgcgagctgcatcattgataatattcatattgacctccactcgacgacgattctccaattgctcctgaatttcccgacgctccagctcgtgcaatcgatctcggtaatgctgctcggcaatttctcgggcatgcttattgccacgatgcagcagttcctgctcctccagtttgcgcagctgaagaacttcggcaaactgtttgtgctccaatcgaagttttcggtagcgccgcatggcaatcatacgccgcacatgagactggatcttaatgacggcccacatcttgtgaccatactctctcctcaccaaatatcctcgggcatgggcttgcaacccgacaatgtggcccctcagatggcggaaacgatgtgacagaactctcgaacggatcaacgcttgcaaacgcatgtagcccactcgcatgttcctgtatcgtttacgttgagcatagcccttccagaatcgctgcacagtgatagcagcagctctcaggcgtagaaaccttcgtcggtacacccaaccacgaatgctgcgctgcagaatgaggatttttcgcgtcagcacgcgatccctctcctgctccagaaacagatcgtgggcgtccttgagaaagaccttggtgtggcccagctgatagtcggacttgcccaaaaccacggcacaaatcctcgaagtcgccgcctggcaatccgtgcgatgagctggtggaactcccggtatcaggaagcgataacgctcgacgaactctctgaatccatgtcgaatgggatatccagcgcgacggattcggatcgtttccatcatgccggaatatcgcagctgacggcaacacaagccgcggtcaaacatcattggcttcttcagctcgttgggtttgatacaacgaataaagaatggctggcaactgctgagcgtcttcataagcgcatcgagagattttcgaaactgtgtggagagtgtgggtgttcgctttcgcgtctctgcacccatctctatgtcctgagcaaagatttgtcggaggaacttgttcgtactttggctaaccaaatgcaatagatcgggactgaaggtgtcccggtttttatctagaaatcctcgtgtgtcgtagaacaccacaccggcaaagtgattcagtccaaagctggtgttgatatccgacttgggcttcaaatagttcttgtgcgatccatgggttttgtgcaatttggccagcatcgtctgatccgtgcccttgggaaaccgggcctcctcatcgattaaagccataatattgagctgcttaatagctatcaagtcgagcgcatcctgattgtctacgaactcaatgtgttgccagttgatggcctcgtggttatactcttcctgctcaagtttaaatatatgctgcacgaagaactgctgcagattctcattggcatagttgatgcaaaactgctcaaagctattctgatcgaagttctcaaaaccaaagatgtcgagaactccgatggcatttcgggatgtgccgcgcggcttgaaaattgccgtattgatctttcgaacgatgtgcacaaacatacgtccgtatatgcctttcacaaaggcatcgcgcacatccacggattgatcgcgcgacagagttgacaccacggtttctccatgagcaaaaagtgttcgacgtgttagagcatcaattagcggctgaatgggaagtccaagtaacccggccacacgctccacatttatgtgttccggtatttcggtagcatccagattatccaccacagtcgccttatatttgatgttgccgcagtggagaagggcagcaaggagtttaattatctcccagatttcctgatcggagaagagcaaaaccttcatggcagatcgaatgtcagagaattcggcggcgtcatcgcgtccctcgcaggttatgctattaccaccagtcagatatctataaattagtaaattaaatcaaaatcaattattgtttccattagttgaaggcatttactcacttgtaatcagcagccatgccaagatcgagacgactcttctcatctgccgacagtccggccaaaatgcagtaaaagacatgataatttcgttcgctatgattttgggaaacaattcgcgacttctccagcaggtactgttctattttggctccctcgatcacgccattggcgctaaagtgtatatctatgtatttgccaaaactgcaaagaaattcatttgattattaaccgatcatgtggtgaagattctatggattcattatttaccgcgatgaattatcatttcgaatggttttggcatttccgaaagcttccaaaatgggattcgcttcaaggatttgctgttcgatccatgagtgtttgccactaatcgcagccagatactgcaggatcaactttgtgctctccgtctttccagctccagactctccggaaataacgatacactgatcctggcgatatcgtttcatatgcgcatacgcattgtcgccaattgcaaagatatgcggcggtagctcaccgattttccgctccttatagagcttgatctgatcacctgtgtagatgggcagaatctggtagggattaacggcaacaagtatggagcccgtgtaagtctgaaattataaaagttataagcgttcaatatcatatatatcatataacatatttaagtttatagaaagataacggctgccgccgaattgattactttattctttcaatttcttataattggagcacgataagaaattgaaaatcacttaatattaaataggtaaagatgacgcaacataattgaatgttaacgagctaatttccttatgtttaccttcaatgtttttaagaaacatgtttccttctagtgattaactttaaattggtataggggcaatccattaaagtgcctttcttttgaattctatgtattataaagatcaacttacgtatatcagattctccttgtagcggatgagcagattccgcaagatgccagcctcgtgcagatcacccagggatatcatgtcctccacaccctgaacggaggacgcgtgcatggccttgatgcggcgctcgggtgccagccacacctcgtcgccatcgtcatcgcgcacctggatgcgacgaccctcggcggagacgacacgtgctccaatggccacatcgaattctcgcccagatgcgggctctatccagatgtagtcaccctgtcgattagaggcgcaattacaaatttccgatttttaaccattttacgattttacaatttgacattcagttctttacgaggcagccgcattcggttgccatggacatgggtgccataaagactatgggctgtttgttgtaagagtcacttgagcggaacgcaacaaatatagtaataccagggacagaaatgggcagtgcacagtgatgggcggaattggatgaatatgcaaaggttttacgtaaaaaccttatagagaaggtctagaacaaggaagttattataacactaatagctagccaattatcatagaacaatttaagtcagttagaatgttatttaatgaaataagattgtagatctgaatgcgtataagattagttagattagttaaaaaactaaactatgcaaaaataaagtactttgataagactgcaatgaaaatatatatatatttgaaaaataccatcaacctgttgctttgccccattcaaatattcccagccaccactgttcgtagagcaatggtagttgaagtgagccatggcgtggaacttccgcttttttgcttctgttagctggtgctcatggggcggggaaaggtgagatagatggagtggctcgataagaggagtgatacctccactgcgggggctaatggtgagtgaaatacttacacgtgttacgatcaccatgttcgtcgtccttcatttactgatcctgtgttggcatccagggacaatggcccgttccttttcgctgctgccgcttgggttatattcttctctgccgaaagagagaacaagtggaagagttggccatgagcaacaataacaaaatacgagttagcgcctgcggcaacaaaaaccggcttcgaatagtagaaaaaattaaggtgaagtttacggtaaattgaaagaattcacaacttgtcgctgtcttcgtttgtggtccgtcgtcttctttttgttgttcttgctatcaaatcgctttcctagctcgaggtaaacgtctttctttcctcgatttggccaacacactccagccaacagccagcaaaagtggcaactcattaacaacacaaaatcaacagcgaattagtcatcaggcttaaatgcattcataaaactcatactttcgatacttcttttcttcttaaactaagggaaaacagcccgatccaaacgaattgatacgtgaccgaaaatcctataaaaaaagtaaataaacctttacacctttagacatgcaaaaaaggccatccaactattttcactttttgagcttcggtcgcttcaaacaatcagttttggccacaagaaccaaccgaaaaagagggtctaaccgaaatcgaaggtctcaatgagctgcgtttgttatgcaaattgcttggttttcattgaaaaaatttactttcattactttgtacggcctggcagtagctaaacaatgttttcgatttaaggcgatagaaaactaaaccatcttcaattagatatttacgaaaagaaattagaaatgtgttgcgccactgacaggttatcgttggtgaaaattccacctttaaatatgatctttagaactaaagaaaataaacattgcaattatagtaaccagttttagcaccggattacaagtgagcaaatgagcgctgattacagagtccgattacaaccataattctttagtttaatcatttaatctagagaattccggaaaaactcatctaatcaacatgtagatcggcttttttaagcgaactacttaatttccgaaaccagtcatgaatcagagtttcaagctggcgtcatttcccagtcggttgccatcgaagccgcctttcaattggacaccccatccatcatttagcacatggactaacggctgcctccgcacaggtatagtatagtgtggcatggtatcagccgtagtgtagttactcattgggaggcgtctctcctctccacggtaattgcaacatgccagacaaaaaaaaaaataaagcagcaacagctacggagcaaccaaatttagtggcacacggcggcacgtatactcgtacacataccagtctggttacgctctgccggtcaaaatacgagtctagtgcacatagggaacccatctatccgcgatccacactcgaaccacaaccatatagcgacctcaattgtcggctggagttcaaacatttaactaagacatacatacatgtattaagtaatattgctcaatactcgttgtcctgttatcagcacccaatttaatagtttaatgccctcattgtcatctaaatcccctctttccgcaagtacttaactgtagaacgcggaaaaggtttcatttattgggaactctatttgtatcttaaggattgctttttaggtaaacgtatctatattcgtattttaatctttttttggtactcaatccacaactgttttcaaattgaagagagcacttagactaagcacagtcatgactgaattatttaaaaacgattgcctaattgccgtacctgctgttatcagaatttccctgcagtgcaagtagcgataagaagcgaaacatcaaacaaggtgtaaatcgaggtgtgaggcagacatttgtatctctgggcatgaccaaaaacgattaaaaaacttatagaatcgagcaaagagcgtctaagaatttccggctctgcagatttagcatcgaatggtagtgatagtggactcagtgacgaacgattggcacgtatctaagtgcatatatatggtaaccatatgtatgtatatgtactgcatgtatatatgtctataagtaagagagtgcgtttttagtgagtgatccaaaagttcatcgagagtcattagtgaaagttcgtgtgtggcagccacgtacaattacggtttatgccatctactctacactacatacagacactcggccatatattatctataaacatatgtacatataaaagtatgtatggcgttcataccaattgtttaatacaaccactttttgttcactttgactttgacacttgacatcatgttgttgtcatctttgagcaatttgtggcataaaaacatttcctatctgaaaaattcatattcgtcttattttacaaaaaatgcaataataatcctataaggtttcactttacttatacgttaattggagcactttagttaaacccatattgttttattggtcacttgaattatagctctcaagataatatggctaataataaatccgtagtaaagtctatggaatgcgaacgattcttaaatttaagagcaaatgcactttttcaattcatttgaacatttataatattacttattttacaaaaatattgattatatgttgcctttagaccttttcaaatttaaattataaagtgtttgttattaatgtgaacttgtaaatgatttaaatttaaaaaacaccgttagttgtagaatttttttttaactttttccataattactagcattgctaacaaaattctttttcgcaaaacttcgtttgttgttcacacaatttgcttctggtttaacaactgaaatcttctacaaaatttaacgactcaccagcgacaacaacaaaaataaaaaatgggcaaagtattatgttcattttttttttattatgtatttagagaagaccttaaaaaagtttcaccaaacaaacagaaagtcgctgcgtgcgcgaaagcccccagcaacaacaaaaacaaaaacagcccaacaacccaaatggaaacgcaaaaaaaaggttgagatgggagagaagaaacaaaaaccggctaatgaaaagcgtttatttgaaaaagggttttccaattgtccacacacgaaatgtcccgttgtgcaacagcaaaaacaacaaaccggacaaacaagtgtgcctgcgtttttgttgttattgtcaatttcagaactcttgaccgctgaactgcaagaaaaagcagacgcttcatgatcgatttgtatttatgcaaatttatgtaaatgggatatacaaatatttaacttgaatgtttgaaatttataaacaattaatgatagtacactctgattagattagatttacacagtaaaagtatttcatatatgtatatttttcataatcataatgatagattataaaaaaaaacgttttcaactgattaataaaacacacttagtcactgttttaaggtttacgcacgtaattccataaaagactattcaaatcattttaaattgacatcgtttatttctcagtgtggaagcctggttcaagctcaaggagaatgagagggagagagcgcactgtcgagagcgggtgggaaaggtacgtggcagagggggagacggtagcagcacccttgaatgtgttgcactgtgagccgctctttacgcatctctccctctcgctcgctctgcagctcctcggcaggtgtacctgtccgtgtgtgcgtgcgagagagcggggctgcgcttgtagtgtgcatgttagtaccgttctagccaacgaaacctgaagcgtagctatttaatttggtcactcgcctaaagcaataaaaatgcaatgcagccacgtctccgtctggaaatgcaataaaatcgatgatgttacactgaaccgatgctgtgacccttgtcattttccccactggcttttctagccacaaacagacacacatttacacagaccgcttggcagggttaatgcactcttttcttttagtttcgtttcatttcttttcttttttccaatcactctctaccttaattgccgcctcagaattttgcactctccgcttttcggtcaccgaattcgaattctaattggaatcgctctcgccacgaccgtttaattaacacttttccagacccgtcgaaagcgggatgttctttttcaaaaacaggttacataaataggtcacgcaccagcagtcgcaggaatagagcagcgcgccgaaagtccgcttttccagcacagttaagccgagcaacaggtggattacagaccactgatcattttggggctgtgcgatttgtttattgtttttcttttcgccgagaagacaagacttgaagcgaaaaataacaaccgataaactgatcaataagagtgaccaggtggtggggccagttgcgaatggcctaaaaaatgcgcggattactaatcgtggtatgctaacgagttaacattacagttcatttgaaaaccgcttatatggtcacattgccgcgtaagcagtccgatcgatagacttccgatagcatcgataaaaataagcattacttacccaaatttatcgacctgcctaatttcggcgcgcatttcaaaatatctgtcataagctattgcatttttcaagaaatatcttttttctatgtcaatatattaaacatgtcgtcatattagctcattgaagcggtttgttgattacctaattatttatacgaactgcgataagtagtaattaaaatctaattatgccccatcagtaattatatttttggaaaccagtactccaccatcgcgtagagtggtcattacatccagactatttgccctgatgaagtacctcttgtggatcagcttacttttcattggagaatcccatggatacgtgcgcctcacgaacctcaagtgcgaaagctatgacaaatcattcgtcgtctttcccgaatgccgactaaaagtgcttggcaggggaattatcggagccaacatacacgttaagcttctgaaactgccaataaataggatggtcgtgagattcatcacttaccggaagctaaacggataccatccgtttctatttaatgtttccgaggaacactgtcgcgtcctaaggtatccaaatcgtctcagagtcttctactatttctacaccgcctttatgcccttttccaatattaatcatacatgtccctataatgtaagtatttagtttcgccaatatgacaatcatattaaatcatattaaaatatatattttaaggatgatatttacataaggaactgcaccttggatgatcgtatgtttgccaaggtcccattaccaaagggtagcta

SEQ ID NO: 7898 - DNA, 6733 bp, DROSOPHILA
tcttctcggcgaaaagaaaaacaataaacaaatcgcacagccccaaaatgatcagtggtctgtaatccacctgttgctcggcttaactgtgctggaaaagcggactttcggcgcgctgctctattcctgcgactgctgagaagaatataacccaagcggcagcagcgaaaaggaacgggccattgtccctggatgccaacacaggatcagtaaatgaaggacgacgaacatggtgatcgtaacacgtggtgactacatctggatagagcccgcatctgggcgagaattcgatgtggccattggagcacgtgtcgtctccgccgagggtcgtcgcatccaggtgcgcgatgacgatggcgacgaggtgtggctggcacccgagcgccgcatcaaggccatgcacgcgtcctccgttcagggtgtggaggacatgatatccctgggtgatctgcacgaggctggcatcttgcggaatctgctcatccgctacaaggagaatctgatatacacttacacgggctccatacttgttgccgttaatccctaccagattctgcccatctacacaggtgatcagatcaagctctataaggagcggaaaatcggtgagctaccgccgcatatctttgcaattggcgacaatgcgtatgcgcatatgaaacgatatcgccaggatcagtgtatcgttatttccggagagtctggagctggaaagacggagagcacaaagttgatcctgcagtatctggctgcgattagtggcaaacactcatggatcgaacagcaaatccttgaagcgaatcccattttggaagctttcggaaatgccaaaaccattcgaaatgataattcatcgcgttttggcaaatacatagatatacactttagcgccaatggcgtgatcgagggagccaaaatagaacagtacctgctggagaagtcgcgaattgtttcccaaaatcatagcgaacgaaattatcatgtcttttactgcattttggccggactgtcggcagatgagaagagtcgtctcgatcttggcatggctgctgattacaaatatctgactggtggtaatagcataacctgcgagggacgcgatgacgccgccgaattctctgacattcgatctgccatgaaggttttgctcttctccgatcaggaaatctgggagataattaaactccttgctgcccttctccactgcggcaacatcaaatataaggcgactgtggtggataatctggatgctaccgaaataccggaacacataaatgtggagcgtgtggccgggttacttggacttcccattcagccgctaattgatgctctaacacgtcgaacactttttgctcatggagaaaccgtggtgtcaactctgtcgcgcgatcaatccgtggatgtgcgcgatgcctttgtgaaaggcatatacggacgtatgtttgtgcacatcgttcgaaagatcaatacggcaattttcaagccgcgcggcacatcccgaaatgccatcggagttctcgacatctttggttttgagaacttcgatcagaatagctttgagcagttttgcatcaactatgccaatgagaatctgcagcagttcttcgtgcagcatatatttaaacttgagcaggaagagtataaccacgaggccatcaactggcaacacattgagttcgtagacaatcaggatgcgctcgacttgatagctattaagcagctcaatattatggctttaatcgatgaggaggcccggtttcccaagggcacggatcagacgatgctggccaaattgcacaaaacccatggatcgcacaagaactatttgaagcccaagtcggatatcaacaccagctttggactgaatcactttgccggtgtggtgttctacgacacacgaggatttctagataaaaaccgggacaccttcagtcccgatctattgcatttggttagccaaagtacgaacaagttcctccgacaaatctttgctcaggacatagagatgggtgcagagacgcgaaagcgaacacccacactctccacacagtttcgaaaatctctcgatgcgcttatgaagacgctcagcagttgccagccattctttattcgttgtatcaaacccaacgagctgaagaagccaatgatgtttgaccgcggcttgtgttgccgtcagctgcgatattccggcatgatggaaacgatccgaatccgtcgcgctggatatcccattcgacatggattcagagagttcgtcgagcgttatcgcttcctgataccgggagttccaccagctcatcgcacggattgccaggcggcgacttcgaggatttgtgccgtggttttgggcaagtccgactatcagctgggccacaccaaggtctttctcaaggacgcccacgatctgtttctggagcaggagagggatcgcgtgctgacgcgaaaaatcctcattctgcagcgcagcattcgtggttgggtgtaccgacgaaggtttctacgcctgagagctgctgctatcactgtgcagcgattctggaagggctatgctcaacgtaaacgatacaggaacatgcgagtgggctacatgcgtttgcaagcgttgatccgttcgagagttctgtcacatcgtttccgccatctgaggggccacattgtcgggttgcaagcccatgcccgaggatatttggtgaggagagagtatggtcacaagatgtgggccgtcattaagatccagtctcatgtgcggcgtatgattgccatgcggcgctaccgaaaacttcgattggagcacaaacagtttgccgaagttcttcagctgcgcaaactggaggagcaggaactgctgcatcgtggcaataagcatgcccgagaaattgccgagcagcattaccgagatcgattgcacgagctggagcgtcgggaaattcaggagcaattggagaatcgtcgtcgagtggaggtcaatatgaatattatcaatgatgcagctcgcaaacaggaggagccggtggacgatggcaaactggtggaggccatgtttgacttccttcccgattccagtagcgatgcccctactccgcatggtggacgtgaaacgtccgtgttcaacgatctgcctcacgcgcaaaacgtcaaccaggacgatatcattgcacccatacacatatccgaggatgaggaggatctatcggaattcaagttccagaaattcgctgccacctacttccaaggaaatgtcaatcatcagtatgctaagaaagctttgaagcatcccctacttccgctccatacgcaaggcgatcaacttgctgcacaggcattgtggataaccatactgaggtttacaggtgatatgccggagccgaagtatcacacaatggatcgtatggacaccacttcggtcatgtccaaggtcactgccaccttggggcgcaatttcatcaggagtaaggagttccaagaggctcagcttatgggcctggatccagatgcattccttaagcaaaagccacgatcgatccgccacaaactcgtatccctgacgttgaagcgaaagaacaaattgggcgaggatgtgcgtcgccgactgcaagatgatgaatacacggcggatagctaccaatcgtggctacaatcccgtccaacctccaaccttgaaaagctgcattttatcattggccatggtatcctgcgtgccgagctgcgtgacgaaatatactgccagatatgcaagcagctgacgaacaatccattgaaatcatcacatgccagaggttggattctgttatccctgtgcgtcggatgttttgctccgtcggaaaagtttgttaactacttgagggcctttatccgtgagggtccacctggatatgcaccgtactgcgaggagcgactgaagcgtactttcaacaatggaactcgcaatcaaccgccttcgtggctggagttgcaggccaccaaatccaaaaagcccatcatgctgcccattacctttatggatggaaatacaaagactctgttggctgattccgccaccacggcccgagaactatgcaatcaactgtccgacaagataagtctcaaagatcagtttggtttttccctgtacatagctctgttcgacaaagttagttctttgggaagtggcggggaccacgtgatggacgccatctcacaatgtgagcagtatgcaaaggagcagggcgcccaggagcggaatgccccgtggcgtctgtttttccgcaaggaaatctttgcaccttggcacgaacccacacacgatcaggtggccaccaatcttatttaccagcaggtggtgagaggcgttaagtttggcgaatatcgctgcgacaaggaggaagacttggccatgatagctgcgcagcaatatttcatcgaatactcaaccgatatgtcaatggagcggctgtttacccttctgcccaactttatacccgacttttgtctcagcggagtggacaaggccattgaacgttgggctgctttggttctgcaggcctataaaaaatcgtactatgtcaaggacaagatcgcacccttgaaaattaaggaggatatagttagctacgccaagtacaagtggcctctgctcttttctcgtttctacgaagcgtatcgaaactccggtccgaatctgcccaaaaacgatgtcatcattgcggtgaactggaccggcgtgtatgtggttgatgatcaggagcaggtgctgttggaactgagcttccccgagattactgccgtgtccagtcagaagaccaacaaggtcttcacccagactttcagcctttccactgttcgaggcgaggagttcaccttccagagccccaatgcggaggatatccgtgatctggttgtctacttcttagatggcctgaagaaacgatcgaaatatgtcatagccttgcaggactatcgtgcgccttcggatggaacaagttttctgtctttctttaagggagatctgatcatactagaggacgaatcctgtggagaatcagtactgaacaacggctggtgcataggacgctgcgatcgttcccaggagcgaggagacttccccgccgaaaccgtgtacgtgctgcccacccttagcaaaccgccgcaggatattttggccctgttcaacatcgaggaggcgcatcatggacgacgtctaagcatggcttccaatggtggagctgtggaaccaagggatcgacctcatacgctgatggagtatgccctggatcacttccgtttgccaccgaaacgaacaatgtcgaaaacactcactctgagttcaaaacggagtgaggaattgtggcgctactcccgggatcccattaaggcaccgctgctgcgcaagttgcaaagcaaggaagagtttgccgaggaggcctgcttcgcgtttgccgccatactgaaatatatgggcgatctgccctccaagcgtccgcggatgggcaacgaaataaccgatcacatatttgatggacctctgaagcacgaaattctgcgcgacgagatctactgccaactgatgaagcagctaacggacaatcgcaaccgaatgtccgaggagaggggctgggagctgatgtggttggccacgggactgtttgcctgttcacagggtttgctcaaggaattgctattattcctgcgcaccaggcgtcatcccatttcacaggactcaatgcatcgactacagaaaactatacgccatggacaacgcaaatatccgccgcatcaggtggaggtggaagccatacagcataaaaccacacagatcttccacaaggtctacttcccggacgacacagacgaggccttcgaagtggacagctccactcgagcgaaggatttctgcaacaacatctcgcagcgcctttcgctgcgcaccagcgagggcttctccctgtttgtaaagatcgcggataaggtcatctctgttcccgaaggtgatttcttcttcgatttcgtacgccatttgaccgactggattaaaaaagcgcgtcccatacgagatggagcgaatccgcagttcacttaccaggtcttcttcatgaagaaactgtggacgaacacagtgccaggcaaggatcggaatgccgatcttatattccactatcatcaggagttgcccaagctgttgcgtggctatcacaagtgttccagggaggaggcggctaagctggccgctctagtcttccgtgtgcgctttggtgaaaataaacaagaactgcaggccataccacaaatgctgagggaacttattccatcggatattatgaaaatacagagcactagcgaatggaaacgatcgattgttgcatcttataaccaggatgggggcatgacttccgaagacgcgaaggtggccttcttgaagattgtatatagatggccaacttttggctccgctttctttgaggtgaagcaaaccaccgaaccgaattatcccgaaatgctattgatagccattaacaaacacggcgtgagtctcatacatccagtgaccaaggacattttggttacgcatccatttacacgcatctcgaattggtcatcgggcaatacatatttccacatgaccatcggaaatctggttaggggctcgaaattgttatgtgaaacgtcgctgggctacaagatggacgatctgctgacttcatatatctcgttgatgttgaccaatatgaacaaaaatcgaaccattcgagccaactag

SEQ ID NO: 7899 - protein, 2167 aa, DROSOPHILA
MVIVTRGDYIWIEPASGREFDVAIGARVVSAEGRRIQVRDDDGDEVWLAPERRIKAMHASSVQGVEDMISLGDLHEAGILRNLLIRYKENLIYTYTGSILVAVNPYQILPIYTGDQIKLYKERKIGELPPHIFAIGDNAYAHMKRYRQDQCIVISGESGAGKTESTKLILQYLAAISGKHSWIEQQILEANPILEAFGNAKTIRNDNSSRFGKYIDIHFSANGVIEGAKIEQYLLEKSRIVSQNHSERNYHVFYCILAGLSADEKSRLDLGMAADYKYLTGGNSITCEGRDDAAEFSDIRSAMKVLLFSDQEIWEIIKLLAALLHCGNIKYKATVVDNLDATEIPEHINVERVAGLLGLPIQPLIDALTRRTLFAHGETVVSTLSRDQSVDVRDAFVKGIYGRMFVHIVRKINTAIFKPRGTSRNAIGVLDIFGFENFDQNSFEQFCINYANENLQQFFVQHIFKLEQEEYNHEAINWQHIEFVDNQDALDLIAIKQLNIMALIDEEARFPKGTDQTMLAKLHKTHGSHKNYLKPKSDINTSFGLNHFAGVVFYDTRGFLDKNRDTFSPDLLHLVSQSTNKFLRQIFAQDIEMGAETRKRTPTLSTQFRKSLDALMKTLSSCQPFFIRCIKPNELKKPMMFDRGLCCRQLRYSGMMETIRIRRAGYPIRHGFREFVERYRFLIPGVPPAHRTDCQAATSRICAVVLGKSDYQLGHTKVFLKDAHDLFLEQERDRVLTRKILILQRSIRGWVYRRRFLRLRAAAITVQRFWKGYAQRKRYRNMRVGYMRLQALIRSRVLSHRFRHLRGHIVGLQAHARGYLVRREYGHKMWAVIKIQSHVRRMIAMRRYRKLRLEHKQFAEVLQLRKLEEQELLHRGNKHAREIAEQHYRDRLHELERREIQEQLENRRRVEVNMNIINDAARKQEEPVDDGKLVEAMFDFLPDSSSDAPTPHGGRETSVFNDLPHAQNVNQDDIIAPIHISEDEEDLSEFKFQKFAATYFQGNVNHQYAKKALKHPLLPLHTQGDQLAAQALWITILRFTGDMPEPKYHTMDRMDTTSVMSKVTATLGRNFIRSKEFQEAQLMGLDPDAFLKQKPRSIRHKLVSLTLKRKNKLGEDVRRRLQDDEYTADSYQSWLQSRPTSNLEKLHFIIGHGILRAELRDEIYCQICKQLTNNPLKSSHARGWILLSLCVGCFAPSEKFVNYLRAFIREGPPGYAPYCEERLKRTFNNGTRNQPPSWLELQATKSKKPIMLPITFMDGNTKTLLADSATTARELCNQLSDKISLKDQFGFSLYIALFDKVSSLGSGGDHVMDAISQCEQYAKEQGAQERNAPWRLFFRKEIFAPWHEPTHDQVATNLIYQQVVRGVKFGEYRCDKEEDLAMIAAQQYFIEYSTDMSMERLFTLLPNFIPDFCLSGVDKAIERWAALVLQAYKKSYYVKDKIAPLKIKEDIVSYAKYKWPLLFSRFYEAYRNSGPNLPKNDVIIAVNWTGVYVVDDQEQVLLELSFPEITAVSSQKTNKVFTQTFSLSTVRGEEFTFQSPNAEDIRDLVVYFLDGLKKRSKYVIALQDYRAPSDGTSFLSFFKGDLIILEDESCGESVLNNGWCIGRCDRSQERGDFPAETVYVLPTLSKPPQDILALFNIEEAHHGRRLSMASNGGAVEPRDRPHTLMEYALDHFRLPPKRTMSKTLTLSSKRSEELWRYSRDPIKAPLLRKLQSKEEFAEEACFAFAAILKYMGDLPSKRPRMGNEITDHIFDGPLKHEILRDEIYCQLMKQLTDNRNRMSEERGWELMWLATGLFACSQGLLKELLLFLRTRRHPISQDSMHRLQKTIRHGQRKYPPHQVEVEAIQHKTTQIFHKVYFPDDTDEAFEVDSSTRAKDFCNNISQRLSLRTSEGFSLFVKIADKVISVPEGDFFFDFVRHLTDWIKKARPIRDGANPQFTYQVFFMKKLWTNTVPGKDRNADLIFHYHQELPKLLRGYHKCSREEAAKLAALVFRVRFGENKQELQAIPQMLRELIPSDIMKIQSTSEWKRSIVASYNQDGGMTSEDAKVAFLKIVYRWPTFGSAFFEVKQTTEPNYPEMLLIAINKHGVSLIHPVTKDILVTHPFTRISNWSSGNTYFHMTIGNLVRGSKLLCETSLGYKMDDLLTSYISLMLTNMNKNRTIRAN

SEQ ID NO: 7900 - DNA, 4060 bp, DROSOPHILA
cgatcacgtattattttactttattagctagtttaaggttttgcagttcaaactttggcgcccaagcagcagtgagttcaatgagagcatcagtgctgcccatgcgcgcgctgactcttggcagcacttgcgcgccaaattttgaaaatagagtttataatttatagatttgcgtttatgatttagttacttttagcaacgacactttcccgtcttttctatctctcacttattgtttcccactctttggacacaacacaaacacaatccgttgccagctcctcctgctccgccccaagcgatggaggaggaggaggagtctacacaaagttggcaccagtttcatcctctcctctgtccacctgttaccaccacctcagttaccgaagtcgattatttatttaactttatttagtacgtattgagttgcgagtactgtaccagagttacgaattacgattgctgtaatgtagatctaagtaaacacaaattctaccgacaaacaaaaaccaattcactcactttctatctatatgtcctgtattgccttatccaatcgatttgataaagaggcccgcccgtaaatgcagcagatgcactgcatctgtggcatttgccttttttgctgttggccgcaagtagatttcattttgcacaacatttgttttatgcgaacctgatttgagtgaattgttgattgatttcgatttcaattacgaattgatttattgatttatgcaaatattacattcaaacacatcttttatgaaccaaaccaaatatgtattttcaaaatatatataaacaaaagacaatgtggtcacaactattagttcgtcctccatcctgcacacgaacgccaacaccaacggagtggacacattggccgccacacagcaacaacaacaacaacagcagcagcagcagcagcaacaacagcaacagcactaccactatatcaccaccaccggcgaggatggacaaaccccgaccaccatagtgttcgagaactacaacggcggaatgccagcggtcagttctgccgcaccaacgcccgttcccgtgtcgcaggccaacgcacccgcgaccacgaccaccactgccctggtcaacacggacggcacgatcatcgagttcgacgggagcacgtacgaggagtatcatgtcctcaaaagcgagcccggcagcagcgattgcctgagcaacggcagcagtgccgtggccgccgacataatcaagtacgatccccagcacggtgtcgtcggcgacgaggaggacgacgatgagaacggcatgctgcatgtgaagtacgaggagcagagcctcgaacacgatccggaaaacgagcacgatgccgagcaggagcatgagtacgaggagtaccaggtgatcaaggccgaggtggaggccgaggcggcggagctggcagccggcaccaccagctatacgatcagccaggagcagacgggttcaggcaacacggtgctgtcctcaatggtgcccaaatcgggatcagcggcggccgccaagcagaagcgcaaacgcaagacgcgcgtaatcgccgacgacgagcagggcgagtacctggaaaagatgagtgtacgtggcctggacattgcccgctacgagcacatcatcgacggcgtggcttactgcctggtctgcgccaagaacgatatcttcaagacgtttaagaacaagtatagcttccagagacacgcctacctctttcacgagggccaaaaccgcaagatattcgcctgccccatttgcaacaaggagttctcgcgtccggacaaaatgaagatgcataaaaaggacaagcacggcgatgttcccatgccaccatcggccaccacgacgccgctaaaggctgacggtccgccggctaagcgggcgcgtaccgctcgtactccgcgcgtccgcaagacgaaggatggcagcacgccgaccaagaagcggttagcgcagatcgacagtgttctggacgacgtgcaaaatggggagtctctgaccatggcgccagtcagcgtgagtcactcccagcaacagcagcagcaacagatccagcacagcatcacaacgctggctccctcgacgccatcgcagccgcagcatcagctgcagacgctgccatcgctggacttcagcggcatgatcctgcctggaggcgcacagctggcactggccaatccgggcgccaccagctccgtgggactgcaacgaggaccagccacgccgaatggtcagccggcgccgcccaccaccacgttgatctactcgaatcaactggaactgcagcaggcgctgctgcaacagcagctgcaaggtcagagcatcatgatccaggatcaagccggcaacctggtgcccctgcagctggacggaacccaggcgatatacacgacggcgccgcaggctcagcgccaacagaccacggccacatatcagacgacgcagcagcagcaacagcagccagcgcagcagcccgccggccaggcgcaacagcagcctcactacgagttggacaacgttacctatttgagctccacggcggcggccacaccgacatcggccgagcagcagcagcaacaacagcagcagcagcacgtgatcggcacggttcagagctatcagatcctgacgcccgacggcctccagaacttccaacccaagctggagacggccgagctgggcgacctgtgtccctattcgcagtacaccttcacgacgcacgccggagcgcagcccacgctgaatgcgaacgcgctggacgcgcagacccagcatcagcagcaccaccagcagcagcagcaccatcaccagcagcagcaacaccaccagcagacgcaactactgcagcagcagcccttcgccacgcatcacaatccgcaccagcagttcatggagctgaagaacgagctgctgattaagggcggcgacgcctacaccctggacactgcctccatgtaccacctgcccttctcgcccacctcgatgatcaatgcggtgaacgatgtgaacacctcgtcgctgctggaaaccaaagaaattaggtaaacgctctttccaactaaccatgcccactattgcccaatccccaatacccccttgtctgctcgatttttctcttagtgtaacgcgctcgattagattgccgctctgtatctgtatctgtactatatctctgtatctgtacctgtatctaaaactctatccatattgctatctctgccaccgtaaccccttttacttgcgactgcgactccgatctttctttcacgtattttgaaacgcgaatcgacggtgtactttatacaaaaaaaaaaaaagaaacacttaacacccgatggccgcctacaaaacacgaaaactaaacatcatgggaatgggggataacattaagtatgacttgtttagttttaaattaggattatgcatatattagttgtattatttttgtaatcatccaattatgtacatctttatttattacgtacttatattacttagtagaatttaaccgagtttttcagttggtaatttagtcgtatgaattgaagtttgtgcatttatttatttatttaccaatcataacccactgaggtatcgcactctattttgaatagattgttccttgtgtggcttgttgttgctttcttgtaaaattgatatgccatcaaatattacccaattaataccacgaataacaataaccaatacaaacaccccctttttgtttcgaaaaatacttgtgttcaaatacgttttatacttcaatgcaattttgttctttttctttcttttctcttgttttattttatgtacacacaaccaatccaacaaccaaccaatcaatcaaacaatcaatcaatcaatcaaatcaacaacgaaatacctaatcaaaaaaaaaaaaaaacgatttgtaactatagctacgatatatcagaggcagtgctattagctctctgaataaaacgatccacacagaaagctgcagccaaagtaccaaaaattctatttaacgaatacaagactcaacaccgagttcgcaatgaat

SEQ ID NO: 7901 - DNA, 2060 bp, DROSOPHILA
tgttcgagaactacaacggcggaatgccagcggtcagttctgccgcaccaacgcccgttcccgtgtcgcaggccaacgcacccgcgaccacgaccaccactgccctggtcaacacggacggcacgatcatcgagttcgacgggagcacgtacgaggagtatcatgtcctcaaaagcgagcccggcagcagcgattgcctgagcaacggcagcagtgccgtggccgccgacataatcaagtacgatccccagcacggtgtcgtcggcgacgaggaggacgacgatgagaacggcatgctgcatgtgaagtacgaggagcagagcctcgaacacgatccggaaaacgagcacgatgccgagcaggagcatgagtacgaggagtaccaggtgatcaaggccgaggtggaggccgaggcggcggagctggcagccggcaccaccagctatacgatcagccaggagcagacgggttcaggcaacacggtgctgtcctcaatggtgcccaaatcgggatcagcggcggccgccaagcagaagcgcaaacgcaagacgcgcgtaatcgccgacgacgagcagggcgagtacctggaaaagatgagtgtacgtggcctggacattgcccgctacgagcacatcatcgacggcgtggcttactgcctggtctgcgccaagaacgatatcttcaagacgtttaagaacaagtatagcttccagagacacgcctacctctttcacgagggccaaaaccgcaagatattcgcctgccccatttgcaacaaggagttctcgcgtccggacaaaatgaagatgcataaaaaggacaagcacggcgatgttcccatgccaccatcggccaccacgacgccgctaaaggctgacggtccgccggctaagcgggcgcgtaccgctcgtactccgcgcgtccgcaagacgaaggatggcagcacgccgaccaagaagcggttagcgcagatcgacagtgttctggacgacgtgcaaaatggggagtctctgaccatggcgccagtcagcgtgagtcactcccagcaacagcagcagcaacagatccagcacagcatcacaacgctggctccctcgacgccatcgcagccgcagcatcagctgcagacgctgccatcgctggacttcagcggcatgatcctgcctggaggcgcacagctggcactggccaatccgggcgccaccagctccgtgggactgcaacgaggaccagccacgccgaatggtcagccggcgccgcccaccaccacgttgatctactcgaatcaactggaactgcagcaggcgctgctgcaacagcagctgcaaggtcagagcatcatgatccaggatcaagccggcaacctggtgcccctgcagctggacggaacccaggcgatatacacgacggcgccgcaggctcagcgccaacagaccacggccacatatcagacgacgcagcagcagcaacagcagccagcgcagcagcccgccggccaggcgcaacagcagcctcactacgagttggacaacgttacctatttgagctccacggcggcggccacaccgacatcggccgagcagcagcagcaacaacagcagcagcagcacgtgatcggcacggttcagagctatcagatcctgacgcccgacggcctccagaacttccaacccaagctggagacggccgagctgggcgacctgtgtccctattcgcagtacaccttcacgacgcacgccggagcgcagcccacgctgaatgcgaacgcgctggacgcgcagacccagcatcagcagcaccaccagcagcagcagcaccatcaccagcagcagcaacaccaccagcagacgcaactactgcagcagcagcccttcgccacgcatcacaatccgcaccagcagttcatggagctgaagaacgagctgctgattaagggcggcgacgcctacaccctggacactgcctccatgtaccacctgcccttctcgcccacctcgatgatcaatgcggtgaacgatgtgaacacctcgtcgctgctggaaaccaaagaaattaggtaa

SEQ ID NO: 7902 - protein, 678 aa, DROSOPHILA
MPAVSSAAPTPVPVSQANAPATTTTTALVNTDGTIIEFDGSTYEEYHVLKSEPGSSDCLSNGSSAVAADIIKYDPQHGVVGDEEDDDENGMLHVKYEEQSLEHDPENEHDAEQEHEYEEYQVIKAEVEAEAAELAAGTTSYTISQEQTGSGNTVLSSMVPKSGSAAAAKQKRKRKTRVIADDEQGEYLEKMSVRGLDIARYEHIIDGVAYCLVCAKNDIFKTFKNKYSFQRHAYLFHEGQNRKIFACPICNKEFSRPDKMKMHKKDKHGDVPMPPSATTTPLKADGPPAKRARTARTPRVRKTKDGSTPTKKRLAQIDSVLDDVQNGESLTMAPVSVSHSQQQQQQQIQHSITTLAPSTPSQPQHQLQTLPSLDFSGMILPGGAQLALANPGATSSVGLQRGPATPNGQPAPPTTTLIYSNQLELQQALLQQQLQGQSIMIQDQAGNLVPLQLDGTQAIYTTAPQAQRQQTTATYQTTQQQQQQPAQQPAGQAQQQPHYELDNVTYLSSTAAATPTSAEQQQQQQQQQHVIGTVQSYQILTPDGLQNFQPKLETAELGDLCPYSQYTFTTHAGAQPTLNANALDAQTQHQQHHQQQQHHHQQQQHHQQTQLLQQQPFATHHNPHQQFMELKNELLIKGGDAYTLDTASMYHLPFSPTSMINAVNDVNTSSLLETKEIR

SEQ ID NO: 7903 - DNA, 48452 bp, DROSOPHILA
tttttcttttaaaatattaaatataaagttaatgtcatttgctcaatttttttccgtggattacccgagggttggtgagattcaagcacgaaaagtgaagaacttgaagtcgagtgaagttaattaaagtatcgttaaaaagggtaacacagggcttaaaaaaatgggggaatctttccagttgtctgtttcgcgaactggaaaattactgtaaatgggggaataaacaatttagcgtgttaatttttaaatggattttatctactcggaaaaaataatttggttaaagatgcttttaatgcattaactttttttttttttattaatttttgtaatcttgtaaaacaattgcatttttaaaaaaactttatttttcaatttttaaattaaagattctcgacgtctattttgaaatttaatttttaaacatcggtttattggtgaaattgcattgatactgataaaaatagtttaggcactcctaagctctacggaggtatatattgtggactttcgacgatttagttaaaaaccctaaacaataattaaatagtagaattataaaaaaactgaaatataacataataaattgggtggacattgaagtggtacagaaaaagctttgaaagctttctctccccacaaagagttgaccttggcctgcttcaaataccattaggcctttccttggcccacattctctgcgacctgaccttcaacctgaccttgcattaacctaggcctttgaaatccttgtcctacttcctgaaaattaatatttattactagaacggattgatttttggtttagacggctttaaaaacgcttagaatttttttttgattactaataatctgctttattaccattttcaggtctttaaagcaattataaacttacaactactatcgttacctgccattaagaatcaacaaaacaaataccacacatcacaacgaaacgtacaaaaaataaaagttaaattatattattcataaaatggataccttcaatgtacctatgctggcggagagcagcaacaccaactatgcaacagaagctaccagcaatcatcaccacctgcaacatcagcatcagcagcaacattcacatcagcagcagcagcagcagcaactcctaatgccccatcatcacaaggatcaaatgctggcggcgggcagttcgcccatgctgccattctattcacacttgcagttgcaacagaaggatgcaactgcaacaataggacctgcagcagcagcagcagcagttgaggcggcaacaacatcggcaaatgccgataacttcagttcattgcaaacgatcgatgccagtcaactggatggaggcatctccttgagcggcttgtgcgatcgtttctttgtggccagtccaaatccccacagcaatagcaacatgacactaatgggcactgccacagctgcaacaactaccactaccaacaacaacaataataacaacactaacaataacaataacaacaacgtggaggctaagacagtgaggccatcgaacggcaattcggtgatcatcgaatctgtgacgatgccatcgtttgccaatattctatttcccacccatcgcagcgccaacgagtgcattgatcccgccctgttgcaaaagaatccccaaaatccaaatggcaacaacagtagcataattgtgccgcccgtcgaatatcatcaattgaaaccacttgaagtcaattcgtcgacttccgtttccaccagcaacttcctgtcctccacaacggcccaattgttggactttgaggtgcaggtgggcaaggatgatggccacattagcaccactacgaccacagggccgggctctggatcggcatcgggttcaggatcgggatcgggatcgggatcaggatcgattgcacgcacaataggcactgcaacgcccacaacgacaacatccatgagcaacactgccaatccgacgaggagctcattgcacagtattgaggagctggccgccagttcctgtgccccgagagcagcgtctcccaacagcaaccacactagcagtgccagcaccactccgcagcagcagcagcagcagcagcatcacatgcaaagcggcaaccacagtggctccaatctcagcagcgacgatgagtccatgtccgaggatgagttcggtctggaaatcgacgataacggaggtaagttcatcttttgtatcaaatgatttatttacctccccaaaaccatcctaattcgaaaggcaaattgtttggcaaacattctgttgttgctgcaagtgaagtgataacgaagcggcaagtgcgaaataatacaaatacataacgactaataagaaaaatacaaactaatgacacaattaaacaaaaaccgcgtgtattatcaaacaaatgctcaaataatcaataaatcaaaagcaagcaataatgaaagttatgaaaaaaaaaattgataaattcattaataaatcaatatttaatatgcaatatacaaaataatgaaactttataaataatatgtaataataatgataaaacgaaacaacagcattacaaagattatgtactatgaataataaattttacatttcattaccaaatatttttttttggttgctcagcaattttagagcacttgctactaccaatccggccaattaaaatgcgattatattcacacgcatttcaactgacatttattacattttacacattcaatttaaattgaatcagaccttgatgttttcactaacctgtcattactggcggttggttttccactggctcggccagacggagacggtcgtcttaaatcttagtgtgccaagtgcaatgcaaagtttaaatatgcacgggcggtacaacccacctctccccccccccccctccttgaattccctccaccagtccacagttggcctcgcacttagctccatgtttgttgtgcggcatggcgtcggatgcagccataaaaatccatttgaaatgtctataaaaatgcaactaacctactttcgggcgatgtttttggaaaagccgaaatcgaaatgctcttcattaaaactgctttgcttaattgcaatgtctaattaaaagcgaattgaagtttgaatatgaataattatttgtttataaccattgtagttgataacatatggttggttaccttctaatgcagctgaaaaagtttcagcagttagatttgagctatttacttttagtgtgaatgaatatagttctatatattaaatataccagatatcccttgttcttccaaagagtatctgtaaaatgcaaatgtagaaaaattcgttcgatgcgtgaatagcaattaaatgggcaaactgtgacagacccctgccaaatgccgtcgatgatgaatgatcaaatattacagacacacatacaatacataatatgtatgtaagattgtttgattttgtgtttgttttacacgacacttggtggcatgatatggcttttcaattttcaaattaactttattgacattcggcaatgtcatcgtgcatcgagtgcttgcacccctttccttaccacaggcacactcaattcgcccgcttggccgtggcgaccttgcggcgggaaaccccccaagtgcagcttaaattctccagctccatgcgtctcatccttagaaagagaggcaaaatggagcaaggtcgccggggcattagaatttgggtcaagcgcaaacgaatcgcttttgcgctcgcttgcgttttctaatattggagattgggctcaaggatgcgagacaataacaaaaagcgaaattgcatagaaatttgaaggtcaccgtgtgcatcagccgcagcgcagccggcgtcgcagtcggcgcaggcagtcgcgtgcgctcgcaccctctctttcgctctccattgcacactttctacagtgagagaaatctgtgaaatatacgaattatatgaacaacagtaaagatgcaaattgaaatgatttttaatgtttaaaatcatctggttaagtagttatgttcaagaaaacaatctaggattatttttataactcaaacgataattttaacgctaatttatagaaaccagaaaccatttaagtacttgaaagttctcttataaaatcgatcacaaatatatcttaagctagcgatagatgatgaattagttgcacaataagattgtactctatctttttgaatagaatttttagttgccacgatggccattttctttagactcttaataaattaattaatagaaaatatctgaaacttagtgggtattttttctgtgtgcatctgttgttgcggctgcgtttgtcggtggcgctgttctgcctcagttggttttatttgccgacgacgccgccgccgccgcccgcaacgccggctgacattgacatagattgcgccgtgccgcacaccgcacactgcaccccaaaccccccacccccacccgcaccataccgcaccggcgtcgctggcgtgcgtctatgctcacctcaaaggatttaaatgggtcaaagtcagctagcagcttgttgcattttgaaaaaatgcgcaaaaagacgcaaaaaaaaaaagacaaattggggcacgacattgactgctgcatatagcatatggatagtacgtatatataatacatatgttgtatgtgcattgtttgtagcgtcgcatttcaaggtcctttggatggatgcgaaggctgtcgccgttctagcgggcatgagtcccaaggacatgcccaccacccaccggagtatccttgggcgctcaaggtcgttctatatgcaaataatgtctgccacgtctgatttaagctgcggccatcaggtcgctttgttgtgtggcacgactttgaagaaggatttgggcgaaatgggcgaatgtttggcattgggaagagtttaaagatttaaagggtgcaaaaacacactgacctggtttcactgtgatttaaaattgctctttaagctcgtaaaaaaacgcaaaagctgattgaaatttgcaaattttaacttaattatagcgaacttattttaaactattcatttagcagttcaaacgtgaaatgtaacaaaagtgcattatatataattaacaatttaaaatgtattaataaattcattggtaattatttattttttttgtaacttaataagaaaagatcatggtgggtcattctttgaagtttttctacctttttctttttgtttctatttgtatttgtattcaatgattaagtcgaacaccaatgaattatcgagttttaaactgttctgggtaattcccttaaaatatacacggcctaatggccaattgtctggtctttgaaatggtattacgtgcaattagtgagcaattaagtgaggcaaatcgaaaaatccctcacattctatcctccacattggtcattcacacttgcgttgaattctaattctttctcacgattcgccattggtgcaaaccaaaccgcaaattggtaattgaacccaaactaaactgaactgaaaactaaactaaacacttcgaatagccgaacaataaggcttagtcaagcgatcagaaaacagaaatcttgcaaatgcaactcaaggatggaacattgaaaaatatcaagtttagctacgtttgtgcccttaaaaaatataaaaacaaaacaaagcccaagcattcgattgtaacaattgagcaataataatgataatgcaagcaattagaacaggcaatcaaaggaggtggggagtttccgaggggggtgggcactttgttttgtttgcaaattgtttaactaagtgcatagtaattgggttattagtcgcatttcgcaggagtgtttgtttttttaaactggtaattagggttctagttttcatagtttttttttttgtaggatcgttgaacccttcagggttttcgatttataaaagggagctgcacatataggttttcaagtttactttgttcgataagttacaaatgtatctaaactttaactgttcaaaatatagtggagtgacattagtattttaatcacaaactgataaaattggtcactaacaaattactaaattggttgataacaattaaatcatctattatacttacttatgtattatgatttgggcaaagtaatagtggctgtattcaattcaaacctacaaaacaatatgatttgaaaagattttcctaaatcctaaattctttttacataaatgcataccgctaatcttgaataatcgcccataaaattatcttccattgttggtgcaacattttccttctattttttttttttttttgatgatgcaagtatgttgcgtttttcctcttgttatttaatgctgttattgttattgttattgttgttgttactgcgccgctttgaacattttattgttgttaaccttagctcggcaaaaaaaaggcaaatgtcattgggagtgagtctcgcactctcgcaatgtctggggcgtctggctcctatagcacgctgccactcccccttcaacgcaataccgcccaccacccaccgcccaccacgccccgtggaaaagtgtgctaatgggtcgccagttgaccctgtgccacattcgatgtttgcgattctgccgacgtctgcagcgctgctttgcactaattttgcaatgccaaatgggtggggaatgggtgggatttgtgcagcgagagatgcactcgctaagagagagagagagagagagagcgggagaggagagaaaacgaacagagaatgcgcattgatttttctttactgcgctgattctcatcttctcatcttgccgtccccctcgctcatccggccgtgcatctcgctcgcacttgcaccctgacctagttgcattctattttctttgcatttatttatttaattgttatttttcttcggggttgcacatttgtaatttaatttatgacattttagttttgtattcttcatgtgcttttatggctttcatgttgcaaaatatgtagcgtagttttagaggaaaattgcaatattaataagtacagcattttggtaaatgctcataattaatacatatatatttgtctttaggtgttacacttgaattaatctttcccagctaactatcgaatatagtgtctttagagctataagctacttgactattgatactagtcatgaaaatataagattattctcaataattgatattaataagtgcaattcccatcaatagaaatgaaaaatggtctgtcgttccacttttatgtaaccttatttatttcatattcttaagataagttgcatttttttatccaatgctttttttatcagagttttatgtccatttatttgttttattgtcatcaaagtgatttagtgccctgtaaccatttcaatacggcacgtactcaactattgcttctctcttctcgaaattgcgctgttacacttaccacgggcattgtaatcgggcaaaagtgggcattgcattgcagagatactggtacaactcgcctcttatctttgcttatcgcggcgtatacgtaatgtcggctttttgcgttacgtatacgtcatgtgtcagcttcagcgataggttatcaattaataattatgtggcgaaaagttagagagtacacttaacctgaattaaattcgtagcattgatagattcgaaatgagattgtttgtagaactattattgcggttaattgatcaaacaaaatgataatgatttgagaataaactgttttcttgaagatctgaaaagttgaccgaaacggtttgttcattatgggaacgaactagtttctggtattaaaatttaatattctgctttaaggacttaaagaaagccatttatatattttgggaatgaactagtttctggtattaaaatttaatattctgctttaaggatttaaggaaagccatttatatattttccgtatagggaattgtgcaacaaagcaaaactgcgtttaaacaaaatcaccaaaaatcaacgaggcagtaactacccattgtttaaagtgagtttcttgtctcttttccgtctttctcttctcttgcatccttctccatttcctctcaccgaccccacacgtagcgcattcagaaatcgtcttagctgaacggtttttttttaatcttccagtcacaactacacgcgcaatagtttattcttgaaaaaaaaaaatgttaaaatgtgctctgcaggcggcagtctcgcaacacacaatcgcactcctccacacgcacacacacacacgaacacatgggcgtagataaagaacccgcatactagggcaaattgtggagcttttgccggtcgaccggagcttttgcagtttgcacatgtgtgtgtgcattctggctgttcgtttgtgtgtgtgtttgcatagttgagtggctggcgccaactgcaaaaaaaaaaaacagcgagcaaacaaacgggaacctaaacgatcctctaaaacaagaggcagatgaaaagatacagatttcgaatcagaaacagatacagaaaatataaaaaaatacccacgcgccataaaaaaatgtggcaaagagcttatcgccagcagcatgcaggacaatgcaaactaaacaaaaagcaaaatagaactcatgtgagctttccgccataaagctcacacgaggaaaagaggaaaaatacgaaatacgaaaaggaaaaataaaataaaacaaacagcagaagcggcaaaagaaacacaagcagagagaatcagcaactgcgaaacgagaacaactgcttgcagtttaggtaaatggcacaccaaacgcactttttacagataagccctcgctgggcagaagtaaaaaacaacaactcgctcttatcactgccaccttatcgcggttgtcacatttttcaatttttattttatttaaacttaaaatacatttttgcgcgccgattgcactttctgtttacacttcctttcttcttgttttcgcttacatatactttcatttgcatatttatttacgtacttttcgctcgcgctgctttgcaaaaatgttgcggcaggtcttggctgatttttgcttacttcggcccttttttcttttttattcttttcaccgaaagacgcaatgaagttatttatgcagcaattatgattatttatgcttctcctgtagttgtaaaaatgcttttaaatgctgaaattgctttgcgaaggcaaattactgaagagtttgtaatcagcctggaaatcctacacatttgctcctgtgttgttattttcattaaaaatatactaatggagcaataaaagggttggaaattaactaaatttaaaataacaatcaaattattattattaattattaattagcttaaaaagaaaatataaaatacaataaaataagtcgcctcaaaaataaaagtttttaattaaagtaaaatacgaataagtatgcaaaatattttataaaattctactagatagaccaatcccgtttctaaaactatttcaatttcaaagtgtataaattgttaatgagattattttcacaacctctccttccaataaatacttatcaccaacaaacatgtttcaaaaatggctgaacacgtgagaagaaaactacaatcaggctgcaaggccataaacataaaacatgtttagtcgcactatccgaataaatgtcataatcaaacccccggacctttagaccaatataaaaaaatataaaattgttacagcaaataatgaaataatttacacctctgccatatgtcgctatgatgtaaccgtatttcttatgctagttgttgttgctgtttgtgttgtcactcttctcatatttaaataaacaagaaatatttttttggtaatgggagggaatgtgtagtgacgaatggtttgatgaggggtggggagggggtgcgtttcggctttatttatttttataatttgcttacaattcgtgttcggctttatcggctcatacgaagaaaaacacgaagagggaacgaggcaaagacggagctttcggttcgaatggcggccatagttgatgttgatatagcttttgatagccactttttgacccactttgactatttgcatggcctactgcacttggccaagtttttgtctcgctcctgcgcacacacgaccgaaaatgtgaccgttggccagagcgagatggcgagcgtatttagatttgaacaaaaaatggtgatacgagcgattatagtgtcgctcaaatgaatagtgccatttatttagacaggaataaacaaaatgggaattagcaaaactaaatgttaataacaaaatttaaataatgtatgatatttaattaaattaaaataatttgaagacagtaactagtaagtaacgttgaaagtaatggacgtatttattgtattattcatttagtatttgcttgttgtttttaattgaaatttaaatgaaatccaatattacttttacgcgttttgcatatcgtacgcctctgtaagtttgtcgcaataattagttgggaaatttagatcatggcagcaacataacattgtaaaaataattgcagctaggcaaacagaaaactgtgaaaaacacaacataaaacagacattgaaacagtttttcgagctcctacctcccccccttctacacccccccccccatcttctatattttgtatattattatttgagtactatttctctgtatctcgtgttgttgtttttcacgtgaacttacataatctttcggcctatctgtgcgcgtttatatgagtttttattgtcttcacatcgcacacactaacaacttaaaaattgagtagtttttttttattttgcttttggtgcgtttgatttcgaaatcaatttatacatattttgtacaaatatttttctttgtgattttgtcacttttaagttgactattgcgagatgggattaattaaatgggtggaaattgtaggaaatagttgttattaaatatttattctatgtgtaaactgtaaataaatacctttaacaagaaataaataaattatctgaaaggtcttacaagagattaaggcagcttaaagtagcatcaaggttcaaaatgcatgaattggtaaaaattcttggattatttgcaagccaatccgtcagttgcaaaatccttcacttggcaaacaaattaattagttttgacaccgtttaactttaacccaagctgttgacaccatcgcattgtcattcgtcattccgctccattgtcaacttgcatattgtttgtccttcacttgaattaacaatgtgcaatgcacaacacacgaaaataataaagaaacataacgaacggctgttggttttatgacttgcttattaagtaaaggttttatatgaaacgatcgcaagagaagaaaaggaaaatccaacaaataaaaaatgccagcatctaaatttgtacatttctgcttaagaagtagtgactcacaatgtgtgtttgtggctttaattttaagttggtccttgcatcaatgcatcgatctcaaaggacacatttcggtgcagttgtgccttcttatttggttttggggtggcaaatccgtaccccgccgccccccttttgaaactaggtcaatgcaatttgggtcacctagatttgattaccaaaccaaccaagagtcgtcgccgtcatcggttcaagcggagttctctctctctctctctctctctctctctctctctctacctctgtacccctctcgctcacacgcctctatctttctctctctatctgaaccatatatatgtacatacatacatatatgtatggaaggaagtatgtacaatctagtacatggctacagctgcgtgtgactgatggatgataaaatggattctcagtgggtggtgcatataagtacatacatatgtttctatatccttatgaggaaatcgtagggatttaactgaacgagatgagtcgccggaaaaatgtaggactactaccaaataagcacagaacgggataaaaggataaaatgccaatcaaatagttgcaaaattaaagtatagaaaacaacaggatcgaacttatatgcatatttaggattttgtgagtgtgtaaggattcaaaaacctacttaactagggtttatttaccgttaagtactaggatattcatgactaggatcttcaatatgtatgactaatatattataactaattaatataaatataatcagaacaaatgacgcaactgaacctatcaaaaacttataactgattgatgaaacccttgaaaaactcgaaatgggtcaaatactcagtacatttcgtattcagatccatgccaaattcaaccatatggcgttggaaacaatgggactttccctgacaaaaaaaaaaccgaaagcgaagtaaaaccttaacgtaaattgatgaaattgattggaaaaacgtagtcagtcgacagcaacaacgaaatataaccaaaatgtatttcaaaatacaaagcaaaccaaaccaaaaacccgaaaaaaacgaaagtgcgtgcgatgaatgagcaaaattgcgcaaacgatcgtgaatgcttcacactgttgattgtttcggttgtttttttttttttttgggtcttctcttcaagtgggtattgaactttaggcaacaccgtaattagattaaatattttgtacaaccgattactaatttttaattcgtccttgcttagtagatatccatgatcacatgaactcttcacattgaaaaataaaaaagttttacgaagtttaattacgaacattataaatgtaatatgatataatgtcgattattaatgctaatacgttgtaagtcaattacttaactttagtaaccaatttaaggtcgaaatatggaaaaaatatttagacctttaattgaaaaaacattattagggtagttcaagactcgacctttaagcgtttttgtgtagtttttgtctgtgctcgccctttacgcattggaaaaaagctgccaaaaatatcaacagaagcctgagaaagagacgggaacaacaggagtgtgagagagagggagtgagtggggagtctgaaagcaaaatacaatgtgcgtgagctttttttttggtttcgtttttgtgtcgttttcagcgttttttgttgggttaggttcaatactgaatattttcgtcttttttttcgggtggataaagtgggttgattaagggggatgtgggaggggatgggtggaagctttggtgcgtgtgaggcgggaaatgttattgcgtatgcttttttttttttgtgtggcgctttttgtttttgtgggaatctctcgtttgtggttttggttttttcgggtttttatttttgcgtttataaaaaagctcttttgctctttcctcacgcacacacattagtgcgatacgctactctccatccattttcattttcattatttctgctttattttttgtttctgtgtcgattgcgttgttgaatatttccactttgtttatataatattaatcaaaatgaaaaaaaaatgaagcactaagaaaaaatatacattcgtgcgactgcgagtgtgtgagtttatacgtaaaaagcttcaacgttttcagaaaaagtaggttagtgggtcaccatatctaacaacgaggcagcgctgctgcgacgtcagcgtcgacgtcgactttttgacagccgccagacgaagcgaattttatttcatatatttccaagtttcttcagacgattttcctcgtctttttgaattttttttgtgtttttttttgcttttttctgctgctgctttattttgcttggccaaaaacgtgtctctgctccttttccaaacatcattagaaatagttttggcattttaatcaccgcagttttgccgctggtgttttgggaattttaagtaaatatttatttgttttctatttggattggcgagatgaaacgaattttgctgttctggaatccgaaaatattatggtaaatggattttcacatttaccattttatgtaaaagccgacgccgatttttatggtgtggttaaacattcataaaaatataaacatagattcttcataactgagcagatgtaatgtaaaaaaattaatttttttcacatgcaatttgaaaaaatttataattcttaagacacattttcagttgtattttatattcagtaaaaaaaaaataattatatcgactaacatatttttagtcatttatctgaatttcgccgcacaaatgtctgtagttttgaaagtaaagtagctgctcataaactataatgaatcgttgataatgtgcactttatagtatgcaaattggcatttttgcgattcataaatctgttttcggcttgctcagcattggaatctcaacgattttggtgtgccaaaaacccaaaaaccgcagagaaatagcaacaaagtttatgaaaaccgcagcaataaagaaaaagcgaatcagagacgcacacacacacacacacttctacacacgccgcgctattcaaatgtgaattaaaatcgcaaaaattgttggcatgtttaattattgttgcccaaggctcaaggtggctgcagtccaaattcaacaacaataaccagggaaaaaaaacacacaactcatgtctgtctaattgggcagattttcctttttgccgctgtcaaacaattaacataaaacatacatataaataatgtacatgccatttataagcatttttaataaataaaaagccatcttaagtaagcagtgtcaaaaaaggtataaataaaataaagacaaatgtttgatacgaagataaaagacgacgccactacatagaccgtcatgtttagtttttttgtaacaagttctttatttattcgcttttcttattataccctcttctcgttgactaaacgggtatattagtttcgttgaaatgtatgtaaaaagaaaaggggtggccgcccgtatgaaaaatagaaaatttcacatttcagtagcaaaaaaaaagggtatctgatattcgtggcacatgacttctctgcttctctctgcttattgattgatttttgagatataataagcgggttgtttggagtgaccataaataactatttacatatgtatgtatgccatatatttgcatatacataagtaaatatttcgataagtgtttagatacatttattggtcttatgtactttgtatattctgataaaaatatatatttttcagcttatttaatcttattcattattattattattattattattattattattattattattattatttaacgaatataaaaatttcaacgattaagttatacattttgttgtaaaaattatgtgtttcacttaatattcgcaagctgttttccctcaacttaattagtgcacgagactagcgagtttctgccgcacaaatgcatgtctaaaatgttttttttttgtttcatctagtcgactttcttttggatgacccaaattgcgaactagcaacgagtcctgtcccacagcagccccccaccccactcagcagccacgccccctctccttttacgtttcacccccccggtgggcgctacccgcaagcgaactacctaccgctcctttcacttgcaggcgaatgcaacttatttgcttctacgcatcgggcggaggcttgaaggaccaaaagcaaagcaaaaccacccgcccactgaaagagcgtctacacgctagcacaccctcgctttggggccacagaaccccgctagcaacaaacccctcccctcacctcacctcccccctccctgtaaaaaagcgcgcattgcattttaagcagaaaaaacacccgacgccaagcagccccctagccgaaaaccccccctttttgccgcctgcaattgtttttgtggcctcgtgacccagtttcaagcttcgtcaactgcaacgccggcagaggggggcagggtggcagaggggcaggggcgtcggcagagggggcgaacgttttaaatgaattgcagtcgcgctgtgtgtgtttctttttctgttattgtatatttttctttttgcgcaaaaagacgacgacgacgacggcggcgaagaagaagaaccaaatcggtaccataaaatcgagcaaatcaacaacagacgacatataaatgcaatatttacaacgatttttccgttcagcttattgcaattgaaattccaggcggggattagtcagctattagcacgtggtcaccaggccaactgagatatgaataaaataaggggaattccatggaacagcgaaagggaaggaaagggaaaagaagaggagtcatcctaaaaagggaaagtgaatgacgttgggaaagtgaaaaggatttaataatgtgaacaagtcggctaaaaataatattttgtttatcatataagtataaaacctgtaaagtttataaatatatatgtataatatgtatgtatatacaagaaatatttatgttctttagaaaaaatcgcgtatacgacctgtggtcagctttttactttggtttcagtttttgttctattggaaaatgcaattttgggaaacaatagatcattttattaatttaacaatgtattttaaaatacgctaattatattttaaatgttttattcaaaaaatctaccataaatgtttagcaacatcataataaagcgaatgatttcagaatgatgatcacccagcccaaaaaaattctttccatattaactcaacaaagtgattgattagtataaataaataactgagcaaagcatggcaatcaaaaaagccccattgagccacacctgttccacggcacctttcgattggtgatgatattccacatgacagacaagatagaccgacggactgcgaagtcagcgtcgccgttgccgatctacagaaataacaaaaaaaaaaaaaaaaaaaaaaaaagaagcaacactcactcagctgacctcattacaaatgtgctataacaaatataataatggctaatgaaattaacaacgcaaaatagtagaggcaaattaaatattaaatattgtataatttatacgcgttaatttattacgttttcgccaaaaaggtttgaacaggttgcgtgaaaaaagtgaaataatgatgggaaggaggggaagtaggggagggagggtatatgggtggtatgcgtaatttattgcgcattgaaaaagtgcactttgactaaatgtgtgcattacgagttttctgaagcgcactgaaaataaattaaatagcaatcaggacttgtttaaaagtgtttttatctttttttttttgtatttgattagtgaagataaaagtcagataataaataaatgcaaacttttaggatgttaaaatcctctgccagttgtatatttatgggtttttattgctcatctgaatgattacagtcctcttgtactatactgctaatgagtataatcttataatgtatccaagttatgttcttattcctatatacattaactaaaacgaacagtacataataaatctgatatcttaactatttaattatgttcaagaagcgttttactttacaaatcgatttttttcttgtaaggtatgctttttttttcttagtgtagacggacacatttatatatagaaatacactattatacaaatctacattaagctgacctcctcctcgagcggctcgctgcgacggcgacgctggcagaggctgtggcagcagcgctggcagcggcgaattgcggtcgaaaccgtccctgggcgaatctgtatctgtgtgtgtgagtgtgctttgtatctgtgcgcgtgtgtgcttgtgtgtgtgtgcggcatatgaaaagtgtgtcaaggttttttgaataatattttgtgcagcgttaacgcgacgtccgcagagaaaacgttgctgttgtttttgtctctttttcccttgttgttgctgctctcgattgttgttgttgctattgttgctggcattttgttgtaatcgccgttgttgccatgtttgctcttttcattgtgccactccccctcccctttcgccatccgccacccatcgcccacccaacccccttttgtgtttgctcatttcacactgtcatcgtttcttcttctcgcattttatttgtacttaattttgctttgtggacaacacattacttgcgctattatttattgtttactttttaatactgacttctttatattcaatttaattgagattcgcggctttaattcgtcaatcaaccgcatttctttcgctctttatcttttgtatttgggcagtgtgcgataagaaaagcgaaatggagacgattgtagtaatggtgtaatcggaatgtgggtggcgcgatttatttccgtgggctttttactttccgtggggtaggcttaatccggcgtaaagttgctggagagttggcataacccacatgggagtgtgttgccaaaccttttcctctaactcgcccaattagcgttctttattttttttgggaaagccgaaacgaagaaaaccgaaacacaaacgcaaaccgttgtttgcctaagtcggttatttatgggcacatatttttaccgcctggcaactgattcaaatatccaggtaaaagttggaattgttaggttggaaggtgttcacacatgaacacgaatatatttaaagacttacaattttgggctccgttcatatcttatgtaaatgaatcgagagcgataaattatatttaggattttgttatctaaggcgacatgggtgcattgctcaaaaacatgtaatttaagtgcacactacatgagtcagtcactttgagatcgttccccgcctcctaaaatagtcccttagtgggagaccacagataaggtcctcgccgctcaagatagggcagatgtgccccgagcgtgggacctcgataaggcggggactatttacttaggcctctgcgtaggccatttactttaagatgcgattctcatgtcacctatttaaaccgaagatatttccaaataaaatcagtttcttacaaaaactcaacgagtaaaatcttcttatttgggattttacatttggtcaatcgagcctttaatcgactctgcagtttccccctaccaaaggtaaggaactcagagaaaggccagctcctttaagcatcttacagctaaaggtagcaaaaataaggtgactcttgtttccccctaccaaaggtaaggaacagagtataaatataaaaagcaaaaagatacaaaagaatcttttatgttttaaaacaagcaccttatagtctatagctaaaggttgctttgtgtaccattataaattgtggtaaggcgtgcttgaggccatacatcagcaattgtgaaattaaaaagtgcataacaaaagtgccttataaatgctgtaatagcattaaatcagctcataaagagagtgcagtgtatatgccataagagcataaattaaataaaaagtgcctgaaaacagtgccttataaatgctctaatagcattaaatcagctcataaaatagagtgcagtggtatatgccaaaagagcataaatgccgaaataaatggctaaaaaacaaaaaatctgactgggactacaaaaataataaaacgtgcaaaaaaaaaaaaaaaaaatcatctttaaacatcgacggagccttaaagaagagaaggaagtcaaattcaaaggagcctctaccagcagcagaagcagcaacaacagcagcagcagaagcagcaacagcagtagcaacagcagcaacaacagcagcaacagcagcagcaacaacaacgacatcagctaagtcaaaacaagaattttctgtttatccaaacacaccatatatatataaatacatataaaatacatataccaccgtactatatatattaagaaattcaaaaatttttcaaaatgatgtcagaaagactattcaattccttaagaagcagtccgaaattattttggaaattagaaagttggaagtaaaaccaacattacagatgtagaaattctaaaattaaatgagcttcaaaaaatgtttcattggtaatcatagcaatttgttaaagatcggcgtgtcgatcatgaatattttaacgcgaagcagtatgatttaataatgatggtgtagaaaaaattaaaaataaaaatgaaaaaattaaggggcgagtcggtagaaaacactttccctaaatcaaacactgtccctaaatcaaaccctccccctacattaaaccttgaaatgcgtggtcaccctgaaaaagagggtatagcacaaaacaacgctttaaaagtagagcaggcatttcgtaataatgttggccatttcgagtatatctagaagatacgtctaaactaatagacagtagtccagatttccttaaaataaggaaaaataaaattgaatttttatggcataaaatagataacctgatgaacaggtgaatagtcattttgagagttcgctattcgaagaagaaattagcgaacttgaatttgacaaacaaaatattcttacagccattaatagtcgactcagtggcacaataaataaagtgaaatgtcgcggttgttaaggcggaggagttaccaaccctgcctaaaatacagattcccaccttctttggtgattccaaagaatggggatctttttaatgaactctttacagagctcatacatgtgagagaggatctcagtccttctctcaaatttaattatctaaagtcagcattaaaaggagaagccagaaatgtggttactcatttactgctcggctctggagaaaattatgaagccacttgggagtttttgaccaagcgatatgagaataaaagaaacatattctcagatcatatgaataggcttatggatatgccaaatttaaatttagaatccaataagcaaataaagacatttattgacccgattaaccgagtcaatttatattataaaattaaaggcacaattaccagaagatgtggatgcaattttcgctcacataattcttcggaaattcaataaagaatcactcaatttatatgaaagccatggtaaaagacaaagaaatcaggcactttctgatgtcatggactttttagagcaaaggctcaattctatatcatcattctacaggaagtaaaacctgtaaagaaaatgattaataataacaagaataaaaattatagtgacaattgtgcatattgcaaactaccagggcattatttaattcaatgccataaatttaaaataatgaatccagcagacggtctgactgggtaagaaaaaatgggatttgcctaagatgtctgaggcatccgtttggtaaaaaatgtataagcgagcagctttgttcgacttgtcgtaaacctcaccacacagttacttcactttgcaggtcataatccagaaaaagtgaataccgtgtagaacaacaggtcaagccttgttggccacggccttgattcaagtaaagtcgaggtatggaggctttgaacaattaagagcattgattgatagtggctctcaaagcacaattatttcagaagagtctgcacagattctaaaattggaaaaaatttcggtctcatactgaaataagtggagtatcttccacagggaacgtgcatctccaagcacaaagcggttatttcgataagaaattctccgaaaaatttagaaattgaagcaattattctcccaaaacttatgaaggcaccttccagtcaacacgattaatgttgatcagaaaaaatggaagaactttaaattagccgaccacgattttaataaaccgggtcgcattgatttaatcattggagcagacggtatatactcacattctgcaaaatggagttataaaaatagacggtctccttgggcaaaaaactgatttcgggtggatagtttctggatgtaaaaaatccaaaggaaaagaaaccattgtagccacaacaatagaaataaaagagttagatcgctactggggaagtggaagaagaagaaaaagatgatatccgagtctgaaatctgtgaaaataaatttatcaaaaccgacaaaaaaagattcagatgggcgatacattgtgtcaattccattcaaggaggatgtcaccttaggagattcaaagaaacaagcgatagctcgttacatgaatctggagaaaaaactaaaaagaaatgaaaaacttaaggttgactacactaaattcatgaatgaatacatggatttaggacacatgattgaagtgagtgatgaaggcaaatattttttaccgcaccaggcagtgattagagattcaagccttacgaccaaattgagagtagtttttgatgcttcagcaaaaactacgaataacaaaagttttgaacgacataatggtgggttgggccacgagttcaaaaagatatttttgacattattattaaatggagaaaatgggaatttgttgtttcggcagacattgaaaagatgtaccgacaaattaaaatagataataatgatcaaaaatatcaatatattttatggagaaattctccaaaagaaaaaattaaaacatataaattaaccacagtcacttacggaactgcatctgcaccatatttggctaccagggttctggtagatattgcagataaatgtaaaaaccaagttattagtgcaataattaggaatgatttctatatggatgacctaatgactgggagctgattcggtagaagaagctaataaattaataacattaattccccatgaattgcagaaagttggattcaacttaaggaaatggatttccaacaattccaaaatattaaccactgtggaggacacaggggacaataaggttctcaatattatcgaaaatgaatgtgttaaaactttaggactaaaatgggaacctcaaaaggatttatttaagttcagcgtaaattgtaatgatgaatcaaaaaatataaataagcgcgttgtgttatcaacgctagcaaaaatatttgatccgttaggatggttggcaccagtcacggtttcaggaaaactttttattcaaaaactttggataaataaaagtgaatgggatcaggaattatccatagaagataaaaattattgggaaaaatataaagaaaatttattattggtagagaatattcgaatcccaaggtggattaattcaaacagttcttcagtcattcagattcacggatttgcgggacgcctccgaaaaagcatatgctgcagtagtctatgctaagtagaccctcatgttaatataatagctagcaaaagtagagtcaaccctataaaaaataggaagacaattcccaaactcgaggctgtgtgcagctcacctgcttagtgaataatccaaagactaaaaggatcaattgacaatataatgggagatctatgcttgggagtgattccacgattaccttagcatggattaacagtggtcaaagtaagatcaaatttataaaaagaagaacggatgacattcggaaattaaaaaatactgatggatcatgttaagtcagaggataatccagcagatttagcatccaggggagtggattctaaccagttgatcaactgtgatttttggtggaaaggtccgaaatggctagcagacccaaaagaactttggcctcggcagcagtctgtagaagaacctgtcttaataaatacggtattaaatgacaaaatagatgatcctatttacgaattaatagaaaggtattccagtatagaaaaacttatacgtataatagcatacataaatagattcgtgcagatagaaacaagaaataagcctattcatcaattattttcagtaaaggagataagaatagcggaaacagtttgttattaagaaacaacaagaataccagtttaggcaagagataaagtgccttaaaatcaaaaaggaaatcaagacaaataataaaatattggcattgaatccatttttggacaaggatggggttctaagagttggaggaagattgcaaaattccaatgcagaatttaatgttaaacatccaatcattttagaaaaatgccacctaacaagcttattaataaaaaatgctcataaggaaacattgcatggagggataaacctaatgcgaaactatatccaaagaaagtattggattttcgggttgaaaattcgttaaaaagtatttaagagaatgtgtaaccgtgtgcaaggtataaacaaaatacagctcagcaaataatgggtaaccttgccaaaatatagagtgaccgatgacattcccgtttcttaatactggaatagattaccgcaggtccttattatgttaaatgttcaaaaaatcgtggccaaaaaacatttaaaggatacgttgctgtattcgtttgcatggccaccaaagccatacacttagaaatggtaagcgatctaacttcagacgcatttttagcagcactcagaagatttattgctagacggggaaaatgttccaatatctattcagacaacggaacaaattttgtaggagctgcaagaaaattagatcaagagttatttaatgcaatacaagaaaatataacgattgcagcgcagcttgaaaaggacaggattgattggcattttattcccccggcaggacctcacttcggaggtatttgggaagctggagttaagtcaatgaaataccatttaaagcgtataatcggcgacactattttgacttatgaagaaatgtcaactcttttatgtcaaatagaagcatgcttaaattcaaggccattatacactatagttagtgagaaggaccaccaagaagttttaacaccaggtcattttttaattggaagaccacctttagaaatagtcgaaccaatggaagatgaaaaaatcggaaatttggataggtggagacttatccaaaaaatgaagaaagatttctgggttaagtggaaaagtgaatatttgcataccgctccagcaaaggaataaatggaaaaaggaaattcctaatatagaagaagggcaaatagttttattaaaggatgagaattgtcatcctgcaagatggcctttaggaaaggtggaaaaggtgcataaggggaatgatgataaggtccgagtggctaaagtaaagatgcaggaaggatatatcacctagacccattactaaaatttgtcccttggaaggaataaagtctgttgacaaaaatgaggctgaccaagagccaaaaagacgaactagagcgacatcgggaatgtccaagatcggaatcattatggcaatgttggtggttgtgttaagttgtcaagtttctagcgcattacctaaagatatagcaccaagatattctatagacaaaaataaataaaacctcagcaatatatctagacccgctaggagatgttgagattgtgagtacttcttggaatttggttatctattataaaatggatccatattttaaaatgttaacaaagggtaatgcgcttatacaaagtatgaggaaagtttgcgaaagacttcatagctttgaagagcaatgtagtctagtcttagataatatgcaaagtcagttatcggaacttgaagaaaacaataaattgtttatgatacagtctagatctagaagcaagccgtgctcctttcgaatttatgggttccttgtatcatattttatttggtataatggatgaagatgatagagagcaattagaagaaaatatgaagaatttgttagataaccagaacaaccttgataaactaattcaaaaacaaacatctgtggttgattcaacttctaatctattaaagagaacaacagaagatgttaactccaattttagaagtatgcaaataagaattgagaacatgacagaagttcttaaagaaaattattatgtttataaggaatcaataaaattctttatgattacgaaacagctacactcattgattgaagaaggcgaaaaaattcaagcaggcattataagcctgttgattgatattaatcacgggaggctaaatacaaatattctcaggccaaatcagcttaaaaaagaaattgccaaaattcagcagagtctttcggagaacctagtaattccaggaaaacggtcaggtacggaacttaaggaggtgtatacaacgtccgaatatttaatttataattttgagatagattcctatcacataatgacggaagccacattaaatcaatgtcagaaatggcaacctaaataagagaatatgcaaaggaagttggccctggaattcagcgaatgataattgcatgtgagattcagcctctaaagccagataaagcggcgaactgcatctataaaacagtagtcgactctaaaagttactgggtagagttagaaaagaaaagtagttggttgtttaaggttcctgcgaattcaaaagtccgtctgcaatgtactgggctctcaaattgaattgtttgatttgcctcagcaaggagttttaagcattgcgccatattgtacggcaagaaccgacgataaaattctagttgcccaccataacattcagtcccgaaagtgaagaattattatcaacaccttatatagggagaagttagtgaagcgcccgaagattattttgggatccgctgaaactatcaatattaaatcatactgaggaatttgaacgattgaataatgaaattaatttatgaaagagaccatcaaaaattgaaagatttacatttccatcatatttccggacatgctggattaattattgctttaatactaatgatagtttaataatatatttcatacggaaatgtgctgtgcaacaaagaatgcaagcaataacctttgcaggtccggtgccagtactataaatatcaatagtaaataaacaataaaataatataacaaataaaaatatacagtccactatatagaaaatgtacttctacatagaaaaagcaaaatgtttaaaataagttaattgagtacaaattgttgaattaaaaataatataaaccataattgtaatccaataaaattaaaagccagaaaaactaggcccattgaaatcttagttgcaaaataaatgaacatatatcaaataaatacagcccactactgttataaatgcaactaatatactaatgtacatctcagctttgctggccctttggcagaatgttcacacatgaacaccgaatatatttaaagacttacaattttgggctccgttcatatcttatgtaaatgaatcgagagcgataaattatatttaggattttgttatctaaggcgacatgggtgcattgctcaaaaacatgtaatttaagtgcacactacatgagtcagtcacttgagatcgttccccgcctcctaaaatagtcccttagtgggagaccacagataaggtcctcgccgctcaagataggcagatgtgcccgagcgtgggacctcgataaggcggggactatttacttaggcctctgcgtaggccatttactttaagatgcgattctcatgtcacctatttaaaccgaagatatttccaaataaaatcagtttcttacaaaaactcaacgagtaaagtcttcttatttgggattttacagaaggtataagtaagcttcaaatataacatagcctcatttagttaaaatgtttaaatgttcgatatgtttctgtctcactgcgcaatttgttttttcagtatgagtctataaggaatcgaatctattgtgaggaggacccactgtaccaagcccacactcacgtacatgcttacgtataggcccgatttccgctcttttgagatcccaacacacgccccacaaaatttcccattgacccattaacatggaaaccagccacagaaagcgaaacagaagcacacaagaaacagacccccacataaatatgtacataaaacatacatacaaacatacatccatacgtatgcgtgtacaataaaaatagagtttggaacctatcctaacgtatttgttgttattttatgtttcaacaacaacaacctacaccaacatggcaacagttttccattacagcacgcagagagttgaggagagaaagagacagtgcaagagcatacaagcaaccccccagccgcaggcatatggagccctctcactctcgctcatggtggaaagtaggagctggttgggaggggagtagtggtgtagtaggcctgaaacgaaaacgaaatcgaaattaatctctctaacatagacctgaatctgtacaacaaaaaagtaggtcaactgcggcagcgtcgtcgccatacacacacacgcgcgcatacacaaaaacacacacagcaacacactttcacttattacattattcaggccccaaaagccgagagaccgagagcggccgcttgtgggcgaaacttgttcgtgctgccgctgtcgccgtcggctgcgctgccgtcgtcgcagtcgattatttcatattgaaagcaaaagtgatctgtgagagagagcgtgtcagagagagcttctcccagacccacttaaccccccagcgcccctctttgtagccggcttgtcaattaagcattggggaaaaatgttacaaggtttcgtttcaggttaagacgagttttttgtttctctcttttcggtttttttttcttatattggttttttttcaagttttgtatgaacaaattttgtgttttctaaatttagctccagtgtgtgtatgtgtgtgtgtgttggtgtttttgttttgcttgcgatgacgacaacgcaaagacggcaagaagaagatggcataagataggtgtgtggggaggagggcagaaggggccgagcggagcaacgttgctttttcgactcgtttttctttctttttttctcattccccccagtgcgtcgacgaaataaaataagtgacctgcctcatttgaaatttgtttgcgggcggctggcagcgtttttccttctttttttttttggacatacagacatacgtaaatacatatgaacgtcttgcgatgcaattgaaaaggttggaggttgcgtctgcggtggggttaaatggggggtggggatttgcgcggttgtcgactaacgatcgcgtatagcaaaatgtctgggaatgtgcgtttaattgagtgcttgctttcctatgcggaattcaacaaattattagaaaattcaatcgatcttgtttaacttctagaaagggttgcagttaatttaaatatttaaataaaaaaaaagtaaagttctcttttgtgcatcaatcattttaaagttttgttgttaactcattaactataccatttatttacttttacgatctttgtttttttaataaactaaattttccagcatatgtatgttgttcatgatactgatttttttaaaatcattacagaatatacatataatgttttagagaagtatataaaagtctaatttttgtaaacatatttaaatagacaaaaaatactgcatattgacattaaagggaaataagtgtagatacaatttgaaaaggtatttcaacttgccaccaaataattcgtacttgccacattattccttctataatgcttagtaccacacaatccaaaagtcacacagcgctgaaaaatggtcagcggcatacaaatagccaaagatacgacaaaaataacaaatgtttccagaaaatcaacacacaaatctcgaactccttaccccagagttgccaaaaaaactgaaaacatttggcaatcgtcacataaattaaaatgtccagccccgaatcccaccgtttgtttccctcaaattgttcagaattaagccatgaaaattaactgcatattgcgtaaaaacaaaaccccgcacacaacagtcgtcgaaaaaaacaaataaagaaaaccttcgacggctgacaaaatgaccagcaaacctcaatatccgaatcggattccaaatctgattcagtgaccaaaataaaaacaacaacaattgtcaacaattttggtgacttttcgtatgcggtgcacgttccaagtaaattttatacgtttaatgttttattatgaaattaaacgaaggcagttcgccgtcagtcggtcaatccctcagtcattccattccgtcagtcaatcgtcagtcagtcagtcagtcggtgtccagtcatcgcaacaaatatccaaaggtccaaaaaaaacccaaaataaaacagaatacagttaaaacagttgaaaaatttgcggtgcttttttccaccacacgacattaacatttgtgccaccagcgcaggcgacaaatcgccggcgatttttggggtctttggggggctggctaatgttttgtcttcttatgttttggcagtcaagcgcgagcttgcgcacatttttcggccagttaaatgtgctgccaaaacgccgacaaaagcgtcgcgtttgatttggaaatgtcaagctaaaactccagaaagtgcgaggaaaaaaatagaataaatactacttctatctagatgttttttttatctaaaaagttaaattactatctttgcagtagaaatcctaaaaataaccactatgtgtacacctgtccctaaagttgcatattctatttcaaagttggaatactatttactattaagttacagtttcccagcttcttaccatttgaatccagccatgcagcacttgacattttggccgcctgtgcccactgtacagtgaggcattttgagactgaaactccagcgattgacaaacgactgtcgaaaaagtcattgcgcatgcgcacaagtcaaaaaggcaaacgttaacgcaaacgaaacaaaacgagaaccaacgccagccgccagcggacccaaaagagttaaccgatctttttttggtgcatacatatgtatttatgtacgtatgtatagacatgcacatacatatagacggacatatttgggcaacggttacacggagccatttaaatggagtagcgaagtggaagctgatgctgatgccgatgcaaaagtaggtctcctctcgcacactcggatactcgtatctctcgttcgctatcagccaaaaacccaagcgaaacccaaacctgtttggctggcgctgcctggaatgaatcaaacgagaccgagagtgagagtgaagcagggcctacagcggtggttcgacaaatagtggctttttaaaatagaacttttaaatgcaatgactttatattgttgaaatttttttttttgaaaaaaatattagtaatttgtttttgggaaaaatttaaaatgttatagtactaaaaatattctattatccagttgataagtattgtattatccttaaagaattatgcgtggaaaaacttaacatattttattactttttctttctcaaggatatgctctcaaaaattgggttagtggaaagcattgcctactttctagggaccaactgagttgccttttaaggattcccaaattatattttttagtttgattaaagtcttaactctttttttcttctttcttttttttataataattatagttttatgtaaatttcattgtttgacgtaatcattccctttattggcacgtgtaatacttatttatcaaaatcaaatttattttgttaatttggaataaattaaagaaagtattaaaatttaagaatatttttgttgtaggaaaatacatggattgagaatttaaatacaccattgctatttgaacaacctcaactgtgagtgagttgtgcctttggcattcgtgtgtgtgtgcattttgtcattacctgctgtccatatgatcacagatccaaagacttgttggctacggtcacgaacattttttcttttatttttgggggaaggaaatgaaaagttgccttagtcttttgttttccgtttctgtactttttcttgggtaaacttttgagtgcgtttggttatttcgtaagatcaccatacacacatatagcatatcggagttgttttagtggagcaatggaacgatggtggagtaggaagagtaggagaagggggcggaagaggaagacagagccgcgtatcagtctcaaagttgcgtcttctttcatctttggtaattgagcgttgaaatgttgtaatccccccaacctacatgaaggtgtttcagttttttctttgctactctttttcattttttacgcaaacagaaaagttgggagacagagacacgttttcacgtgcatcgttgaaagttcccccttaactgcattttatgcacttttcttctcatcgggtttttagggtttttcccccttgtatgtttctggggctcttttttatttcatttttttttttaatattttcggcatttatttttgggactcatgactgttgcattttaatggtggtgatgggcccctttttcgcttcatcgccttcagttccgttttgggttagttaaggaatcggacttgggacttgggttcggaccccggactcttcgggagtgaaagtttattttgccggccacgttttaccatattgtgggtattttatgcatgtgtttcatgctcctttcggcggaatcttatgcaatcgctggggtttctgcttttaatggcctctccatcgcagggcttgcgtccttatttggattcgtggagttgttaaaatttggctttcttaatgagtgatttagtcgaagtttttcgccgtacgttaattagccgtaaaatattacgtatacgcaacgctaattgtttttttgttttttttttttgggacggtgaagcgagacagatttgcagacgatataacattaaaatcagttttggagtgtaataaaattgtaaaactttaaataacttgaaagcattaaacaaaaatacaaaaccacaagaccacccatgtcaaaaaataattacattcaataaaaagaaataataaacgacgaagtaaatcagagaactaaatttgataccatatcaataaaaaatggaccacattttaaaccacattttaaattttataaatttataaataaatacttgatgtagtgtaatacatattatttaaattagtcaaaaagaatgaccagcttacaaaaattccccatagcaacttaattatgtttttttttttgaaccgagcggcccaagaaaacccaagagacacaataactttatattaaaccagcaaaaagcccaaagcaatacttattaaataaaagcatgaataagcgaaacaataacaaaaacatagaaataggaaacgaaaacgcgccacatgaaaaccgtgtcatgaacaaatgcaacaaaaccagcaaaaaaaaaaaaaaaaaaaaaaccaatgagaaacccacaaactaattgagaccaaaacacagacacaaaacggaaagaaaaacgaagaaactaaaccaagcagctgcagtggcaacaaaacccaaaaatccaaagcacaaaaaatcgtacaaaaaactgctgaagaagagaccccaaaaaattcccagtttatttgagtgagtaagaaattacaaaatagccacttgaaaagttaaggcttaaaggctttcataatgccatacccacagtggaggatagaaaaatatatacgacttctatgactgaaagcgaaatttgttttctttgttaattcaagcaaggtctaccaggtctaatatttatcattgaagtattaaaggaatatttgacatttcatttaaaaagtcaataaaatttgtaaactgcagtttattaaagaaagagcaactttgtatacatgttattaatgttacttaaagcgatcctttaatttattaactataaagaaaacatatctgtaccataccttttaaaacatttattgaaaaaatagtaatacatagtttaacttaaaaagttgactttatgatgctgaaaaaaatttaccatttcacttgcctacgactgtgcaaaagaatgacgtactgttgttgcactgcaaggcggtgaacagtggctcaaagctatgccaaaaagtttcactttcgctttccgtttgggtttgagtttgagtttcaacagcaaaaacaaagccccaaaaaaaaggggggcactaagtcaagccaagcagcgctgctcgctctctatttggcaagagagagagagagagtgagagagcgaaaaagaatacaaaggcagagagcgcagcttcgttgaaagtgaaacgagcgagtatccgagcgacccgccgagcgtatacgtaataaccgaaatggccgactgagagcgagagtgacgccgtcgggggcagcgacgccggccgaggcagaggcagcgacgccagccgagcagcgtattgcggtatcctcgccgtttacttgggtttagtcaatcgagatacgtggttgatgttggtcgtgtttttcgcatagctatccacttataaataaatatatatatatatacatgcaacaacaacaacacacacatagatgacaaagcgttacacctaacgaaatattgttaacaacaaattgcgcgtgtgagtgacccaaatatcgatcaaaataaacaaaagagccattgcgaaatagataaaaaggcaatcgaattgcatgcaccgaatacaatacaaatacaaatacaagcaaaattgaagtcaaacccaattgcacctcacccacaccagcagaacagcccaaggattatgttctcttgctgcgttgcgtgagagtgtgtgtgtgtctcagtgcaacagtgcatcagtgtgtgtgcaatgcaaattgtttaaacaacaaatccgattcccacatatagtgcaataaattcgtgacccactttcaatcaaaatacaaaagtgaaaatatactaagcaagccaaaaagtgtttatacatctcgtttcaattcaacgcacacaatcaagcttatatataaagtatataaaaaagtcctacctctatccaggcaaaccaaccaaaagtttataaagaaatcatcctttttgctgtctactctacatataaataaatatacatacatatatctcactcacctcgtcaaagtacctgcaaaaaaaagtaacaatttaagcaaaagtaaaattaaaaataaacaaagcaaaaaggaaaacatcttatcaaatgcaaaataaatgtcaaggaacacacagcgagtttgttaaatgattttcttgtaaaggaaatcgatcaattaacaataaaaaattacacatcttctaaagaaccaaacaattccaaacatttataaaatacatttctttcaaagaaagtaaaacataaatagttgtaaaagcaagtaaaacaccattaaattactgtgttaaacgaatattaaatatgtcaagatattacgatacattttaactatcgacgttgaaatcaaatacaagcaaatacaatttgttgtcagaaccccaaatattctgttcaacaattggccttaacaatgttgcaaataacaaatctgcaaaaattaagtgcaaaaaccagaccaccgtatgttaaccgcaacctattttactaccaaatttaaaccaactctgcaacacaagtgctggtaattgagccaactaaagcgaaaaacaatttaaccttccgtccaggaaataaaacaacaaaggataactcttcggtcttctaaaaacggaagtttaaaaccgaaaccgaaaaaaccaaaatcactcgccttgaattctacgcaaaataaaacgtacatgaaatgttattagaaatggatcagcaacaggcgaccgtacagtttatatcgtcgctgaatatatcgccgttcagcatgcagctggagcagcagcagcagccctccagtcccgctctggccgccggtggcaacagcagcaacaacgcggccagcggtagcaacaacaacagcgccagcggcaacaacaccagcagcagcagcaacaacaacaacaacaataacaacgacaatgatgcacacgttctaacgaaattcgagcacgaatacaatgcctacacgttgcagttggccggaggcggtgggagtggcagcggcaatcagcagcaccacagcaaccacagcaaccacggcaaccaccaccagcagcagcagcaacaacagcaacagcagcagcaacatcagcagcagcagcaagaacactaccagcagcaacagcaacagaatatcgccaacaatgccaatcaattcaactcctcgtcctactcgtatatatacaatttcgattcacagtatatattcccgacaggctaccaggacaccacctcctcacactcgcaacagagcggaggaggcggtggcggcggcggtggcaacctgctaaacggcagctccggcggcagctccgccggcggtggctacatgctgctcccccaggcggccagctccagtggcaataatggcaatccgaatgccggccacatgtcctccggttccgtgggcaatggcagcggaggcgctggcaatggcggagcgggcggcaactccggtcccggcaatcccatgggcggtacgagcgccacgccgggacacggcggcgaggtgatcgacttcaagcacctgttcgaggagctttgccccgtgtgtggcgacaaggtgagcggctaccactacggcctgctcacctgcgagtcctgcaagggattcttcaagcgcaccgtgcagaacaagaaggtctacacctgcgtggcggagcggtcgtgccacatcgacaagacgcagcgcaagcggtgtccctactgccgattccagaagtgcctcgaggtgggcatgaagctagagggtgagtccaaagttctatttattcgttcttttatgcataagcaaaagttaagggatttattagatcggaaaacatttcttaggctactagaagattaggcaatctttgatgggattcccaaaattcagttatcattttggcaaagaaagagaatttttaaaagaagaaacgtaattcaagttagcggattcatattaaatatattgaaactagggaagcgtttgcagcctaatatatgtataattgtatgcctaaaatctaacgatgtatctactatattatttatatattaaaagaaccacaccttatgattttcattatatgtagtgatttcataccttctagatcattttagactccgtaagagtcagctttaaccaaagtcacgtattttccctgaccctcgacaacaatttgtttacaacgttgcgtatgtgtgatgtccctgggggagcaatataaaagtcgctcttatttgcatttaacattgaaaatttctagaaatcagatatttataagttgacactgagtatttaagcctagaaagaaaataaatattttacatcagattacaactcaatgatgatgttcgtatattagtaagaggtacaaaaaagttagtttctttcgagtttatgaaagtatacgaaacggtgttattgctggatcttagtgtattaaggcttattaaaaagtcccagtgtgtactttgtattatttcatctattttaagaaaaatgaatcataataaagttaaaaacttcttaatttatgctggtaggtagaaaactttctaaagttcaatgtagataaatgtgtgtttttaaagatactttaaaacacgaaacgtcattgttcctaatagattgttctgaaatgaatttggtaatgtttcataatgaatcagttaacaaagttttacttagattgttctgcagtgcatttgatattgacgtgatatttcttagaaagtaaagaattatcatttaacaattactcgaattccttgtttctagttttcctggtagagaaaagcggaaagcgatatttcgcctattggcagcctcaaccatgaccccttttttccgtattacgagtttcgttttgtatggaagtgcatataatataacagggttcgtctcttgctggcagtttttggcattcggttgtactgcttttggcagtaaatgaaattaaatcgatatttcttattatttataaatgtgcaggcacaaaacgtacaaatcaggcagctagcactgaaattctttggggaattgtttccgctgcaaataaggaactttaaagcctgctgttcctatgggagaatttccagaattcaaacatttgagaaacgactgtctcggtcgaagtgagtgagtgattcagcaaagattatgcaaaagtgcattattgatagcctacgcggtgctgtgctcccatttcagtcacataaacaacggcgttaaaaatgtattaacaaatacgtatgtatgtatgtatatgcggccatatcccagacctatcccaattatttgttttgccgcctgtctcgttattattgttgttattattgttgagtaggtcggtggtcagtctgcgtttcgtattttcgatgtacttggctctgtcacgtcttaatgacgccagcttttgtcattgctgctgttgtcactgcgtcaacattttttgtccgccttgtttttttttattacacaaaagtactgtctctcatttacctcgttctcatttacctttgcctgtatatttttatatttttgttgttctctttttttgcttccagcatgtagaacttactatgtatctcgttgatttaagtatattttacattttatatatattttttttttaatttttgaacgaataataataatgaataatcaatatggaaaataataatcgttttgtttcccttttttaaatttcctttttgaaatatggagtaattcttactaaaatttgaagtacctactcatttgattgttagtctgatcaaagcttagtttgcgaaaaggtttaagccaccattcatatttatttcattgaaatttaatcccgctccctgtattatttttgcatttaccttcttacttgcataattactgctcatctcggaaaaaatgctccccatttacccaccctttcccttttcccattttttttttgcgtaagtcaaagttatttaagggaaaaacaacttgaaccacactagttgagagggcgccccacaaaccagcatgtgctgcgaatatatgtagtacacagacatgtactgccatatgtactgccatatatacatacatacatacatatatgtttgaaaccccatctacaaatacacatacataaatgcatatatacgtggatccaagtgtacatatattcagagccagtgcagcatgcaccggtcccaaaagaattccacgccctcacccacaaaacaaggctctgcctgcgtcgctgctgcgagagagccgcgagtggagagcgggtaggggggagggcatagcagagcagggagcaaaaacaaagctcgaaaccaaaacacaaaaaagcggcaaacggaaaaagagagacttagtgaagctctctcgccttttttttttacagggcgcactttaaataaggaacataacgtgtagggtctttcgttaataaaataacaaataataaaattgtatcatatcttaatgtttgttctaataagcaattccataaacctgtcaaaggactttccatattttgcatttgttttcttttacgttaatttataaataataggaagtacagtagcaaatgagattctgtatttttttaaaactttaactattgaacgaatatgtgcttctcttgtacttgattacgctgttctcttttcaaaaattgtttgcattttgtaatagatttttcctgactgactgcttttgtggactggattcaaactagcacgagcaatttttgttttgcgtttctgtttttcttttttgtttgttacttatcatttgaaacgctcacttgacttgccacatgttgtgttgtttgtggggcagcgtcaaacaaactgtggaaattattatgcaaagtgtgaaaagcgtgaaaattgtgattgccggacgccgaaattgcttttgggtggagtttttgagccttagataaattgttatttatttgtacataaatgctacaaaatgtaattgaatattgtggtttttattgtaagatcagggaattctcttcttattttaaacagtactgagtaattattgcacgaaaaggatccattagtttccattagtgtactaggtgcattcaagttttatttccatatttcaaaaaagttgttgaatcagaaaaatataataaaataagaaaatattatatccaagaaatgcattttacattaaacattaaaattaccaaatatattttgacttacattttgtaacaacattgtaaaacaattattttaattttatatcaaatgtaaattttgtgatattttttttattttaatgcatgctaaatttcatttaaatctatcaagttgcacttgctaatttctaaagggattggcttacttccgcttattttcatttcccttttggctctcggtgaaaacacatgaccaacaaatattgtccatcaaaattacgagtgctcgaaccaaattcgtttttcatttgagttttacttgttgtcttgtggcactcgctcacacacacacaggcacatttcctcaagcggctctccggtcacccacacatttaaatcacttgagtcagcgggggcagcgcagtcggcagcgacggcggcggcgacagaggccgcaaaaacaacgtgtgtgcaatatactcactcatacgtatatcaatgtatcgccatctcagttccgccttcgtgtacttggcccatagtgccatctcttgcgctcatgacctagattccactgtgcgctggtgtgtgtgcacgtgatacgacaaaatgtttgcctctctcgtcgttttgctgcgtgtaagtgtgtaatcaatgcaacatgtagtgtgatgtgcgcttatggctgtatgtgtgtgtgtgtgtgcgagtgaattttatttttaatactcactgaattattacgaacattttcgcttcgttgtcgtcgtcgtcgtcgtttctcgccttttgcctcttttcgttccgtttcgtctcgttccgtccttccgtttgcctctgatgaaatctctttcgtcagcgccggctccccgccagccccctcagttcacccaccgatttcccagctaccgccgactatatctcccagtcaggctttggctttggtctttataattgcggcaatttttagccgcttttggattttgtgacttgagtgtttttttttttatttcagggggctataaagaccagcgagactttcggcttagctgggtaacatgactcacatggctcgaatgccatatgttttttgttacggaggtagggtcaatagggatttctttgctgctgtcgtgtgtaattgggagttttgcttcattttgttgccaagtggaattattttggttaacaaattgtttgttataatcgcagggattaatagtaatgataggatcatttattcacggaaatactaatctattatggataaggaatggaattaagtacactctattaagaacaatcataataataatatcataataatggatgtttaaagaatacgaggcgtatacttaatataacgtatacgacacgttctatgcataactacattcgtttctcaataaaaacgtaatggtttgttgttttctttatctaaaagtaatatgctttattgaacggggaaaggtgtgagttatggaaagacggcagtatttattatttattgcccttaatccttaaatgctctttctttgccaaaagcttgaaaattactatcccaaaaattaaacaatcttttacataatagtaactattattattattatagttattattattattattatattattataattaactttgatattcttaatgctacgttacgtatacacaatatttataacaattcccacttatcgattaactaactatttgtaaactcaaaacaatttgtagcagtggaatagttagtcattaatttaaaacacacacacacacccaacatccgctaggctgaaaaatataccagaaaataacgtatacgcaccactggtgccaaattagtgtttaccgaattgcatatgctgcgagcagctttaaaagtaaaggcaatactctaaaacgcctacaaaaacggcaagtgacaggcctcgtattgattttcccgttgtgtgagaaatttcccaaaaaaaaaataaaagaaagggtgaaaaaaaaggaagggccggaaggtgggaataactttcaacaaacaattttgtcgcatacaaattgaaccacttaacccctctcgaaaaaaacttccaacaaaaaggtgaaaatctaaataaaagccgaaactgaaagtgaagaaatgtcgctaggaaattatgtaagagtcagcttaacaaaaaaagatagtaaatggatcaacaaagtagccggaaaaaatgcgaagtgaacgattttatgaactccataaattccctatcgattgacgattagcgattcgtatttctcgtattttaccttgcccaacataaatagacttgatactgagccggaaaaaaggaaaaggccataaaatagcggctgtaagtcgtccacaaatacagataactttcccaacacacacaagagagcggtgagagtgtgagagagagtgagtttttctttttgggagagttggcaggcaacaacaatgaccgtgttgtcccagttttcacacacactgtccttgacctactccactcgacagcaacaacaaagttgtctaatgcggaaagcctctctgtctttgacgctccctcgctctttttcgggttcgcaggtgtgcctgtgtgtgcaagtgtgtgtgtgtctgcagggagagaaatgtcgtaatagaaagctctttcgcgttgccaagccaaaacataatcaaaagagagagccgcaactgcggcgtttgagagcagaagttgcagaggccctctctctctctaacacgcacacaaacttattcaaatgcatatgtatgttgattatttgtaaacaatacgcttgacctaaattacagttacttgttcgccgcactaaaactgcatatatcaatgcttgtgttcgtattcgtattcgtgtgcttgtgtgtttggattttaatttttccccttgccttcggatctcagatgcatattttatggtggccacctgctgcccattgccacccactcgcgcgctttttttttgtgtctttgtttttgtgctacgggtgtgtgaaaacaacccccgacaattgcatcttgtaatcaacatggcgctagctgcaatcgcaatctgtttttggcttaagccgccaccctcgcaattctcatttacacgtagagaaaatatctaacttaacgccgcaatataaaggtgttactttttaaataacagttttgttgtatttgttttcacaacttttgtagaagtagaagaggtaatataatatttaaaacgtagttgctaataataactacgatttacatgtagtaaaatatattatcggctgttggtaggaaatctacttatcacttttccaaattagagataatgaatacaaaactttgattttgacttttgtttcctatgaagttgatattccaacgattttatttctctgcacactttacgctcatttttcgtgctgcgccataagaagcgcatttttattgcgtttcatttagcgtgttctcacacactaacgcaagtaaatacacagatgtgcgttgtacagtttttgttttactactgttgtacaaagcggcgtatgcgcaatatgtgtatgtaaccatatttcccatgtgcgtgcccatatgtgcgtatgcatgtgcaccctgctgttgatagtgtgcgtttgtttctgtgaagcgttgttatgagttggcttttaatgaggagcatgtatgaaacgaataggatgctaaccccctcgcgttgcaattttgccagcccgaattgtgggtcagttaagtgggaaatgttgaaaatgttcaaaattgtgtagaaccattgaaaatcaacggggaatgggtgtttcatgaaaactgggtgctcattaatttgtttaactattttacattgctaagaatatctgtttatttcctagtttaggaacttctccgattttcacgaaggttcccgtagtcaacaaatcagatttgagagataagggaattttgttaggaaattgagaacagaattaattcttttaccaagaatcattttctacttcgaaactcattcatactcatttgcaaatgtgttttcttgcagctgttcgagcggatagaatgcgtggtggacgcaacaaattcggacccatgtacaaacgggatcgcgcgcggaagttgcaagtgatgcggcagcggcagttggcgctgcaagcgctgcgcaactcgatgggtccggacatcaagccaacgccgatctcgccgggctaccagcaagcatatccaaatatgaacattaagcaggaaattcaaatacctcaggtgagcgatgcgatcaggattgtttttctcaataatacttttggtcgttttgattgctttcatcgttgtcatcgctttggcatacaattgatatttaagatttatggaatacaacctatagttatgaacgaatttctgcttatatcttcaggtatcctcactcacccaatctccggactcgtcgcccagccccatagcaattgcgttgggacaggtgaacgcgagcacgggcggtgttatagccacgcccatgaacgccggcactggcggcagtgggggcggtggtctgaacggaccaagttccgtgggcaacggcaatagcagcaacggcagcagcaacggcaacaacaacagcagcacgggcaacggaacgtccggaggaggaggtggcaataatgcgggcggcggaggaggaggaaccaattccaacgatggcctgcatcgcaacggcggcaatggcaacagcagttgccacgaggctggaataggatctctgcagaacacggccgactcgaaattgtggtatttagcccaaaagccagaacaaaactcaatgaatattcgaactcaaaccaaattaaacgacaaacgaacttcaacaaacattgaaaagaaactttcgttacataagcatatttgtggaaaaggattcaacctgatcatgcagcaagtgtggaaaagggcagtcatatcaatataataatcaatataatataataattagacttgaaaaaaaaagatgtattgtaaaaaatgtacaaaccttgaacgatttccttgtacagaagaagagtatatacatttaattggaaatatttgtattcattatcagatattatatgagcttcggtttctatatttaaatatatatctgataatgatattatagatctccaattaaagtcttcatcaaactgcccttttacgaattgcttagttatcacttgatgagctctccaattagaagtgatctgaactttaatttataacttttcctatatcttttgttttctaccaaaaagcttcgattctggcacacatccatcgagcacagccgacgcgctaatcgagccattaaggtgggtttttgctggcgtaaattgaagtcttgagatccatttaatcacattattattcatgcagagtctcaccgatgattcgtgaatttgtgcaatctattgacgatcgggaatggcagacgcaactgtttgccctgctgcagaagcaaacctacaaccaggtggaagtggatctcttcgagctgatgtgcaaagtgctcgaccagaatttgttctcgcaagtagactgggcacggaacaccgtcttcttcaaggatctgaaggtatggaccaacaccccgatatcctcacatcgagtaaatcaaaaatcagaaatcagaaatcagaaaatcagcaaacacagacagcagcaacatggttcaaagccaaaaaccagttttcaaactaggggccaagtctgcggcatgttatgtaaaccaccgacaactgaaagcgacgtcgacagcgacgccggcagaatgtgcattgaatttcgatttcatttggcgtctgacctacttagccagcaaagctgaaccagtcagtcagccaagcagcagcgtctctcgctcaatgacgcaactgatgtgctcacccataccacagcccatcaagagcggagaaactgaaacggagactgagacagagacagtgacatagagcgaaaccgagagaatccccaagagaaagagacgacgtgttgtaataccagagcatccaaaactaggccttaacttatctacataccatatcatcatacaaaatgtatctattgactattgagcgtgcggttgctactataaactgaaactaaactgagatcactctatttaaaaaaacatttaaaaaaataagtaaatctactaaaaattattgtatacgaaaggtttattggttcaaatgaattagctatcattattagaactactaaaaggaaaattgtattaatattattaatcagcaaaactgatgattgttgtatggaaatatgatgatggaaatatctatatgatgtatggaaatatcttattatcttattaattaaaacggcttttaaaccttctttatgcatagtggcaaccgcgcctgttatgtttaagtcttttttcatttccaatttactaataaaattttatttatattttttaatttaggtcgacgaccaaatgaagctgctgcagcattcctggtcggacatgcttgttctggatcacctgcatcatcgaatccataacggcctgcccgacgagacgcaactgaacaatggtcaggtgttcaatctgatgagtctgggtttgttgggagtgccacagctgggcgattacttcaacgagctgcagaacaagctgcaggacctgaaattcgatatgggcgactatgtctgcatgaaattcctaatcctgttgaatccaagtaaggccgtataagttgcgcggtgcagattgacaaccttcttaaacccttgaatatttcccataggtgtacggggtattgtcaaccggaagaccgtctccgagggacatgataatgtgcaagccgctttgctggactacaccctcacctgctatccgtcagtgaatgtgagtaaaggattcagttttaatgtgtagggtatctgagctaaaaaccatttacttttgaaatcatttgtaaattgcgtacaaacaactctaagcaacgattctctttcgcctaattgcaggacaaattcagagggctagttaacatcttaccggaaatccatgccatggccgttcgcggcgaggatcacctgtacaccaagcactgtgccggcagtgcgcccacccaaacgctgctcatggagatgctgcacgccaagcgcaagggatagaggccgggagaacgtgacacggaatacttaatcatttatgaaatgtaaataacaaggcgggaaggccctcggggcaaccgggtcatggaaggcgaacgaaggatacagcagaattccgtattatgaatatgggaatgcatcatcactactaccaccaactatcacacctatacacacacatgcacacatttgttgattcaatgttaattattattacgtttacggttaggtctagtttacgtttaactaattaattaatttgtcttaaattaattcgtgttttatttgtagtccctgataaagcaattttaaaacacttgaacctaaacgagaatatgtagtagatgtatggatttaaatttaaatacggcaaggagaaacacacttttttaggcattacaaaacaaaagaagcatgagaaattttatttttatatacctatatgaatacgatacttatggatacaaatctatatatatttttatgtaaattggcgtacttttagcgtcctacatattttttaattagaatttggttatactatagttttgaaattagtatcgttcccacttgaagatcgattcttgtatttttttgcgccaagtgtcttgcatagtatttgcgtctaatctaatggcaacaaaaaaaatattggaaaatccatacaaagaaaatgaaaacaaagcaaatttaggtgttcatggtatgaatgtatgtgtatattataattgtaatttcatctaagtgtaagaaaacaatgcaaacaactacctacaacaagataatgaagagcaagaaattatataaattaataaaggtcgtgttaaaaactatatagaaaatatatacttacatgtatatttaaatttagcagcgagtttcaactatttgtaaatttcaaccaagatgtaattgtttcaatgtcaacaacaaacaaattgtaaagcttatatttaaaatacaaaatatattttgtgcaaggaaagcgataaaatccaattataacaatttaaaaaaagctgtataacactttaaaactaaaagtaaaagatgtttagtcatgaatttgggcaatgaggcggaaaagaaatcgaattaaagaagaacttgaatatt

SEQ ID NO: 7904 - DNA, 3713 bp, DROSOPHILA
atggataccttcaatgtacctatgctggcggagagcagcaacaccaactatgcaacagaagctaccagcaatcatcaccacctgcaacatcagcatcagcagcaacattcacatcagcagcagcagcagcagcaactcctaatgccccatcatcacaaggatcaaatgctggcggcgggcagttcgcccatgctgccattctattcacacttgcagttgcaacagaaggatgcaactgcaacaataggacctgcagcagcagcagcagcagttgaggcggcaacaacatcggcaaatgccgataacttcagttcattgcaaacgatcgatgccagtcaactggatggaggcatctccttgagcggcttgtgcgatcgtttctttgtggccagtccaaatccccacagcaatagcaacatgacactaatgggcactgccacagctgcaacaactaccactaccaacaacaacaataataacaacactaacaataacaataacaacaacgtggaggctaagacagtgaggccatcgaacggcaattcggtgatcatcgaatctgtgacgatgccatcgtttgccaatattctatttcccacccatcgcagcgccaacgagtgcattgatcccgccctgttgcaaaagaatccccaaaatccaaatggcaacaacagtagcataattgtgccgcccgtcgaatatcatcaattgaaaccacttgaagtcaattcgtcgacttccgtttccaccagcaacttcctgtcctccacaacggcccaattgttggactttgaggtgcaggtgggcaaggatgatggccacattagcaccactacgaccacagggccgggctctggatcggcatcgggttcaggatcgggatcgggatcgggatcaggatcgattgcacgcacaataggcactgcaacgcccacaacgacaacatccatgagcaacactgccaatccgacgaggagctcattgcacagtattgaggagctggccgccagttcctgtgccccgagagcagcgtctcccaacagcaaccacactagcagtgccagcaccactccgcagcagcagcagcagcagcagcatcacatgcaaagcggcaaccacagtggctccaatctcagcagcgacgatgagtccatgtccgaggatgagttcggtctggaaatcgacgataacggagaaatggatcagcaacaggcgaccgtacagtttatatcgtcgctgaatatatcgccgttcagcatgcagctggagcagcagcagcagccctccagtcccgctctggccgccggtggcaacagcagcaacaacgcggccagcggtagcaacaacaacagcgccagcggcaacaacaccagcagcagcagcaacaacaacaacaacaataacaacgacaatgatgcacacgttctaacgaaattcgagcacgaatacaatgcctacacgttgcagttggccggaggcggtgggagtggcagcggcaatcagcagcaccacagcaaccacagcaaccacggcaaccaccaccagcagcagcagcaacaacagcaacagcagcagcaacatcagcagcagcagcaagaacactaccagcagcaacagcaacagaatatcgccaacaatgccaatcaattcaactcctcgtcctactcgtatatatacaatttcgattcacagtatatattcccgacaggctaccaggacaccacctcctcacactcgcaacagagcggaggaggcggtggcggcggcggtggcaacctgctaaacggcagctccggcggcagctccgccggcggtggctacatgctgctcccccaggcggccagctccagtggcaataatggcaatccgaatgccggccacatgtcctccggttccgtgggcaatggcagcggaggcgctggcaatggcggagcgggcggcaactccggtcccggcaatcccatgggcggtacgagcgccacgccgggacacggcggcgaggtgatcgacttcaagcacctgttcgaggagctttgccccgtgtgtggcgacaaggtgagcggctaccactacggcctgctcacctgcgagtcctgcaagggattcttcaagcgcaccgtgcagaacaagaaggtctacacctgcgtggcggagcggtcgtgccacatcgacaagacgcagcgcaagcggtgtccctactgccgattccagaagtgcctcgaggtgggcatgaagctagaggctgttcgagcggatagaatgcgtggtggacgcaacaaattcggacccatgtacaaacgggatcgcgcgcggaagttgcaagtgatgcggcagcggcagttggcgctgcaagcgctgcgcaactcgatgggtccggacatcaagccaacgccgatctcgccgggctaccagcaagcatatccaaatatgaacattaagcaggaaattcaaatacctcaggtatcctcactcacccaatctccggactcgtcgcccagccccatagcaattgcgttgggacaggtgaacgcgagcacgggcggtgttatagccacgcccatgaacgccggcactggcggcagtgggggcggtggtctgaacggaccaagttccgtgggcaacggcaatagcagcaacggcagcagcaacggcaacaacaacagcagcacgggcaacggaacgtccggaggaggaggtggcaataatgcgggcggcggaggaggaggaaccaattccaacgatggcctgcatcgcaacggcggcaatggcaacagcagttgccacgaggctggaataggatctctgcagaacacggccgactcgaaattgtgcttcgattctggcacacatccatcgagcacagccgacgcgctaatcgagccattaagagtctcaccgatgattcgtgaatttgtgcaatctattgacgatcgggaatggcagacgcaactgtttgccctgctgcagaagcaaacctacaaccaggtggaagtggatctcttcgagctgatgtgcaaagtgctcgaccagaatttgttctcgcaagtagactgggcacggaacaccgtcttcttcaaggatctgaaggtcgacgaccaaatgaagctgctgcagcattcctggtcggacatgcttgttctggatcacctgcatcatcgaatccataacggcctgcccgacgagacgcaactgaacaatggtcaggtgttcaatctgatgagtctgggtttgttgggagtgccacagctgggcgattacttcaacgagctgcagaacaagctgcaggacctgaaattcgatatgggcgactatgtctgcatgaaattcctaatcctgttgaatccaagtgtacggggtattgtcaaccggaagaccgtctccgagggacatgataatgtgcaagccgctttgctggactacaccctcacctgctatccgtcagtgaatgacaaattcagagggctagttaacatcttaccggaaatccatgccatggccgttcgcggcgaggatcacctgtacaccaagcactgtgccggcagtgcgcccacccaaacgctgctcatggagatgctgcacgccaagcgcaagggatagaggccgggagaacgtgacacggaatacttaatcatttatgaaatgtaaataacaaggcgggaaggccctcggggcaaccgggtcatggaaggcgaacgaaggatacagcagaattc

SEQ ID NO: 7905 - protein, 1198 aa, DROSOPHILA
MDTFNVPMLAESSNTNYATEATSNHHHLQHQHQQQHSHQQQQQQQLLMPHHHKDQMLAAGSSPMLPFYSHLQLQQKDATATIGPAAAAAAVEAATTSANADNFSSLQTIDASQLDGGISLSGLCDRFFVASPNPHSNSNMTLMGTATAATTTTTNNNNNNNTNNNNNNNVEAKTVRPSNGNSVIIESVTMPSFANILFPTHRSANECIDPALLQKNPQNPNGNNSSIIVPPVEYHQLKPLEVNSSTSVSTSNFLSSTTAQLLDFEVQVGKDDGHISTTTTTGPGSGSASGSGSGSGSGSGSIARTIGTATPTTTTSMSNTANPTRSSLHSIEELAASSCAPRAASPNSNHTSSASTTPQQQQQQQHHMQSGNHSGSNLSSDDESMSEDEFGLEIDDNGEMDQQQATVQFISSLNISPFSMQLEQQQQPSSPALAAGGNSSNNAASGSNNNSASGNNTSSSSNNNNNNNNDNDAHVLTKFEHEYNAYTLQLAGGGGSGSGNQQHHSNHSNHGNHHQQQQQQQQQQQQHQQQQQEHYQQQQQQNIANNANQFNSSSYSYIYNFDSQYIFPTGYQDTTSSHSQQSGGGGGGGGGNLLNGSSGGSSAGGGYMLLPQAASSSGNNGNPNAGHMSSGSVGNGSGGAGNGGAGGNSGPGNPMGGTSATPGHGGEVIDFKHLFEELCPVCGDKVSGYHYGLLTCESCKGFFKRTVQNKKVYTCVAERSCHIDKTQRKRCPYCRFQKCLEVGMKLEAVRADRMRGGRNKFGPMYKRDRARKLQVMRQRQLALQALRNSMGPDIKPTPISPGYQQAYPNMNIKQEIQIPQVSSLTQSPDSSPSPIAIALGQVNASTGGVIATPMNAGTGGSGGGGLNGPSSVGNGNSSNGSSNGNNNSSTGNGTSGGGGGNNAGGGGGGTNSNDGLHRNGGNGNSSCHEAGIGSLQNTADSKLCFDSGTHPSSTADALIEPLRVSPMIREFVQSIDDREWQTQLFALLQKQTYNQVEVDLFELMCKVLDQNLFSQVDWARNTVFFKDLKVDDQMKLLQHSWSDMLVLDHLHHRIHNGLPDETQLNNGQVFNLMSLGLLGVPQLGDYFNELQNKLQDLKFDMGDYVCMKFLILLNPSVRGIVNRKTVSEGHDNVQAALLDYTLTCYPSVNDKFRGLVNILPEIHAMAVRGEDHLYTKHCAGSAPTQTLLMEMLHAKRKG

SEQ ID NO: 7906 - DNA, 13920 bp, DROSOPHILA
actgaaaatgccgagttaatggtttctgcaaataggtacgactctagtgctatgtaagacctccaattgttttcaggcccatcaagcgagttagataccattgtacataaaactagcgagctgtggcaattcaaagatgtgattttaccgaatatatatacaggcacatgtattcctttgcaaataactaatacatagaacaagtatatatatttggcctagatataacacctatgtataatttcccatcccctcacacagactagactaaattaatcgctctccacatgttcttgcaactaaatggaacggcgagtgcaacttgtaggtgaaactatttaagtcataagtgcatattattaagacacaagagctcaaaaaaggctgttcaaagtgagtaaatatgaacgaatttaacgtttttgaagatggcaatgcaattgctggataaattaataactaggcatgttttaatgttgagtgttttttggtcaaatcataagtacatattttcgagcattggctctttctagaattaagtaaatatattaatccagcttaaattgtgtgtttaacaattaacaacaaatagagtgtacatgtgactttaaatcaaacgatttcccgttggaaattttttatccgtctatttttgatgtccattctaatcttgaatgaaatatgatcgcataaatacaatacgcataaataagaaaccacaggagagcaccatttcagaatttcaaacgaaaaacaaataagtgtaatatttcttctcagctgaaacacactatttactatatagttagttatactactatttaacaacgcttgttctatgtgattgatcagcccaactgcgatacccaaaattttgtgactgctccttggagatcttcatcttgtattactcataagcgcacagaattattagtgtttttatcttcttggtgtttggtgtctaataaagaaaagcgaaaaaaaagcggaagtcctctgtaatgttggtatatacatgtttattcaattagatatataatttataatcgtaccatttcagtattcttttcattacaattagttctcctcatttacttagattgactacacaattggatattaattaagaagattgtttggttaaacttaaattgagttgaataatcgattcggtttataaaatattatggttaaaatacaataagttctcttccgatatggcgacaaagatattaggaaacctctagaaaactgcatttaataatttctttacgatttaatacacattggtccaacgcagatttaattttagttttgtttggagctgctcatcgaactccactcagaatctcaggtccgtagacattttctgagaagagggattcggtaagattgcattgccacgatttgtcgattgttatataaaaggattgggggccgggggcggggcgagtagttaacaattgctagatcatatataattgttattgcaatgttcaacatctaggcacaaaatatattgcttctcaattggtatgaaagttattgcaaagtcgttaagcgtcgagggacccaaggccaagcccctcaactgtaaaacaaaataataatacgtagtgtgtctgcgctttgtttgttaggaatcatcatagtacgaaggtcgaaatgtttatgtgggagacacacgcttcgcgggcgagttgctcagcagggccgcctccttggctcgctcgtgctcgtcctggaagaatatcttggtgatgaccacgtcgccggtgctcagtgtctgcgattcggcgtccacgagcttcaccacgcgcttgtcagtcgttcgcataatgggcgtcacactccgctcgccctggcaattgcagttcttaatgctgaaagcattacatttaatgagttattatatatagagaccaatattccaatattcagcactaactttttggatttctcgcgtataatctgtagattctcggtggtcgcaatgctcgaacctaattgctcttgcatagaattagaagctataatctgcagaaataaaaaggcattaaaggaggtgtaaccaactattcaaattcattactaacttgttcacatggcagcgaggtggcagtcgtcagaatggcctccagcttgtcaatacgggctatgcgatccattgacttgttctggagaatctcttccagcatttgcatggattcagtcaggctgggtggctctgaactgaagcgtggcgaaaatgtgcccgaaagcgagttgtccgagggcaccgaatccaaactgggaaaggcgtcgttctcgttcggctcttgttcatcctcggagtcactttgatctctggaagtacaaatagagttgtcagttggatagctatttgatttgaaatcgatagaacccacttgctgggattgccggcggactccatcttctccagcttcttcgccaccttgtagtagcccttgaggcgctctttctcgtcctctgtcagatccatatacctgtaagttatgaacaacttcgattaacatgagtcaaattaaaatgtacatcactactaaccgcagcaagcgtatctcgcgattggagagcacaatgctcttgctggtctgggccagcttctgtttgagatcggacacctcggtgctgaccttgcgctgcttcttgcgtatcttgacctcgttgggtttgatctgcatgagtatttgctcggtgcacagctctgagaagagagcccgattctctggcttgatctgccgcgccaggttgccgaatagctgatcgtggatgagcaccaggacatcgcccgctgcgtacagcatcatttcgcgtgtgaggggtctcttcgcccagaacttctggtccctgcggtagatctgcttcaactgatccttgatcgggttgcagggagcgttgtactgctcgcacagcgagtttaacgatatgtacttggccttgtagacctgcttgccgctctcctgatactgcaagatggcatgtgcggcctgggtgtcgaacacattccgcagcaggatgccgaattgcagataaaggttggcagcgtcgttgcggcagtcgtgtataaccttgatcacctggtcgtgctccaacacggtcttcaatccgccatcggttaccatcgccgggcaggactgcacgtcgaacaagaaggcttcgccccgcgttgtgccaatctcaatcagggtgatctcgcccttcaggcccaggttaatgccctcgcagtccagggagaccactatgctctcgttcttggccgcatacttcagtatgatgtcggtcacaaacaccgactgcttgacattcgctatcaccgtggtgttctgcagcacctttatcttccaggtgtcgccgacaaagtaactatgactaggtgagtggttggcattgttcggattcgcattcgagttgctattggcgttatttgcagcactaccggcattttggttcgaactcgaattggctatggaatgcacgggactggcgtgcggggaaatgggcccgccctgctggttggccagcgattgcttgtccttctccaggttctcggccagagtccgtataaccagggtgttgatgcgttgcttcagcgtttggttaacactattcaagcgctgctccgccggattctgtgtcgcatgctgcggctgctgctgctgctgcgtttgcacttgctgcgtctgctggctggagttattaatgggcccgtagcaggtgttcgcactgggatagttgttctcgcacagattctccagcttcagctccgacatgggcacgtagctgtcaaagccagagctgggctccgacttgggctgcccgaacccctggctctgtccacccatcacattcgaaacgggcgcatttagcttgaagtttgggcaggcaatgctgttgttgttgttgttgttattgttgctgccgttgctcccattgttgttgttcgtgtgaccattagtccgcagtgccggcgactgcagtctctgctgcaccgagctgacacctccaacgcctccacctccaggtgttggctcctgctttcgaatgctggcactgttgttattgttcagcgcattaaattgctcccgggtttgagcctgtgcctgctgaatgtgcgtgtcgctgagcttgggcttctgcagcagggtgactagattggcctgtatgtggaagcagtcggcgaagagcttgaggaatgagctcaggtcgcccggcgtcttgaacatgcgcagccactggtcctgcgggaaattggtggtcagcaggtggaacaactggtccaccagcaacggtcccttgacctcgatgcactgcgcaaagaagtccagcatctgctgcgtgcctcgagtatcgatgttcgactgcggcaggtggaggcgatcccgcgccggcagatccgtcatgttctcgcagcccaccagcatcacatagtcgtccgtcaccttgaaggtgtccgtgtgcttcatcaggaagtcggtgaactccttgatgtgctggcctgtgtggaaaattattggggttaatggccgtttttgatgcataagtaatcatagtccaggctgccactttaaatgttaataaagactttacttttgttcataataatcgatttaattcccgtcggttcgcatttactccattagttttgagtggcagccgtgattgtgaacacctccgtccgttttcgtttcaaactcacccgatatgtgacgcacttggggcgacgcctgcgaccggtggcccaggagactgcggacgggcacctcggcagccgctccgtactgcagcatcttgttcttgaagtagtctttagcctcttggatgtagtcccgcttgcccccgcagccgccatcgtccgcgttgtggtgctgataggcgttcacctggacgtagtcgccgtcaaccagaaatatggccgggtactgggcgaggaacttcttcagacctgtcaatcgccggagcaaagatgtcaattacaattatgtggccattagaggttgctcccactgctgcgagtgagtggctaatgcagtaaaagtgttgcagatacgccagcgtaattaatttactttcaatctgtcaactcgcaaagtgcgccaagatgcttaagtactcattgtagcatagttggttaattcccgggaacaactagatagtttcaactaccgacttcaacaactggattgtgaaaacttttctacgattcgtgcttattgtatcagcgggaagcatgtgcctggattcccataattaacaacattgtttaatcgcataaccatcaaatgacgggtggctcacatccatccgcatgtgccacatgtacatatggagatgtctacgtatgaataatcatgagtgttttgtgctgcctgcttctatgctgttgatttggtttgtaaagttggctaaagtttctggattcaaagttagtttacaattgcatgaatgaggcaaactctgctctgactttcatgttgcactgggagaataaatgtgttcatttcaatgataaatcacctaggtaacacaaaccaagtacaagtaattctcaatgttaattagatgcattttcgcatctgtaagagtaataataagtcctaattgttcgtctgaatttgtttaacatagtattcaaattgcctatttgttctcagtgtagctccaaccgaatgaaaagtgaatgcactcaggccgtggaaacgactgactgagctagcgaaccatttatttgataaatcaggtcatactcatagttgccgccgcggcttcccaaaacggggcatccataccagaccagacagcccaacccaccacttccagtaccgcttccacctccacctccacctccacctccagctcatcatccgcaattggtaggaatgcgatgagcagtattctccatgtgtcccattgtgccagcagcagcaccctccctccccccgcccacatagccatctgttgtgctcggcattgtttggttttgggtaatatgacgtgacaagacaacgcgcagcgatggatggatcagaggttttgttgcgtgtcactcgaatttggctccatgatgccagacatgaattaattcgattgcatttgacataactcggctggctgtaaagtcgtataaggaagcgagagcactgattgctccagtcggactggcaatatgcaaggtatgagctagctgaattgccgacggatttggctagtcagtcgcggggtaatccctgggcaaacatccccatacccggctgccaaatgagccacaaaactgacaaatggctagtaatttgcagcgcccaaaatacggaagagcggaaaaaaaaacggcaaatcctttcgaacgtaattcaattttatgtttacttagagaaattgaaatttgtggaacaaatcgaagttcatggcatttcaatattaatatttaccgagggcgtacgcccagcccgagaatatgtaatgtaatgtgctcaaatatatagacaactcggccacttggcgggctaatatttgaatatttgaatattttgtgtttgtatttgtctgcggctgtgtgcttagccgcaattcttggcaagcaaactgctttggcaacacccgccagccgcctgccgaccgccgaccgccaaagtggatgtggagcaggtgttacggatttggggattcttggggggcgcaactctgccgcattttacggctcgacccacttggacacattttttgcggtggcaattttcaaatgcaccgaggacactggccataaatttatgtatatttatgccttgccgcttattgaagaaaacgtaaaacgaaaagacacgaaacgaaatgaaagcatttccccgggatgttgtgaatcgaaatgtaagtggagagcagccaggtaaagggttatgcctggccgtaaactccggattttatgactcacttggggttactcactctgtgggccacatcctccaatgtagaacgttcccagggtcgtgacttcattaggaactcattagtgccgcctcatcacagcgtcctggctgtcaaaacggttagcgatcaattagaaacaaatggcacaaagttggcaaataatgagtgccacactcactttcgccttaaacaaaatgtttcgccctttgcgattaatgtcaaaaatcaatgcgagttccatttactttgggaaaaaagcaaaagtcaacttaagcataaagaccttggctgcacacacgcaatgccgggaaatgtggagcttcaacgggggtatttccttggtggatttccgggggtttcaagggttaaggggttgggagcaacggctggcaggcgttaaaggatttccttcgctcgacataaaatcgttaaatttacgacaatgtcagaaattcaaatgcgtggcgaaaacgcaaaaggttcgagcgaaattagctggcggatcgatcaggcaatctatacaacttttggttaaaagttgataatcaatagatttaagtatgttattcaacttaggttttgtgattatattccattgaattttagacagcactctatcttgattttctacttttcgcatagcgaaataaaccaactcagccattagttacaaaattgatttctgtgtagcttaagtatttatttcatttgctttgacaacttttgcctgtccgtgtgttttgtttgctttggcaatcgattacgcaaagcgaaaaaaaaaaataaactaaaaaacccacacagagaaaaacatttgcgaaccttcgcaaaaggcttggcctgtttttggtgcgaatgccttttctatttttcccagctgcttgtgtgtgtgcaattattcaaagccgctggcaagtcaaaatggcaaaacgataaactgggctaaatggttgtgtttacttctggcaggccgttaaattagcagcgaaatttaagctcgccattaacgagtttcagttcagtttagcaaactctccaaaactgtttgtctaacccaataaacgccgttcgagtttctcctcctgcccggctagaaaattgctttcaacgttaatttcccggagatgtttccccaccagagaaccctcatcaatcgctggggaatatgcatggtggcacacacacacctccatttattattgaagcaacaaatggatgtggtcttcagtccccagaatatcatgcaattttattgaaatttcaattgaacatttttgtcacgtaatcgacacttttctattacaaagtttccgccactcccccaatcccccaatccgttcctggccaaaaaccacataatggctgacttggatggccgactattgtgggcgggggtgcaaaatgctacccatcggccttaacggcttataagttgggcaaacaacacgttgacaaaattgaagaggcataagatatgtttgtgggattttaggtcagtcccgggtggaatgaaaaccgggattagtggccgaaatggatcgaaatgccattggccaaggaactgcttaacgttggctcgatggttccatacttggaacatccaatttcgggaatgcgcaactcactcttctctatttataagccagaccttgacatttcccattcaattaattcagtttcccagtctattcttctaatccagctgcgatttgcgtgttagccgcgtatttccctgaactttctccaacttgtctattgcgttctgggccaaaagtaaaaccagcgctttaagtcacagactaaactattgtatttcggcgaaaatgttgctcacccgaggtaaacaccatttgtcttggcggcagagtcacgcacatggctaaaaaatcaacaaatgtgataaacattttgttaaatgtttgttttcttgttgcaattagccaagtcgaagtcgaagagtgtgacaagcaagagcagtatgggtaattcttgtcttaaacacgattatggccaaaagttgataatctccaacaggtcttagctcataacttggctaaaaacaatcgcccagcgaaagtaatgaccgttttgtgcagctttttacttaaactaaagatccctatcactttcctgccgattttcagaattaaaaaatttgatcatttttcgcattttttataaggggttacatcatcaaattttgcaaaaaatggtcgaaatctaacatttctagctgggaataccactcgatagggaatttcactgcgagttcaggaaggtaggacattccccatttggtcaactactttttattttattcacaaaatactgacaaaaatcttataaaaattatgcagtacatccttaattttattataattagcgatgtcataagaccattatcataaaactcaagttcatgatgattcgctgtagcttaatgatttgctataaatccccaaggtgcggagtaaacaaatgcgtgccatttcctgtggctctttttcaaaaccctcctctccacaagtgagaacatcaaacaaatgtgttcacatatcttcgcctcgagggaaagtgcattgcaccttcccagcacccaacacccaactcccaactctcaactaagtggtagctatttataaaaaccgaaagttgtttgttgcgtctatttttagtcgctcgcgttagttaaccgtgcattttgataaacagcatggccagagttttccatgtgccgacttgtcaatggaagtacaacacgtgtacacaagtcgagaatctcgagaatctttgcctgtttttcgtagaccagttgtaaaccaacacccccatacccatatatccataccacttgtggaaaacacaagggtggagcattatcgattgcagcttggcggctgcaatgaaaggcgataaacccttggcatgtttttgtggtttttggcattgagatcagccgggagatggaaaatgaggaggcctgactgactgactcccctgcggcaactggcaatcggcaaactgcaattggaaatggaaatggaaacggcaatgacatgtgcacttggacgccgaccactcgaaggcaacatgaacaacacaatcatcgactgtgactgtgacgaacaacgcaaacccgcaggtgcacaaatatgtattgtatatgtatgtaccgcagccgaacaagagtgtccaccgttcagtgtccaatgtccactgtacactaccgctttccaccgcacacgtttccaatttcccaggctcggctggcgacatttcaaatgagagcatgaattgaatgccacggcattttcagcgcactttccttgactttattcgatccagttttttgattaaagagagctgttttcaattcaatcaatatagcaggcctcttcatttttatttcagttgcattttggctatatggatttgcttgttgcgaagtgtagttactaagtgctggcttagttagtgcgaacttacccgactgactgccaccggcgatttggcgcatctccttggtgaactccttgttgccgaattggcaggacaggtcgtggacggtgcggggctcgcccttgtccagcagtcgctccaggaagaagagcaacgtcatgttgcgtgccatctcgtactccatggactccattgctgggcctgctgtgtccgctattcgctatctgatatctgctagctgctctctgctatccgctatctgctcaattattaatccgcccgagtacgtcacgttggctgcttatctgcgggtagaaggaggaggaaggggagagcgttagtgaggtgaaatggccaacacttatgcaatgcgccaagaaagccggccaaaagcaaaagacagggcagaaagtagccaaaccgcaggcacatattagatgacactgagagaaacaagggtttaccctactcaaaatctttcgcatgcccacttttactttactctacgatggttcataatcaacatgatttttttctctctgtacagcttcgtttcgttatttatttaatacatttgcactttgccactgtcgctctctctttcctgcacgctatgtgcgtctcactcgctatctcgacacttgtcccatgccattgcattgtttttgtagctcgccttgcactagttgaaaatattcgaggcaacggcgggcagttgcagagccataaactttgttttgcttcgtgaataattgaggagcacagactcaagcgagtaaaacacgtacgaaggagttgctaccgttcctaggagctgcgacttccgtactcttgcggcatgtccttgcgcgccgcttgaaagtttgaaatcaactggcagtttcctgcttcctgcgcccacaacataaacaccggcgaattcagccagctgactgtgcggcgaaagaaggagtccacgtcacggcgaattggcatcagtgttgccagctgagaatttcgaaaccgccagattcggtgactgaaaacagtgaaaactcgctaagccacaattactacttagcatcgaatcgaaagtaaataatcataatatatctgctctatatatctttcatttaaaagcaagagctaatctacaaaatcaaattaccgtaagatcgccagacgattttctatctagcgatgttggtctgtatgggaacgcgccaattggaatttgcatgggattagtgcaaataagactctgagcacaatgggatttggttggacttttcgaatggaattcggtgggaatcaaaagttggcgatcaaaagttggcacctcgacgggactaagggtatatataacacgttttaatttgtttgttgctgcctctgatttttgccgccgattggcatgtgaaaagtgtcagcgctgcagaacaggtgattgacacagaaagaaaggtacaaatgtgcagcggaaatggaaaatgaaaagcgccagctccctcccaggagtgcatattactatttttcgccaggccgaacagaatttgccactcattattgttatccaacaggagggctgcccaagccaataagaagtgcaggtgtagctgtgttcgtgctttccaattgataagcagaaaccgttgacaacaaatatgtattgagaacggcaacaacaaagcacacacattccaatcagccaataactgtgcgcgtgtgagtgtatgtgctgtacaggtatttgtgcgattgtatgggtggcaaaacaagaaactccagccacaccgataaaaagaagagtcttattagaagcgaaagaaaggtaaaacaataaaggagaagcgaataatatctggcagagaaaacgcgcaaaatatgcaaaagaagagcagctgtaattacctgtcggttaatcacttgtttgtttcgttcccttctgtttgtttaagtgcacttgtgatctgatctatatttaaaccgattgacacacacgcgatacagatcctcgcgtttgggatttctcaccagatctgcgttcagatcttagtttcagcttttcttgccactggcgatttccaattgggcttcaattaattaacatttttcggcgcaattaacccatacacttgcagaaaaactgcgacgaaagcagttagttattttcgtagctgtgttgctgctattgtattgttgttgtatcactcacactcatgcacacacatatgcgcgctggtcaggtaggttacgtatgtgtgtgcgtgtgtttgttaggcactttgaactgaatgctggtaagaattgtaaaaaccacttgttgcactgttttaaaggcactcgtccaattggagagtggcgcacgtgaatttgcgattcctgccggttggcgggcaactgaaacgcactcgctggcaggtaaaaaaacagacaattgccacggttttcggagcggagcgatgcgatacgatatgatgatgacagcgccaacgcgaacacacgaacaccagcgcagcgaaaaacaccaacgaatcgaatttggatggcgggcggcgaagcgaaggcggtggctggtgtggccagtgcacggccgaggcgggaataccactgagcggcaacgttggtattttattagccgggtggcaacgtctcgcggcgcgactgttaagcagtgtgaccgtttcgtttcgcttcgattcgaaattggatttcgaaatcattttgaaagattgtatagattccttagaactgtttatggtagttcagtaattattaattcagctttaatcacacgaacctcttccattaaagagtcaaaatcccgccataagcctatctcttgaaccttagtaaaactcgaactccactgcgttcaaggcattgctatcttatattatttttatacatccttcaaaatctctatgaaccaaacacgcatctgttttgcggttatttaaataaggccgagtgctaaagcactgctagaatggctgaatagctattcagtagaactcaaaacaatacccgagctgcctgtgtttgcacacttgcttagaataaactagatctaacaaatccacaattcccccattgttgacttgttcaaacaaatgtattttcgatagtcatcggccaaattgtctcaagaatatcctactaagccacgtgcggcaaatgatgatgattcggagcaaacacacagtctgaaaatgaaccaaaaaaatcgtgggtgatgcgtataaataccctaattaaatgcagagaaagtacagtacttgagtacagtgttcaacggacggagctaaagatgcgattccaattcgtcctggcctttggtcttattgccatcttggcgaccgcttatgctggtggcgataccacaggcaccggcagcacgggcaccgatactacggggaccgggagcacgggcaccgggagcacgggcaccggtagcaccgggagcacgggcaccggtagcacgggcactggcagcaccgggagcacgggcaccggtagcacgggcactggcagcac

SEQ ID NO: 7907 - DNA, 4549 bp, DROSOPHILA
gattcgttggtgtttttcgctgcgctggtgttcgtgtgttcgcgttggcgctgtcatcatcatatcgtatcgcatcgctccgctccgaaaaccgtggcaattgtctgtttttttacctgccagcgagtgcgtttcagttgcccgccaaccggcaggaatcgcaaattcacgtgcgccactctccaattggacgagtgcctttaaaacagtgcaacaagtggtttttacaattcttaccagcattcagttcaaagtgcctaacaaacacacgcacacacatacgtaacctacctgaccagcgcgcatatgtgtgtgcatgagtgtgagtgatacaacaacaatacaatagcagcaacacagctacgaaaataactaactgctttcgtcgcagtttttctgcaagtgtatgggttaattgcgccgaaaaatgttaattaattgaagcccaattggaaatcgccagtggcaagaaaagctgaaactaagatctgaacgcagatctggtgagaaatcccaaacgcgaggatctgtatcgcgtgtgtgtcaatcggtttaaatatagatcagatcacaagtgcacttaaacaaacagaagggaacgaaacaaacaagtgattaaccgacagataagcagccaacgtgacgtactcgggcggattaataattgagcagatagcggatagcagagagcagctagcagatatcagatagcgaatagcggacacagcaggcccagcaatggagtccatggagtacgagatggcacgcaacatgacgttgctcttcttcctggagcgactgctggacaagggcgagccccgcaccgtccacgacctgtcctgccaattcggcaacaaggagttcaccaaggagatgcgccaaatcgccggtggcagtcagtcgggtctgaagaagttcctcgcccagtacccggccatatttctggttgacggcgactacgtccaggtgaacgcctatcagcaccacaacgcggacgatggcggctgcgggggcaagcgggactacatccaagaggctaaagactacttcaagaacaagatgctgcagtacggagcggctgccgaggtgcccgtccgcagtctcctgggccaccggtcgcaggcgtcgccccaagtgcgtcacatatcgggccagcacatcaaggagttcaccgacttcctgatgaagcacacggacaccttcaaggtgacggacgactatgtgatgctggtgggctgcgagaacatgacggatctgccggcgcgggatcgcctccacctgccgcagtcgaacatcgatactcgaggcacgcagcagatgctggacttctttgcgcagtgcatcgaggtcaagggaccgttgctggtggaccagttgttccacctgctgaccaccaatttcccgcaggaccagtggctgcgcatgttcaagacgccgggcgacctgagctcattcctcaagctcttcgccgactgcttccacatacaggccaatctagtcaccctgctgcagaagcccaagctcagcgacacgcacattcagcaggcacaggctcaaacccgggagcaatttaatgcgctgaacaataacaacagtgccagcattcgaaagcaggagccaacacctggaggtggaggcgttggaggtgtcagctcggtgcagcagagactgcagtcgccggcactgcggactaatggtcacacgaacaacaacaatgggagcaacggcagcaacaataacaacaacaacaacaacagcattgcctgcccaaacttcaagctaaatgcgcccgtttcgaatgtgatgggtggacagagccaggggttcgggcagcccaagtcggagcccagctctggctttgacagctacgtgcccatgtcggagctgaagctggagaatctgtgcgagaacaactatcccagtgcgaacacctgctacgggcccattaataactccagccagcagacgcagcaagtgcaaacgcagcagcagcagcagccgcagcatgcgacacagaatccggcggagcagcgcttgaatagtgttaaccaaacgctgaagcaacgcatcaacaccctggttatacggactctggccgagaacctggagaaggacaagcaatcgctggccaaccagcagggcgggcccatttccccgcacgccagtcccgtgcattccatagccaattcgagttcgaaccaaaatgccggtagtgctgcaaataacgccaatagcaactcgaatgcgaatccgaacaatgccaaccactcacctagtcatagttactttgtcggcgacacctggaagataaaggtgctgcagaacaccacggtgatagcgaatgtcaagcagtcggtgtttgtgaccgacatcatactgaagtatgcggccaagaacgagagcatagtggtctccctggactgcgagggcattaacctgggcctgaagggcgagatcaccctgattgagattggcacaacgcggggcgaagccttcttgttcgacgtgcagtcctgcccggcgatggtaaccgatggcggattgaagaccgtgttggagcacgaccaggtgatcaaggttatacacgactgccgcaacgacgctgccaacctttatctgcaattcggcatcctgctgcggaatgtgttcgacacccaggccgcacatgccatcttgcagtatcaggagagcggcaagcaggtctacaaggccaagtacatatcgttaaactcgctgtgcgagcagtacaacgctccctgcaacccgatcaaggatcagttgaagcagatctaccgcagggaccagaagttctgggcgaagagacccctcacacgcgaaatgatgctgtacgcagcgggcgatgtcctggtgctcatccacgatcagctattcggcaacctggcgcggcagatcaagccagagaatcgggctctcttctcagagctgtgcaccgagcaaatactcatgcagatcaaacccaacgaggtcaagatacgcaagaagcagcgcaaggtcagcaccgaggtgtccgatctcaaacagaagctggcccagaccagcaagagcattgtgctctccaatcgcgagatacgcttgctgcggtatatggatctgacagaggacgagaaagagcgcctcaagggctactacaaggtggcgaagaagctggagaagatggagtccgccggcaatcccagcaagtgggttctatcgatttcaaatcaaatagctatccaactgacaactctatttgtacttccagagatcaaagtgactccgaggatgaacaagagccgaacgagaacgacgcctttcccagtttggattcggtgccctcggacaactcgctttcgggcacattttcgccacgcttcagttcagagccacccagcctgactgaatccatgcaaatgctggaagagattctccagaacaagtcaatggatcgcatagcccgtattgacaagctggaggccattctgacgactgccacctcgctgccatgtgaacaaattatagcttctaattctatgcaagagcaattaggttcgagcattgcgaccaccgagaatctacagattatacgcgagaaatccaaaaagttagtgctgaatattggaatattggtctctatatataataactcattaaatgtaatgctttcagcattaagaactgcaattgccagggcgagcggagtgtgacgcccattatgcgaacgactgacaagcgcgtggtgaagctcgtggacgccgaatcgcagacactgagcaccggcgacgtggtcatcaccaagatattcttccaggacgagcacgagcgagccaaggaggcggccctgctgagcaactcgcccgcgaagcgtgtgtctcccacataaacatttcgaccttcgtactatgatgattcctaacaaacaaagcgcagacacactacgtattattattttgttttacagttgaggggcttggccttgggtccctcgacgcttaacgactttgcaataactttcataccaattgagaagcaatatattttgtgcctagatgttgaacattgcaataacaattatatatgatctagcaattgttaactactcgccccgcccccggcccccaatccttttatataacaatcgacaaatcgtggcaatgcaatcttaccgaatccctcttctcagaaaatgtctacggacctgagattctgagtggagttcgatgagcagctccaaacaaaactaaaattaaatctgcgttggaccaatgtgtattaaatcgtaaagaaattattaaatgcagttttctagaggtttcctaatatctttgtcgccatatcggaagagaacttattgtattttaaccataatattttataaaccgaatcgattattcaactcaatttaagtttaaccaaacaatcttcttaattaatatccaattgtgtagtcaatctaagtaaatgaggagaactaattgtaatgaaaagaatactgaaatggtacgattataaattatatatctaattgaataaacatgtatataccaacatt

SEQ ID NO: 7908 - protein, 885 aa, DROSOPHILA
MESMEYEMARNMTLLFFLERLLDKGEPRTVHDLSCQFGNKEFTKEMRQIAGGSQSGLKKFLAQYPAIFLVDGDYVQVNAYQHHNADDGGCGGKRDYIQEAKDYFKNKMLQYGAAAEVPVRSLLGHRSQASPQVRHISGQHIKEFTDFLMKHTDTFKVTDDYVMLVGCENMTDLPARDRLHLPQSNIDTRGTQQMLDFFAQCIEVKGPLLVDQLFHLLTTNFPQDQWLRMFKTPGDLSSFLKLFADCFHIQANLVTLLQKPKLSDTHIQQAQAQTREQFNALNNNNSASIRKQEPTPGGGGVGGVSSVQQRLQSPALRTNGHTNNNNGSNGSNNNNNNNNSIACPNFKLNAPVSNVMGGQSQGFGQPKSEPSSGFDSYVPMSELKLENLCENNYPSANTCYGPINNSSQQTQQVQTQQQQQPQHATQNPAEQRLNSVNQTLKQRINTLVIRTLAENLEKDKQSLANQQGGPISPHASPVHSIANSSSNQNAGSAANNANSNSNANPNNANHSPSHSYFVGDTWKIKVLQNTTVIANVKQSVFVTDIILKYAAKNESIVVSLDCEGINLGLKGEITLIEIGTTRGEAFLFDVQSCPAMVTDGGLKTVLEHDQVIKVIHDCRNDAANLYLQFGILLRNVFDTQAAHAILQYQESGKQVYKAKYISLNSLCEQYNAPCNPIKDQLKQIYRRDQKFWAKRPLTREMMLYAAGDVLVLIHDQLFGNLARQIKPENRALFSELCTEQILMQIKPNEVKIRKKQRKVSTEVSDLKQKLAQTSKSIVLSNREIRLLRYMDLTEDEKERLKGYYKVAKKLEKMESAGNPSKWVLSISNQIAIQLTTLFVLPEIKVTPRMNKSRTRTTPFPVWIRCPRTTRFRAHFRHASVQSHPA

SEQ ID NO: 7909 - DNA, 6763 bp, DROSOPHILA
aagtcagtgcaaaggataactatcttaatatctaacttattcacaggacaccaacattttgggattcaaggggccacgcaacatgactgttatactgcccggcatgactgaggacgatcagcgtgtcaagatcagttcggcggatcccaaacagcagggcatccttgacctatggaaaatgaaggtaggcagcataggatattcaaaaaaaaaccacctactaattttcgaatttttaatagaacatggacaacatcgtggagctgcacaataagacgccagtgtggaacgatgaaacccaatcgtatgtgctcaactttcatgggcgcgtcacccaggcgtcggtgaagaactttcagttggtccacgactccgatccggagtacatagtaatgcagttcggccgcacctcggaggacgtcttcaccatggactatcgctatcccctgtgcgccatgcaggcattcgccattgccctcagtagtttcgatggcaaaatagcctgcgagtgagctggctgggatcctcgggttggcccgttgccttatgtacagctgattatctggagtgcggatcaagtcgctccgggcggatcattgttgaaattattatcggaaatctagtcactcgaagtcgggttttggtagaccatcgttgaaatgagtaatgtagttagtagctactcgtatcgcgtatcattgtataacgtatattcagaatgtgctcaccgattttataagaaattatttaggacaggtcctacaactttgtaaatctaaatgtgccccttttagcgataagttcacttgtaagcgattcgaagtcaaggtcatttaaagtaatatcagttttataatcagcatatagcaacaaatcaaggactaatgtaaactatttaaaatgccactactattagtcggtaagagagcactactaacttgtactaagctctaaataaatacaaacagctattgatcaaaaaatgaaactttgttgaaaattcgtttcttgttttatacgtatcatttattttagtacacgtcctaacgttatttaaataaatgcaagaccgtcaggccttcatatataaattacgtaatctatttacaaaaagaatatcagatctcacaatacgaatggcatggtacctgaaatccaatccacacacaaaaattgtataaatatcttcaaaacgagtatatgatcaaagaattacgttaataactaataagtacaacggaattgtgtggaatggaccacatatcttcactttgtgttatttttatcagactccgtatgtctcacagaatgtgggaaccttgcgttccactaactcaactcttgtctttttacatgctcataactgctatttgatttacgctagcttctgctacgatcgtttacgcgatttatgcgttggtcgatcctggggcagtttaaactcaagcggatcgtagtcctcatacgcgagcttgcgctctggcgccgactcaggtaacttgttgattttctgcagtcgtgcaaggacaatctgcaaatgccgaccgatatagtcctcggcgggtgccaagcgttgcgcgtactgcaggcatgcagctgccttggccagccgcttacgttccacgaacaccacacagagattgtgcaagccctgagtgttgtggggatcgtagtgaagtatgctgcgatagcacttctccgcctcatccagatccttcatgtgattaatgtagatgtcgcccagcaggatcagtcctttaacatgcgacggatgatgtcgaatcagttgattcagaaatggcactgcatccaagggccgttttgtatcggccagtagcagagccagattaaaaagtgcactacgaaagtctgcctttaggtgtatagctctcttgaaaaactgctcagcctcgtcgaagcttgactcgtccatggccagcatacccaggttgaagtacaccttttcgttctgatcatcgttctccagaactttgtacagccgagagcgtgacacccggcgggcctcctcgccaccgagttcctgcagcagaatagccgagttcagcaatgcctgttcgtgctccggatacaattcgattgccttattaaaatacacctgcgcctgctggctcttgccctgctctaggaaaactacgcccagattgtagtagatgtctgcattttcattatcataaagcagtgcctgctcatagacctcctgcgcctgagctgtgcgattcaacttcataagaatgtcgccacgattgatgtaagcctgcaaaataaagttttgtaaatatgagcagcactagaaaaatcaaactacaggccttacttgaacatagtcactcctcatgctgatagcctggcgatagagatgatcagcctcctccagacgcgtttgatttttagctatgagattcgccaggttgataaacacattcaagtgattgggagcgatgcgcgcatgatagctgacacccggcttagcttgtggaaacagagccttagcctgaacataggcttgttccgcctctgcataccgcttgagattattgaacgtgcgacccacattgatgtgtgccccgatgtcatcggtctgaatgcgcacggcctgctggaaatagagcaatgcctcttcgaacttcccttcgttctccaaagcgtgtcccacgttattgtacagcttggcgttgcgctgatttacatgcacaccagacatgaacagggagtattctgtacgccaatctaaattgcgttgatgcgttttcagcgcgtgcgtgaggagcaggatagcgagagcagcttgtgaaaaacgttgccagcttaggcttccacggcgctgaagctgctcaaagccataagccaccagcaagcagtaccccatggatggcatgtacaaaatgcgttctgccaccacaaatccaacggggaagaacagattagaggctgggagaaagggcagcaccatccagcccaggcacattataagtgtccgcgacagggccagattgcgggtaaagcaggtcttggcgaccatagcccccaatgccagaaaggtaagcaaagtggttatgttgcgggaatccgtgaatccctgcagcaacggaacagtgcctaaatatagagtttacttgattacattgagcttcttttatactttatggacattactcacccattgtccagtcgcagcagagcagcgatgggcataacagcagccagcagttcaggtaaatgaggtagccgtaggtaagttgtctctcaggagtatccgcagcagaggctggattatcaaaccgcgtaaagatgggtaactgtgaacccatcacgtatacacgtcccaccaggagggtcaacgtgatgccaaccaggaagctcaaacgtttccacagcgtcgacgatgaccagcgtcgaattcccgaaggattcgccagctttggcgactgctgctcggtccgctcgtcaaacaggcgcagcacaaaatggcaaaggtgcagtggccgtagttgatggactacgaacaactcatagaccacgcatatgccggcaatggtgatgccttgctccttgcacagcatggaggccaacaggcaactgccaaagcagccaaaaagcgtcagccaattggtgcgtcgcggacaacccgagtcgccgacggacttcgcgtagctaagaaaggcggccaggaagcaaattgaagagagcaattcagcacgcccgacgacgccagtaacggcctctgtgtgaactggatgcacggcgaagagcagcgaggccacgaaagcgcatgtgttgagctgggagacggatgacgaggatggtgccgagatggcattactgcccgatgcggcacactgacgcagcagcaaccggcagacccgacgccacaaaaggcagaccgacaagtgcagcagcaggttgacgaggtggtatccaaacggctcaagtgcatgcagcaagtagttgaagcggaacgtcagcacggtgagtgggcgataagacttgtgggactgctccttgcgcatcggcgtcccccagaagtcgttcaggaaaacgttgatcagcggagtgtgcggcctcagatccttgttgtccctgattgcgctgatgtcatcgaaaacaagcccgcactgagtactgttgtaatagcagactatgcaggctacgcatatacacaggaactcgagcaggttgcgctgcggcgagtttgtggctccttcccgctcccgttccctcggcaaagtggagggtgcatactgatggattccggggttggggttcgttgacatgttgatttcgcgttacttcgtgaaaggcgtcatgtacccacaattgttcgttcaggcggcgaaatgttgcatgtagggctttacccagccacggtcggcaggtccctagatggcctggaaaaaaatgagaaagtgggaaaaccattagtttaagttaactggaaactaattaagtatacaagtccaccaatttaagtatagacacttcctattagtgagaaagcccctaaatgtaggcaacatacatatctatatattttttttgaaaggggattcccccgagcaacaaaattgtgcagtaatgtatatgtaagccctcgcatcttttctggatacacacccaaatcctcttactttccatagtccttcatccgcaacttaccgattttcccccaagtcaaagtctttttaaagacaaactttctaccgctttttatgagcacttgaagttatacaaagaagcaaaaactgattgcggaaaaaatcaattaatacgcaacaaagtaactccttcccggttactgtcctggttaccgactgcacacacaaaagcccgaagttaacaaagttgtaacccgggcggaccgacagagctccggatccggactttgggtacgcacaagtacaagtatgcggacggagagcgcttttagagaggcgaagagcgcgtgagagatttgtttgcataaactgttgtaaatgttgcgggacctggagcattactaggcggggcacatcggtgggcagatgggcggatgccacaatgttgcactcaatgccatcgattttccgggcgttcagtcaaaacaaaccaccacaagcgaagtaagcgctcgtaaagagcgaaaaaaggggcctagcttcaacgggagctggagaggattgcatctcagctgagcgcaactttgttgcacgaccgacttttcccgaaggacgaccgggcgggcacgtgctccgtttacccttattccattttcccgccaagagcgacacatgcgcggtcccgcatccttgcactttcacttgccaggacgtgcgctctccgtgctcatggctctcccgctcgccgagcgcaaattaatggccgtgtgtgtttttgtaaaattactttgaccgagatacggggcactggagaaggataaggacatggcgatggctatgggcgctggaaccggagagccagccgcatgtcctctcccattttagtgacatggacgccattacaacggcgatggcctcgcacacgcacacaatcacacggccgcaaacaaacccgatttgccaactttgtttcaattcgccaataattacaatgttgcccagcgagtttcgagcaccgtttaacagatgggttctcacacaccgccctgtcgttcacatacttgttgaggtagttccatggcatccaaaactgaattacattttaataaaaatcagtgccaaatgcgcgacttgtacgtggattattgttgtgttatcgatacgccgataggctggcttctcttcctcatccctgccagccattcgcagcgaacacttatcgatacgcggtgatagttattccgtgtgttttcccatctctaacgcgttgtagtaaaggaaaaagagtgggaaaccaaaaattgatatttttctgaaagtctttcaaagttacgctttaaactagaagcaatcatgtccacggaggacttttacctacgctactacgtcggacacaagggcaagttcgggcacgaattcttggagttcgagttccggccggatggcaagctgcggtacgccaacaactccaactacaagaacgacaccatgatccgcaaggaggccttcgtccaccagtccgtgatggaagaactgaagcgaatcatcatcgactcggagatcatgcaggaggacgatctgccctggccgccaccagatcgcgtgggtcgacaggtcggtttgccgcactccgtaactagagctcaactaaacaaccatgtgtctttttcaggaactggagatcgtcatcggagacgagcacatctcgttcaccacctcgaaaacgggatcattggtggacgtgaaccggtcaaaagatcccgagggcctgcgatgcttttactacctggtgcaggatctcaagtgcctggtcttctcactcatcggcctgcatttcaagatcaagcccatataagccgtagccaccacctcaagcatagcctatttatcggacggacacatcgtattttataatggaacttctacgatacttgtaattgtataagctatacctttgtactttttggtacagtttgcagtgaataaaaaaggattggaagatactttgttttcaaagtcttgtgtacagtctagattgtgctatagaagtaaatagcaaatcttcgatgtagtagcagacaacaagtttaacaataatagcaaacacaatagtaaaccatttaacttttgatgttataatgtgtaggtat

SEQ ID NO: 7910 - DNA, 3206 bp, DROSOPHILA
aacaataatccacgtacaagtcgcgcatttggcactgatttttattaaaatgtaattcagttttggatgccatggaactacctcaacaagccatctagggacctgccgaccgtggctgggtaaagccctacatgcaacatttcgccgcctgaacgaacaattgtgggtacatgacgcctttcacgaagtaacgcgaaatcaacatgtcaacgaaccccaaccccggaatccatcagtatgcaccctccactttgccgagggaacgggagcgggaaggagccacaaactcgccgcagcgcaacctgctcgagttcctgtgtatatgcgtagcctgcatagtctgctattacaacagtactcagtgcgggcttgttttcgatgacatcagcgcaatcagggacaacaaggatctgaggccgcacactccgctgatcaacgttttcctgaacgacttctgggggacgccgatgcgcaaggagcagtcccacaagtcttatcgcccactcaccgtgctgacgttccgcttcaactacttgctgcatgcacttgagccgtttggataccacctcgtcaacctgctgctgcacttgtcggtctgccttttgtggcgtcgggtctgccggttgctgctgcgtcagtgtgccgcatcgggcagtaatgccatctcggcaccatcctcgtcatccgtctcccagctcaacacatgcgctttcgtggcctcgctgctcttcgccgtgcatccagttcacacagaggccgttactggcgtcgtcgggcgtgctgaattgctctcttcaatttgcttcctggccgcctttcttagctacgcgaagtccgtcggcgactcgggttgtccgcgacgcaccaattggctgacgctttttggctgctttggcagttgcctgttggcctccatgctgtgcaaggagcaaggcatcaccattgccggcatatgcgtggtctatgagttgttcgtagtccatcaactacggccactgcacctttgccattttgtgctgcgcctgtttgacgagcggaccgagcagcagtcgccaaagctggcgaatccttcgggaattcgacgctggtcatcgtcgacgctgtggaaacgtttgagcttcctggttggcatcacgttgaccctcctggtgggacgtgtatacgtgatgggttcacagttacccatctttacgcggtttgataatccagcctctgctgcggatactcctgagagacaacttacctacggctacctcatttacctgaactgctggctgctgttatgcccatcgctgctctgctgcgactggacaatggcctctaatctgttcttccccgttggatttgtggtggcagaacgcattttgtacatgccatccatggggtactgcttgctggtggcttatggctttgagcagcttcagcgccgtggaagcctaagctggcaacgtttttcacaagctgctctcgctatcctgctcctcacgcacgcgctgaaaacgcatcaacgcaatttagattggcgtacagaatactccctgttcatgtctggtgtgcatgtaaatcagcgcaacgccaagctgtacaataacgtgggacacgctttggagaacgaagggaagttcgaagaggcattgctctatttccagcaggccgtgcgcattcagaccgatgacatcggggcacacatcaatgtgggtcgcacgttcaataatctcaagcggtatgcagaggcggaacaagcctatgttcaggctaaggctctgtttccacaagctaagccgggtgtcagctatcatgcgcgcatcgctcccaatcacttgaatgtgtttatcaacctggcgaatctcatagctaaaaatcaaacgcgtctggaggaggctgatcatctctatcgccaggctatcagcatgaggagtgactatgttcaagcttacatcaatcgtggcgacattcttatgaagttgaatcgcacagctcaggcgcaggaggtctatgagcaggcactgctttatgataatgaaaatgcagacatctactacaatctgggcgtagttttcctagagcagggcaagagccagcaggcgcaggtgtattttaataaggcaatcgaattgtatccggagcacgaacaggcattgctgaactcggctattctgctgcaggaactcggtggcgaggaggcccgccgggtgtcacgctctcggctgtacaaagttctggagaacgatgatcagaacgaaaaggtgtacttcaacctgggtatgctggccatggacgagtcaagcttcgacgaggctgagcagtttttcaagagagctatacacctaaaggcagactttcgtagtgcactttttaatctggctctgctactggccgatacaaaacggcccttggatgcagtgccatttctgaatcaactgattcgacatcatccgtcgcatgttaaaggactgatcctgctgggcgacatctacattaatcacatgaaggatctggatgaggcggagaagtgctatcgcagcatacttcactacgatccccacaacactcagggcttgcacaatctctgtgtggtgttcgtggaacgtaagcggctggccaaggcagctgcatgcctgcagtacgcgcaacgcttggcacccgccgaggactatatcggtcggcatttgcagattgtccttgcacgactgcagaaaatcaacaagttacctgagtcggcgccagagcgcaagctcgcgtatgaggactacgatccgcttgagtttaaactgccccaggatcgaccaacgcataaatcgcgtaaacgatcgtagcagaagctagcgtaaatcaaatagcagttatgagcatgtaaaaagacaagagttgagttagtggaacgcaaggttcccacattctgtgagacatacggagtctgataaaaataacacaaagtgaagatatgtggtccattccacacaattccgttgtacttattagttattaacgtaattctttgatcatatactcgttttgaagatatttatacaatttttgtgtgtggattggatttcaggtaccatgccattcgtattgtgagatctgatattctttttgtaaatagattacgtaatttatatatgaaggcctgacggtcttgcatttatttaaataacgttaggacgtgtactaaaataaatgatacgtataaaacaagaaacgaa

SEQ ID NO: 7911 - protein, 870 aa, DROSOPHILA
MSTNPNPGIHQYAPSTLPREREREGATNSPQRNLLEFLCICVACIVCYYNSTQCGLVFDDISAIRDNKDLRPHTPLINVFLNDFWGTPMRKEQSHKSYRPLTVLTFRFNYLLHALEPFGYHLVNLLLHLSVCLLWRRVCRLLLRQCAASGSNAISAPSSSSVSQLNTCAFVASLLFAVHPVHTEAVTGVVGRAELLSSICFLAAFLSYAKSVGDSGCPRRTNWLTLFGCFGSCLLASMLCKEQGITIAGICVVYELFVVHQLRPLHLCHFVLRLFDERTEQQSPKLANPSGIRRWSSSTLWKRLSFLVGITLTLLVGRVYVMGSQLPIFTRFDNPASAADTPERQLTYGYLIYLNCWLLLCPSLLCCDWTMASNLFFPVGFVVAERILYMPSMGYCLLVAYGFEQLQRRGSLSWQRFSQAALAILLLTHALKTHQRNLDWRTEYSLFMSGVHVNQRNAKLYNNVGHALENEGKFEEALLYFQQAVRIQTDDIGAHINVGRTFNNLKRYAEAEQAYVQAKALFPQAKPGVSYHARIAPNHLNVFINLANLIAKNQTRLEEADHLYRQAISMRSDYVQAYINRGDILMKLNRTAQAQEVYEQALLYDNENADIYYNLGVVFLEQGKSQQAQVYFNKAIELYPEHEQALLNSAILLQELGGEEARRVSRSRLYKVLENDDQNEKVYFNLGMLAMDESSFDEAEQFFKRAIHLKADFRSALFNLALLLADTKRPLDAVPFLNQLIRHHPSHVKGLILLGDIYINHMKDLDEAEKCYRSILHYDPHNTQGLHNLCVVFVERKRLAKAAACLQYAQRLAPAEDYIGRHLQIVLARLQKINKLPESAPERKLAYEDYDPLEFKLPQDRPTHKSRKRS

SEQ ID NO: 7912 - DNA, 5450 bp, DROSOPHILA
ccttctcggcgaatcccttgcgtgtgttcagacccgtacccacagcagtgccgcccagagccagctcatagacgcgcggcagacagcccttgatcctttccagaccgttggtcaactgctgtgtataaccgctgaattcctggcccaaagtcagcggaactgcgtccatcaagtgggtgcgtccgatcttgatgatgtccttgaactcatccgacttggacttgagggcatccctcaagtgtgtaaccgccggaacaagccgctcgttcagctccatgcccaccgaaatgtgaatggccgtggggaaggtgtcgttggagctctgcgacttgttcacatgatcgttgggatgcaccggcttcttgctgcccagttcgccgcccatcatcttaatggccgcattgctgatcacctagtaggtttgccaatggcatggggcaggagaagcatccagctatacacatttctctcgttagccctatctaacaatcttacctcgttggtgttcatattggtctgggtgcccgaaccggtttgccagatgaccaatgggaagtgaccctgtttgtatagcttgccggaaatgacatcgtcgcaggcgcaggatacggcatccgacaccttgccatctagtccgtaatccttgttgacctcggcacatgccttcttcagtatgcccatggcctggatcaccggcatctgcgggcagtttggggattaattggctatggcaaagcacttggtagatgccagaatatgttggttggttggttggttgcctaccggcatacgttcgcctatgtcgccaatgggaaaattcaatttggagcgcatcgtctgtgcgccgtacagcttgtccgccggcacctttagctccccgaaggtgtccttctccgtacgaaacttgccattctccttgcccttgccgcccttaccgccactgtcgcactgcaaagatgccccatgtagccatgagttgccagcgaccattgtcgcgtacttacatccttggcacggaggccactgcaaaccacccagagattgcgcctagccagatgcagaccattgttttgcttcagcattttcaattattattggttctgtgtttccgagcgattcatatacaacaaaacgatctgatctagaaaatcacactgcgattccgatgacagcgatgattgaatgatggatttcgtcgtcggcctacttggctccacttcacttgggtcccagcatctgttcgggtcgcacccagtcgttgaactgctgctccgtcaggtaacccaaattgatggcctcctccttgagtgtggtgccattcttgtgcgccgtctttgcaattttcgcagccttgtcgtaaccaatgtgcggattcagagcggtcaccagcatgagcgactcgttcatgatcttggcaatattctcgcggttcgcctggatgccattcacacagttggcagtgaaggtcctgctgccatcagctacaaaaaggaatagattcgattgatttggcgttccaccaagggtgggtaataggtagcttacacaatagccgaatggagcgcagcacattggacacgatcaggggcttgaatacattcagctcgaagtgcccattggatccaccgatggtcaccgccacctgattgcccatcacctgggcggagagcattgtcagcgactcgcattgcgtgggattcaccttgccgggcatgatggagctacctggctcgttctccggtagcgagagctcacccaaaccgcaacgcggtccggagccaaggaaacgaatatcgttggcaatcttcatcaggctaacggcgatcgtgttgagcacaccatgcacctccaccatggcatcgcgggcagccagtgcctcgaacttgttgggcgcggtaacgaagggcaggctggtcagctcggcgatctttgcagcgcacttctcggcgaatcccttgcgtgtgttcagacccgtacccacagcagtgccgcccagagccagctcatagacgcgcggcagacaggcatcgatgcgctcctgggcgtaggccaattgctgggcatagccgctgaactcttggcccagcgtcaatggcaccgcatccatcgtatgcgtgcgtccgatcttgataatgtccttgaactcctccgacttggcacgcagcgcatcgtgcagcgtcttaatcgccggcttaaggttgttgttcagctccagcgccaccgagatgtgaatggcggtggggaaggtatcgttggagctctgcgatttgttcacatgatcgttgggatgcacgggcgtcttggagcccagtttgccgcccagcagctcaatggcacgattgctgatcaccttgagagttagagagttagaggagatttgagaatagtgcaaatgaaacaaatgaccgctcatgcccacctcattcacattcatgttgctctgcgtgcccgagcccgtctgccagatgaccagcgggaagtggtcgtcgtatagcttgccagagatcacatcgtcggccgccttcgagatcgcctcgctaaccttgctgtccagtccgaactccttgttcacctcggcggcggccttcttcaggatgcccatggcctggaccacgggtttctggcggggattaacgagagttttagttgctttcaatgtgttttcttcttattttttactttacgcaacatacttgtgtgttatgttaatgtagttaatacattttttagactttaactttctatagactctgaattacaatgaacaaactcattgaactagcattcaccatttgttctgctttctgtaatagaagcttaatttaagccatattttacttagtaattagctagaccttgctgctttttgaaccttcaatgctgacttttaaatactttcgaaagatttacgtgagaattatatgtatacgtagatggaggcagtggggggcactacttacgggcatccgttcggtggctccgccgatggggaaattgatctgggatcgcatcgtttgggcgccatagtacttatccgcgggcaccttcagttcgccaaaggtgtcgctctccacgcgaaactcctgggaggcctgtcgatgcgaatgaatccgataagaatggctataattatcagtaagtaaacacaggggcagaccatttcagatgcagatatgacagatagtaagtaagtgaagccaaattgagactatggcaatcagagtgaacaaatcagaggacgaccactcgacgacggctgctgctcgatgttaactgaggcgtgctcgggcattgaaaggcagaggcgataagctagggggattcaaaaccaaaaagccgagtgtacaacgaacagattcttgaaagagcgctctcaacgagcgaacttcccgcagaattggtgggaggtgttgaatgcccgagcactgggcgctgaatatgaaagacccaacttgggcatggggtgcacacagcagggggcacgaaagtagtgcgaggatctcgaactatatttgtgtatatatgtatattgtatgcataataattgcaatagcaattctataaaaacagactgattcgaacttttgcatttccagtgctattcatgtgaccagcgctgttcctcgggatttatgggtggaatttacgccggactgtagctctactatctagtgtcttatatacatatgttttatatgcagcattatctgaataatcggtagtgtattacagtggtcgttcattcatctagtaccatatataattaaccggttttaattcaattgccgaaaaaaaaaaacaagaattcgctgactagcacaatttcttgaattacaactcgtttcgcgagtttatggttctctcttttccctttttttttcaacgccgtgagtttgttttgttttcaatcatgtgatttgagttttgagtgcgaaatgaaaataaaaaacgtttgcgaaaattgagtgaaaaaatcaatgcgacggcttccaattggagtcgcgcgccaattggagtttcgtccacaagtggtcgcagtggtgtgccaattggaacgtccgttccagcgcctggaagtcgctcgcctccgctttccattgtgtaatgattacgaaacgccggcatttgtgcacttttcattggcatttctgctcgccgcgccttgtttacaatcaaaaaaataacatattttggagttattagccgctgcatgggcgaatctagcattacataaggcaaaatatttttgccatctcgctacaaaatatatatccaatttgcacagcacttggaatccttaccagacgcaaacttccaatggcggcccagggtttcgtcatttgttgaacgccgcgaagcgtggagcgttgcaataatggtagcaccatctctatgcttattccttagtcggtaattaataaataagtttgcaagcaagtgatctttcacggacgagcccaccacaacaacaccaacaacaacaaaaaacaacaacagcacctcgatgcgcgggtgagagctatcggaccatcgattgttcttatcgactttgtaacgattgctgcctaagttcataaaaattgagaaacaaaaatcctaaacatttttaagaaacacctagttaccttagtactaactgtaaattcctattccatagctaacaaatttaaaatctgttgatagttctatttgttttttttgaaactacaactatcgatagcagaccgttgcggcactgtatcctatcgtttgtgtgccatccgcaggcgaacagctgttttttcgggaatcgtaacttcagaggaacttttttttagtggaaacaagcctgcaatgtcggcgtttgtgaaaaccgtgtgcttggcccaaaagctgtgcgccgccaatcccgtcgtggctcgccaggcgatccgcagcagtaagtgtgaatcggggctgcgctggcaacagtgcaacctgccccactgttttgtttacgtaacttttgcatgcaccgaatggctacaaattcgaatttctcgccatttacgttttagtggctggctggaataaggactacaagccgggtccgtatccacagacggagaaggagcgcctggcggcggccaagaagtactatctgttgccggaggagtacaaaccgtatgcggacgatggtctgggctacggagattatcccaaattgggctacggtctgggtgtggaggccaaggactcgtactatccctgggactatccggagcacaagcgcaaccaacacgagcccgtaagcgccaacatcaacggctagcagcagctgctgcataaaaaaagagtcaaaccctgatccatttccattgcagatctcggcggatcatgatctgtacagcgaggatcgctggtcgcaggccgaaccgccacgctacagcaatgcgtactactttgcctgcttcctgggcgtgatgtccggc

SEQ ID NO: 7913 - DNA, 1555 bp, DROSOPHILA
cgtgaaagatcacttgcttgcaaacttatttattaattaccgactaaggaataagcatagagatggtgctaccattattgcaacgctccacgcttcgcggcgttcaacaaatgacgaaaccctgggccgccattggaagtttgcgtctggcctcccaggagtttcgcgtggagagcgacacctttggcgaactgaaggtgcccgcggataagtactatggcgcccaaacgatgcgatcccagatcaatttccccatcggcggagccaccgaacggatgcccgccatgggcatcctgaagaaggccgccgccgaggtgaacaaggagttcggactggacagcaaggttagcgaggcgatctcgaaggcggccgacgatgtgatctctggcaagctatacgacgaccacttcccgctggtcatctggcagacgggctcgggcacgcagagcaacatgaatgtgaatgagtcggaggagttcaaggacattatcaagatcggacgcacgcatacgatggatgcggtgccattgacgctgggccaagagttcagcggctatgcccagcaattggcctacgcccaggagcgcatcgatgcctgtctgccgcgcgtctatgagctggctctgggcggcactgctgtgggtacgggtctgaacacacgcaagggattcgccgagaagtgcgctgcaaagatcgccgagctgaccagcctgcccttcgttaccgcgcccaacaagttcgaggcactggctgcccgcgatgccatggtggaggtgcatggtgtgctcaacacgatcgccgttagcctgatgaagattgccaacgatattcgtttccttggctccggaccgcgttgcggtttgggtgagctctcgctaccggagaacgagccaggtagctccatcatgcccggcaaggtgaatcccacgcaatgcgagtcgctgacaatgctctccgcccaggtgatgggcaatcaggtggcggtgaccatcggtggatccaatgggcacttcgagctgaatgtattcaagcccctgatcgtgtccaatgtgctgcgctccattcggctattgtctgatggcagcaggaccttcactgccaactgtgtgaatggcatccaggcgaaccgcgagaatattgccaagatcatgaacgagtcgctcatgctggtgaccgctctgaatccgcacattggttacgacaaggctgcgaaaattgcaaagacggcgcacaagaatggcaccacactcaaggaggaggccatcaatttgggttacctgacggagcagcagttcaacgactgggtgcgacccgaacagatgctgggacccaagtgaagtggagccaagtaggccgacgacgaaatccatcattcaatcatcgctgtcatcggaatcgcagtgtgattttctagatcagatcgttttgttgtatatgaatcgctcggaaacacagaaccaataataattgaaaatgctgaagcaaaacaatggtctgcatctggctaggcgcaatctctgggtggtttgcagtggcctccgtgccaaggatgtaa

SEQ ID NO: 7914 - protein, 408 aa, DROSOPHILA
MTKPWAAIGSLRLASQEFRVESDTFGELKVPADKYYGAQTMRSQINFPIGGATERMPAMGILKKAAAEVNKEFGLDSKVSEAISKAADDVISGKLYDDHFPLVIWQTGSGTQSNMNVNESEEFKDIIKIGRTHTMDAVPLTLGQEFSGYAQQLAYAQERIDACLPRVYELALGGTAVGTGLNTRKGFAEKCAAKIAELTSLPFVTAPNKFEALAARDAMVEVHGVLNTIAVSLMKIANDIRFLGSGPRCGLGELSLPENEPGSSIMPGKVNPTQCESLTMLSAQVMGNQVAVTIGGSNGHFELNVFKPLIVSNVLRSIRLLSDGSRTFTANCVNGIQANRENIAKIMNESLMLVTALNPHIGYDKAAKIAKTAHKNGTTLKEEAINLGYLTEQQFNDWVRPEQMLGPK

SEQ ID NO: 7915 - DNA, 2504 bp, DROSOPHILA
atattcttatgaaatcaacctatttatttaaactaatttttgattattacatcaaatggaatatggctttgcttactaatcgctatgtgagttgttaacccattcgggttaacccttttccccagacccgccaacttggccacccaagtggcagtccttcgagcagggaactcaaatatacactcggtaaatgcataacgggaaggaacaataagcaaatcgttaagattcgctaactttcacactacaatcgccggcaattacactcaaaaaaaaaaataatgccgaaacaggtatggaaaaaatcaaaaaatatatattcattctatttgtttttgagttacttatacgcaggatttaagcagccaaatattatgtgaattggtttatgagccaagattttcttcgatttccttcgactttcactgcattttctttacgtctgggaaaagcttaccaagtgcatagacatatgtgtgagtgaggtgtaggtgcatgtcgtttgcatctgtgcgcgtgtgttgttgccacacttacacccactgccagccactgccacccactgccacccactttcacacccaccgcacaatatatatcccacatatgggaggttatgacttaataaatactccccagtgtgcgcaatgtggctggcaatttaataacaaaggcaaacggcatcgaaataaaaaataaaaagtaaaaagtaaaaaaaaaaaagtgaaatagtaaagcggagcccagagaattccatatgtgcacacacatatgggtgtgcctttgatttactccacaatccacgagggcagcaaatgctgcacggagtctcagttccgccatcctggagttggttccattgaaggtctatttaaacttctaacagagttaagtgaaatccgataattattcaattttatatatataaaaaagtcatatttatatatttgcgaatgcaaccctacaactaagtcaacaaaaatgtgctccaaactggccgggcttagtggtgataggcggcgtagacgggcgccactggagccacggtcttgaccacggtcttcaccagcggttcgcgattgaccacggcattgaatccattgattggatcggcagtgtactgcaccgtgcgcttgaagccatcggaatcgaccagggagtactctccgcgtaccacgtccccgtcgcgctcctccacctggctcttggagtcgcccgagatggcgtcctgcacatcgtaggcgtacttgtactgcggatggggatcgtactcctcatcggccttggccagcaccggttgggcgacggtcttcaggacggcagcgggagctggtgccgcataggtggcaaccggagcagcatggtacaactggccggcgggcaggacacccgcgctggcggcggcgatcagggcgaggagggccacaaactgcaggataaacagaaaaaggtattacttaatgaataaatatttgcatatattttattgtaccttgaatgccattttttataagcttaatttgactgaaagtctagagatgctggtgatttgagcgctgactgctgtttgataagaaattcggcgctggaaacgcctttatagccacaataattcagcaaatgtagcgccgcacttcacttattactcaaatctggaaagaaaaaaaatcaaaaacctaaaacccaaaagccaaagccgaacacaataatgcccaaggccgacattgtggaccttttatggggcaattggatacacttggcaggccgagcaacaaaataataataataataataataatagtagtaatacaagatacacatgtgtgcgccagttaatgtgacattcattcagaaaaacgagacattgtggatattttggcaaactggtttggccaacaactgtccacgttaattacaacagcaattctcccaatgacacaaatcgaaatagattcaacaaaataaccagctcagtgtaataatattttaatcatcatcgtcatcatcatcatctcgaactgtcatcttcagctggagaattcagaaacgacaagtcatggctgagaatttgagcgattgctccagccactgaattattaaggcccaaaaagcagaagtaaataaatgccagtttaaggtatctcacaagattcggtggctgccactttggaactacaaaaaatattagatacctttcttgcaacttctcaaatgtaaaaatcaattgtgtctgagatggcggaaaaacaaacgtacgctcactccgaatttaattacgaatatgagtcgtggattccgacgaaggtccttggccggcaggaggtccttgctaatggtgtaaatgatgcagggccctggctaaatatccgttctatcaaattcaattaaagttgacatgggttcacagctggctttgggttctgcactctgttaggttgggtcggatccctagtccagagtccagagtccaaagtccagagtccaaagttccagtctccagaatc

SEQ ID NO: 7916 - DNA, 441 bp, DROSOPHILA
atggcattcaagtttgtggccctcctcgccctgatcgccgccgccagcgcgggtgtcctgcccgccggccagttgtaccatgctgctccggttgccacctatgcggcaccagctcccgctgccgtcctgaagaccgtcgcccaaccggtgctggccaaggccgatgaggagtacgatccccatccgcagtacaagtacgcctacgatgtgcaggacgccatctcgggcgactccaagagccaggtggaggagcgcgacggggacgtggtacgcggagagtactccctggtcgattccgatggcttcaagcgcacggtgcagtacactgccgatccaatcaatggattcaatgccgtggtcaatcgcgaaccgctggtgaagaccgtggtcaagaccgtggctccagtggcgcccgtctacgccgcctatcaccactaagcc

SEQ ID NO: 7917 - protein, 145 aa, DROSOPHILA
MAFKFVALLALIAAASAGVLPAGQLYHAAPVATYAAPAPAAVLKTVAQPVLAKADEEYDPHPQYKYAYDVQDAISGDSKSQVEERDGDVVRGEYSLVDSDGFKRTVQYTADPINGFNAVVNREPLVKTVVKTVAPVAPVYAAYHH

SEQ ID NO: 7918 - DNA, 5455 bp, DROSOPHILA
cccgatgatgtagattttaaggacagcggaaaaataagctccttgaaggccctgggtccatttatagccggcaaggagaatagccgcaacacggtttacctcagcgatgttccggatatttgcaaggataagccgtgcatgctgggcgtggacgaagcagggcgtggtcccgtcctgggacctatggtatatgggatctcctactgtccactggaaagtaacaaggctttagaggacctgggatgcgccgattccaaacaactaaccgaggggaaacgtgatatcatatttaacgatatcaacaccaaggaatatgcgaccagttgcgttggctgggccgtggagatcatatcgccgaacacgatcagcaccagcatgtaccggcggtcgaagtgctccctgaacgaagtttccatggactcggccatgggccttatccaacaggcgatcgatgcgggcgtcaatatagccgaggtttatgtggatacggtgggtccgccggagaagtaccaggagaagttgctcaaacgtttccccagctttaaaatcaccgtggcgaaaaaagctgactccacctatccaatagtctctgctgctagtatatgcgccaaagttacccgtgatcatgccctcaaggtgtggagcttccccgagggcttggtcattaaggacaacgagttcggcagtggatatccgggagatccggtcacaagaagatttctgaccgagtacatcgatctagtgtttggatttccacgacttgtgcgcttcagttggtccaccgcggaaaacgcactggcggacaaggcctatgacatggagttcgacgagccggattccgagaagcccaagtacgccggcaccaagctcacaaagttctttaagggcacaacaaaatccggcgaaataattcgcgaggagtgccgcttctttaagcaacgccatctggaaagtgtcatggagttttagcaacaaatgaaaataaaattaagttcaggagtatctatatttacaaagaataaagtttaatttaagtactttagtattaaattttaaaatgctaaaatacaaaaaacacccaggcccaaaacgaaaacagattaatttttatctttaatgtatttttgctgatgttcttgtgtttccgccaatctcgtgttcttaataattacgttcgattactgactacgtgggactgcagttacactgttctgaatgtatgcgtgaatcggtctgatctgatctcttggcatcccttttttggaggacaactgtggaattgggtaaaggacttttggtggggagggcggggagttggctggcatctttgatcgatacaataacaaaatgcaaagttatactaaacgattttcgtataaaaagggacgaccttagaaacatggagcttatgattaagattaaaatgaggcgagtcgcatcccgctgatctgaagagaacaacaaccatgttgaagcccccaaaaatcccaggtgcatatcgatattttgtgactcgaaactaagcgtacgaaatagacgtggacaaaagcgggaggatctcatctcaagaggtataccttaaagaactaattagaatttaaagcaattacaaatacgattgcagggcgggatagctaagaaaggagttacctaaggtccggactccagatccaaatcgacttatgttggtagaattgtaactgatcatatttcacttctttaaaaaatatagttaaatgcaatttttgaatcaaaagtaaaaacttctcgttccgtaagaaagtgaaaaactaccgatttcatttttaccaaataatgagctggaaaaggaatcttgactattttaagcgttggctcaatacacgaaatccagttgtggctgctccggcaatcagaactttcgcaggtccaacacgaaaacgctaccgtcggaggcactggcacccaccttagtgcccttggagttccagcacacctcaaagattccgcccgtgcccttgtaactgtgcactagctgtcccgtttgcgtgctccaaatgtgtacgcacttgtcgaagctgccggaggccaaatgctttccatccggactgaaggccaccgaatagactggctctgtgtgcttggtgagcgtgtggatacagctgcccctctccacgtcccacagtcttaccgtggaatcgaacgaagcggatgcgaggatcaggtttgtgtttggattattggttcccggccccgtgggcgaccattttatcgtatagatctcctttgagtgagcctgcagatcgtggcagcaacgatctcggttcatgctccagatcttgagggtcatgtcatcagagcaggacgccagcagttggccctgcggacaccacttgattgcattcacctcgtttgtgtgtcctttaaaggtcttgatgggttcatttacacccaaccggcacacatgtatccgctgatccgtactgcaagaggcaaaggcctggtttgtctgccagtccacatccaaggctggagcactgtgaaaggcaaattgctgggtgcattggcccgtggatgcgtcccagatgatcgtcgtcttgtccacgccagccgagaggatgtagttgccgcacttgttccacttcagagcaaagatcggacccttgtgttgtcccaaagtagaagcaagtcgaccgtcggttttccaaattcgggcgtaaccatcgtagctgccggtggcgagcaaggaaccatcgcactgcaaaaacgagaatagattaagtaaggatcagaaatcaaactttgcaaggcttaagtgccaagatcttcgacttacattccagtccagagaggtgacgtccttgttgctaggcacctcagcgccgcctttctggatgcagtggcgcagcaccaactggttggagttagtgtttgcatcggacatgtcccatatcctagcagtgctgtctcccgaaccgcttgccagtaaatcccggctaggattccatgcgcagataaacacctcgctttcgtggccgcgtaatacacgagccttggattcgggtatttcgatgttctcgtcaatgtccatgggaacaagagctgcgggagtcccagcacctccgctggtagacgaggagatggttccactgggagcagagctttgagcattggacgaaccagactgcacgttgtttccttgggctcctacgcgaatcgtaaccgctccacttggcgcctttgatcctgttgcagtcgaagctccgcccgatgctgctgcgtccggattggaggttgatacagttccaccagcgggcgtcagcccgcttgtaggttgttctacgctgctggaagtgctgctattgccatttgtggatgttgaggaggctgcatcatcggtactggtagcatttgcattgcctgcattgccactagatgagcttcccgcttcattcgagttctgggatttcttttgacttgccccaggtgctgccaaatctccaccagctggtgtgcttgtgctattagatcctccagtactggcctggttccctccagctccattgtttccggcgtatgtgccgccagcattatttgccgcatttccactggagtctacctcgcttgccgactgatcggttggtgtgcttgtgcccgtggtgctgccagcaattttgtttccacctgctgagcccgccactccggtacccggttctatttttatctcaggcttggcattgttgttctggttgccaccggcaggggcagaagagtcgactgccccgggttttcccggctctgttttcacaatgggcttgagtggcttcacctccggcatgacagcgtctattagagagagtccttcaatgggtcgcgccacctcgccgtcttcgcctacgctccactccacttcagtgtacagaagacccttctgcaggatggtgagcaaagcggcaggtggaaccaatgcgccattgatattactttgcgagatgtgtgactcaatgccaaacacgtaggccgagtgcagaaagcctagaaaacgggattgcatgagattagggcgggctgttatcttgcgattggagggttttactcacccgactcctgcaggtatcggtaaaccagaaagttcacctcgtcgctggaaaaactcatgacggaacgcggttggctccttctcctactactagcgcactccaaaatccactcctatctccaatgccaattatgtttttacggtgcgaaaatcggaactgtgctgcgtaacacatgcgtctgcattcggcacgcttatcacttcggcgcaagccacggtatccggtgctactcctggtacttggatcgatctggtcggtcctgtgttttcaattctgccagtttgctgcttgccgcaagagcacttcacatattttttccacaaataaaaccgagggatcgaaaacgcgtttctgaaacgcgcaaaaaaatggcggagtaatctcaaggtgtgcgctgcgagaggttgcgcagccttgtgttttgtgacgtcacaagttttgacaacaacttaatcaaatttgagtcatatttttgtattgcaccaagcgttaccttaaaggatagaacggaaatttattagccataaaaacaattaagaagatatttttggatttctgcttggagcaaaaggtaaaaaattcttaaagcgaattgtcgtctctcttcgtccatccctgtgtacccatccctcgaagtaatcattgtatttcaacccaacgctctactggtcacaccaatcgttccacccgcgcccgctagatggctccactcttaggcagcgagagcgaagaaaaatcaatagaaattttcattttagtgaattgccctgcacttggtaatagttaacaaacaaattagcggcaaatcagcgaggcgaagctccagcgagttggagttccataaagtgcaacacgcagggtcaaacattccgcagccaacaccccggattccgattccaagcgaagccaacttcagaagtcagagattactctctctgctccgccacagaaattccgcaacgctaaccgattttgtccgctggcgagtaaaaaaaatcggaaaagtaagctcaaaaaaaaagaacagctaacatacgcccattaatgtttttggaggcttcttcggtgcttttttttttgggcaaaacgccctcgtcatccagcggtgaaaaaagtgacgtgacatgaaagcaaagaaagaagagaaccgaagagcgcagtgaaaaacagaaaataaaacgaaacggaaagcaaagtaaaaagtatactacagaaacaaaagccggtggtcgcgcaaatccaaataataatgcccaagtgcacatcgacttcgccaggcgataaaaagtgggcgagcgaggtcacagaatctttatcaacgggcaaaacgctgccaagttgaaaataaatcggttgccaaaaatgcgggggtacac

SEQ ID NO: 7919 - DNA, 3312 bp, DROSOPHILA
tccgccatttttttgcgcgtttcagaaacgcgttttcgatccctcggttttatttgtggaaaaaatatgtgaagtgctcttgcggcaagcagcaaactggcagaattgaaaacacaggaccgaccagatcgatccaagtaccaggagtagcaccggataccgtggcttgcgccgaagtgataagcgtgccgaatgcagacgcatgtgttacgcagcacagttccgattttcgcaccgtaaaaacataattggcattggagataggagtggattttggagtgcgctagtagtaggagaaggagccaaccgcgttccgtcatgagtttttccagcgacgaggtgaactttctggtttaccgatacctgcaggagtcgggctttctgcactcggcctacgtgtttggcattgagtcacacatctcgcaaagtaatatcaatggcgcattggttccacctgccgctttgctcaccatcctgcagaagggtcttctgtacactgaagtggagtggagcgtaggcgaagacggcgaggtggcgcgacccattgaaggactctctctaatagacgctgtcatgccggaggtgaagccactcaagcccattgtgaaaacagagccgggaaaacccggggcagtcgactcttctgcccctgccggtggcaaccagaacaacaatgccaagcctgagataaaaatagaaccgggtaccggagtggcgggctcagcaggtggaaacaaaattgctggcagcaccacgggcacaagcacaccaaccgatcagtcggcaagcgaggtagactccagtggaaatgcggcaaataatgctggcggcacatacgccggaaacaatggagctggagggaaccaggccagtactggaggatctaatagcacaagcacaccagctggtggagatttggcagcacctggggcaagtcaaaagaaatcccagaactcgaatgaagcgggaagctcatctagtggcaatgcaggcaatgcaaatgctaccagtaccgatgatgcagcctcctcaacatccacaaatggcaatagcagcacttccagcagcgtagaacaacctacaagcgggctgacgcccgctggtggaactgtatcaacctccaatccggacgcagcagcatcgggcggagcttcgactgcaacaggatcaaaggcgccaagtggagcggttacgattcgcgtaggagcccaaggaaacaacgtgcagtctggttcgtccaatgctcaaagctctgctcccagtggaaccatctcctcgtctaccagcggaggtgctgggactcccgcagctcttgttcccatggacattgacgagaacatcgaaatacccgaatccaaggctcgtgtattacgcggccacgaaagcgaggtgtttatctgcgcatggaatcctagccgggatttactggcaagcggttcgggagacagcactgctaggatatgggacatgtccgatgcaaacactaactccaaccagttggtgctgcgccactgcatccagaaaggcggcgctgaggtgcctagcaacaaggacgtcacctctctggactggaattgcgatggttccttgctcgccaccggcagctacgatggttacgcccgaatttggaaaaccgacggtcgacttgcttctactttgggacaacacaagggtccgatctttgctctgaagtggaacaagtgcggcaactacatcctctcggctggcgtggacaagacgacgatcatctgggacgcatccacgggccaatgcacccagcaatttgcctttcacagtgctccagccttggatgtggactggcagacaaaccaggcctttgcctcttgcagtacggatcagcggatacatgtgtgccggttgggtgtaaatgaacccatcaagacctttaaaggacacacaaacgaggtgaatgcaatcaagtggtgtccgcagggccaactgctggcgtcctgctctgatgacatgaccctcaagatctggagcatgaaccgagatcgttgctgccacgatctgcaggctcactcaaaggagatctatacgataaaatggtcgcccacggggccgggaaccaataatccaaacacaaacctgatcctcgcatccgcttcgttcgattccacggtaagactgtgggacgtggagaggggcagctgtatccacacgctcaccaagcacacagagccagtctattcggtggccttcagtccggatggaaagcatttggcctccggcagcttcgacaagtgcgtacacatttggagcacgcaaacgggacagctagtgcacagttacaagggcacgggcggaatctttgaggtgtgctggaactccaagggcactaaggtgggtgccagtgcctccgacggtagcgttttcgtgttggacctgcgaaagttctgattgccggagcagccacaactggatttcgtgtattgagccaacgcttaaaatagtcaagattccttttccagctcattatttggtaaaaatgaaatcggtagtttttcactttcttacggaacgagaagtttttacttttgattcaaaaattgcatttaactatattttttaaagaagtgaaatatgatcagttacaattctaccaacataagtcgatttggatctggagtccggaccttaggtaactcctttcttagctatcccgccctgcaatcgtatttgtaattgctttaaattctaattagttctttaaggtatacctcttgagatgagatcctcccgcttttgtccacgtctatttcgtacgcttagtttcgagtcacaaaatatcgatatgcacctgggatttttgggggcttcaacatggttgttgttctcttcagatcagcgggatgcgactcgcctcattttaatcttaatcataagctccatgtttctaaggtcgtccctttttatacgaaaatcgtttagtataactttgcattttgttattgtatcgatcaaagatgccagccaactccccgccctccccaccaaaagtcctttacccaattccacagttgtcctccaaaaaagggatgccaagagatcagatcagaccgattcacgcatacattcagaacagtgtaactgcagtcccacgtagtcagtaatcgaacgtaattattaagaacacgagattggcggaaacacaagaacatcagcaaaaatacattaaagataaaaattaatctgttttcgttttgggcctgggtgttttttgtattttagcattttaaaatttaatactaaagtacttaaattaaactttattctttgtaaatatagata

SEQ ID NO: 7920 - protein, 700 aa, DROSOPHILA [sequence omitted]

SEQ ID NO: 7921 - DNA, 3142 bp, DROSOPHILA
aaattgaatggctcactaggccctttcctcgtctgatttgctaattacttaattgagtgttgccgccgggtaaatatgtaattatagtcggccaactaagattgttggcacactgttaattttcaaaattaggcgactttaaactgaagtaatctaatatgtgagaactcatcggtcgctaattttggctatggaactgttttaacaagttcaaatattttgtcagactatgcacataaaattctattgcgaaactcttcatttcgttttttgtcgtggaggtgggctcatcatggccataactattagacggtccgactgcattatgcaaaacttataaaccataaaatgcagccgactgcgcctagccagcctctcgtccttccaatcctgtctggtaagtcagcaagtttcaaatgcaaagttgtcagcacaaaaaaagttaacgccaggagacccaactctctcccactttatttcggtgtctgcgtctcgacttttatgaaatattagctaccaacttatgcacataaatcttgtagaatcgtagtgagactcttctgccgcaaaagtttttcgtgaaatgccaaaaaaataacgaagaatagaggaactccctaaaaaggtgtgaatagaatggagcagtcgctgagtccttttaaatatcgcatttccaaatgcaaagtatcttcattaaactatgcgctaatttgcagtcctggagaaactttaggtactagcagtagcagtacaatcttttgctgttctcttatctatggaacgatattctaagtgctacctaacaaaattatttaccaaagaatacatttggcaactgcttcaaaatatgtaacacatctttctccttcctcgatcttgcagaatccttccgttgccaagatgtcggatatgaaatggtggtaacagaattgcaccacaaactggtcaacaaataattatcgagtcgagagaggaagagccatcaaagagtcaacacaaaatgcctgaccacacgagagttaccgcaacgacaaggagtaggccatggctatgtggagccatcccagtgctgctgctcctcctgctgactctcgtaatcctgcctccggaaaccaccgccttctgcccctcgaagtgccagtgtttgggcggcgaggcaaatagtagagcgttgtgcgtggacgccgctctggaggatgtgcctatccaacttaatccggaaacgaaatacattaaccttacagtaaatcggattcgtacgctagaattctcgctgccattctacatgaagcttgagatcctggatctctcgcagaatatcatcgaaacgctgggctcgaaaaacttcgagtaccaatcggaactgagaaccctgaatctgagccggaatttggtcagttccctgcacaaacatgccttcaagggtctgaccaatctgttgcttcttgatctcagtttcaatcgcattgagacagtgcatcccaccgctctaagtgatctcgcctccctggtggagctggatcttacgaataacaatattgtcagcttggaggacaactgcttcaagggcatgaacaccctagaggttctcgtgttccggaataatcgattgctagacgttccagccagtaatctttggcatttgcatgccctcaagagcctggatatgtccttgaatctggtcgagtttgtgcggaatgacagtttcgagggcttaaaggagcttttggccctcagcgtgcagggcaatgtgatgagcgaactggatttgagtgccttcgagggacttatatccttgaaacatctggatctgtccgataataatctcacggtaagatttatttttaatcttattgaggtctttaaagaaaacctattccattatggtaaattgattatttttcatatctgcccttaatcaacgctcttaaatattgctcgttaaataatccactcttaaagagtcttcgaattcacttttcaaacgaaaactaagtgtgaacttacacaaacatgtcgccgccattgccgcagaaaactagcgtagctggtctcataaattcagacactttgccacgactaaatcctgtgagcaacactttgccaaagcggatttcccaccccctcgaacgcctcgtctaagttcgtccttcctggagtttagctgcattttgcatacgcaaaattaataaccataactcgttgttgctgtccgttcgcacacacccatatgaggatggcaaggatacacgcactcggtattcgaggactcctttctgccggccatgtcctttctgctatttatgcatgcaaacatgtccgtgttgcctgatttctgctgttgtggcccactctttgcttaggccctcggccatgtggccatcctttcccggacgttgttaaatgccgccagctcctcgactcctccactgagcacccctttcttcccaaagagacactcgttgcccagcaactgatccagcttaaagctgccctaaactttacgaccagaaatttgggcaaaaattgtgaacttaaatcgaaagaggtcgggataaagcttaaacgatgatgcaaaatcaaagaaaggcgaaatgtgggatgtagtcttgaaccagggttcttaagttgcgaaagtggttgggattaagctgaaagcgagaattatgtaggcgaagaatgtttttcagatagcacatgactaaaaagtctaatcgaagcattgttgttagatttctattttaaaagaaactatcgaatgtaagcaagagtaactataatgtcatttagcttatcttctcgagtattggcaatcaaaactaagtcgaactgtggtctatttcacgccgagtccttcgactttaaattgaccaaaccatatcattaggacacacattttgtgtgcaagcctgcaagaggtgcgcaactttcagctgagttgtgcaaatcccctgctcaaaggcgaaactgcatgtcctggctggtatcccacactcagataatggaaatgggaaggcatgggaatggaggctccgtctccagaaatgcctttttatgtaatcacaggtatcccatacacagagagaagttggaagaagatagctgaaggatgaaataaaaataaaattaacttttatttatc

SEQ ID NO: 7922 - DNA, 864 bp, DROSOPHILA
atgcctgaccacacgagagttaccgcaacgacaaggagtaggccatggctatgtggagccatcccagtgctgctgctcctcctgctgactctcgtaatcctgcctccggaaaccaccgccttctgcccctcgaagtgccagtgtttgggcggcgaggcaaatagtagagcgttgtgcgtggacgccgctctggaggatgtgcctatccaacttaatccggaaacgaaatacattaaccttacagtaaatcggattcgtacgctagaattctcgctgccattctacatgaagcttgagatcctggatctctcgcagaatatcatcgaaacgctgggctcgaaaaacttcgagtaccaatcggaactgagaaccctgaatctgagccggaatttggtcagttccctgcacaaacatgccttcaagggtctgaccaatctgttgcttcttgatctcagtttcaatcgcattgagacagtgcatcccaccgctctaagtgatctcgcctccctggtggagctggatcttacgaataacaatattgtcagcttggaggacaactgcttcaagggcatgaacaccctagaggttctcgtgttccggaataatcgattgctagacgttccagccagtaatctttggcatttgcatgccctcaagagcctggatatgtccttgaatctggtcgagtttgtgcggaatgacagtttcgagggcttaaaggagcttttggccctcagcgtgcagggcaatgtgatgagcgaactggatttgagtgccttcgagggacttatatccttgaaacatctggatctgtccgataataatctcacgcggatttcccaccccctcgaacgcctcgtctaa

SEQ ID NO: 7923 - protein, 287 aa, DROSOPHILA
MPDHTRVTATTRSRPWLCGAIPVLLLLLLTLVILPPETTAFCPSKCQCLGGEANSRALCVDAALEDVPIQLNPETKYINLTVNRIRTLEFSLPFYMKLEILDLSQNIIETLGSKNFEYQSELRTLNLSRNLVSSLHKHAFKGLTNLLLLDLSFNRIETVHPTALSDLASLVELDLTNNNIVSLEDNCFKGMNTLEVLVFRNNRLLDVPASNLWHLHALKSLDMSLNLVEFVRNDSFEGLKELLALSVQGNVMSELDLSAFEGLISLKHLDLSDNNLTRISHPLERLV

SEQ ID NO: 7924 - DNA, 7722 bp, DROSOPHILA
atatattcctgcggtctgctggccatggcatatagagaaaggcgtttggaactcgaaacgtcaacagaggtgtacaaaaaatacaacaaactattcaacatagcgcaatagaggtacgtgggtatagcttacaaaaatatctcgaggatttcgattctagcgggatgcttcatcaacaggaaacaatagtaacatttaacaaacaaatggctttgggaactgtcacatatgtagcttgggtgggtgggatgatgtggagatctgtgtccactgggtggtggccaggcggccactgagttctcgtaaagtgtgaatcaaaaactttcagtttacaacccgtaccagttctgttcgatttattatgttgccttatttatgcgtagctcggttcttcgaattgaaatcgcttatgttacggctataggtgtacaagtactatctatgcaagatcggtatataactctatgtactctgatttactgtcggaaatacgtattgtgaatgcaactattagtataaggtatatattatcagttgatttcctagaaaacttcaaactttcaacttcgaattttgaatttaactctctcgctcctcgcgccggatgcacacgtacaaatatataaatgtctatacgctgtatatactcgtatatatgtatatgtagatgacttattcagggaggcacgtaatttgaaacagaagcgcccttaacaatgggaaacaatctaaaactaattaaagcgtgtgtttacgagtaggggtaactaattagaatacttcgtatgtacagactgcagacccatcccgtctgcagcgccatccgctcatccaaggagccgaatgcggatgacaaagggctgcctgccatcgaacgacgacttcgatcgagactagatcttagagacacgcgcacaggcttacattggtcgtataaaaaatatatgaagctatacactgtttgtatcactaacgagggttccgttgcatccactgcatcctacacgcaggtcgaggatgcgtgcgacacactggccgctgacgccgcagctgcagccgccgaggaggaagccgccgatgcggcctccaggttgaagtccttgctgcggcagcacatctcgcagatgcgcttcgtgtccggattgaggaacgtgcagaagctgcagctccactcgttcggactggtcacaatcagctggggagacacattcggcggctgcttgggcacagctcctgtgcgttgccttgacccggttccccgattgtccacgacggccgtcttcaaggcggacttgaccttcttaacgccggcactgctgctattgggcagaggactgggtgcaggagcttgcaccaccttagcctcgcgtcgccccgtaccggattttttatctagcgttcgcgccttctctccgtttgtgggattcgtggcctcacggcgcttctccgccggaggagctgcaccgccgttcgttatggacagcgagcctaggtccaagctctgcaccagcaagtcctcgcggtcacccaggtcctttgtgtagcccgatcgctcgaggttcttgaatacatagttccaggactcgaaactgccgacaccctcctgcactttgggcatgagaggcggcgagctactactgtccagggccacaaatccgtccagactagccgagtcgtaactgttcaagtccgaaatggtggtgggtatatcacgttcagtgccggacctcttggccggtgcagtccgactattccgctccttcaattccttgtgcatcttgcgattattgtccatggtgctctgttaaaaggagtaggcaacgatatgtaaccattatataagtatgatgatgttgttagaacttacttgcttttccgctgatcgcggatgtttgtcagtcgaattaatgccacccgcctcggccaaagcccgcatacggctgctcttcggaaccggccgcgcatagatgtacatatcctggccggtcggcggcggcgcttgcggtagcgtggtgggcaggtcgtagcccccgtaggtggcatacatggctaccggattcccccgcatgctaggctgcacctgacctctcagctcggcatactgcggatcgtagtcatgcgtcccaaagtcatgctgggtcagatgcgctcgctcgtcaaagtcgatgaggtggtgatccggcggataggtgctctgacggtgctgcatagccgccaaggcagcagcggcagcagcagaagtgttcggctggcgacggtgcaaatcgcagctgtgggctgggcccgtctttcccagcgtggcgtacatgttggtgtgctgtccattgccatagaagtcggcgggcgacgcatacggggcattcagctggctggagatgttgtacggcagcggatagcggtttcccggtgcattgtaggctccagtcacggcagcgtaggacgcactgctgcccatgctcaggccatctaagcagtcatagggcgcctcgtagacgtgcggcagctggcactgctgttggagctgctgatcgaaggagtgacggtgaggcagatgggcctgcggttcctggtagtgatccaggctgcgagaatgcgtcatcagcggaccaggcaggtgcggttgctgcggcggaggcgctgggtaaggcggcagatacttacccgcctcgttcagcccattgggatgcagggcacaagtgccggaactgctgggatgatgggcaacgttgttgctgcgcatgccgcaggcagttggagcagcactcaccacattgctatatgtattctcctgcatcggtggctgctccattcgtacccgtttctcactcagctgcctgaccatctccttgatggtcgtggaagttccacccacgtaacgctcgcggaactgtaggatgtccttccaagtgcagacgtatcccgctgccgtcactcccgcgtagatgtgcttcataatctggcactccacgtaggcggccattgcgtcgcgcgaaacattcgtaacctgatccggacagatgggaccctcgaggacgaaggtgtcctcggcagcccggcgatagcccatggccaggaagagctgttcggcgtccagcaggcgggattggatgtcgtgctgaaagcatcccgaataggtctgcagaaaggaggattattcagttagaagtggctatttagtatacgtcatcatcctatatccaccttgagagttcgatactcctttcgccatggcttcgtaaacagattgttggcatactggctgatggtctcgaaggctacgatggcgttctgggccgaaaagtcgggcagctcgagcacagacctccgcaggacatgcccagtttccggcagaaagaacttgcgatcgtgctgcaccacgcagaggaactccttcaggcagcctgtaagcgcggattgattagttccatttccatttaggacaaggacaaggcggcgaactcaccctccagctgcttgcgttcctcgagcttctctatgctctcctccgtctcgagaaacatccagtggcgccggagaatctcatcccacagatcggggatgaggtcgtgcggcacgaaatccgacatctcgggctaaggactctcattcaaggcgcctccggctcctgcaaaacaagaacacaaggttacactacggcgaacatctcgagagcccagagcgcgccaccatggctattgattttccaccaggggttgggtggggatgcacttctctggcatgaatcaccagaatcacatccttccccgcatgacgcacgccgtcgcggcatgcagcaaacaaacaaataaacaaccaactgggctcgaatggagtaacaataactggacagataagagcaaacaataggctccattggggcccgtcatcgatagtggcattcccgagtccttatcagtttcctcccagccagcggagcacctaagcaaccagtacttgcccctcgcggacaaaaacagttgacaacaaaaagctcacttgtgattacgtctactgtgctccccgatgcagtggaagctgattcattggctgggagaaaagctgtttcaggggatttcgtttacaataaatacaaatttttttttgttaatagaaattacaaagctaaaactatcaccatgaccaaacactaagtagagtccatctatggggtttcaaaccaactggaagccctttattatgattgctaggtggagatccaggaagactctgcagcatactttgtttatttgcaaaggcgtatctaatctaaggtttatttttgaaataaaagatagcgaattgtatagaaatcaactaaatgtggggctgctcgtagctttgcttcggtgagtcataaggtcagaaatgctaatcatgtacaatttccaggcttacctaatatacgcgaaaataagtagagtaaataaagtgagcgcaataatggagctcacttgttgtgatgataatagataaccggaaagcaagctccagccctttactatctatgagctttacctggcaaatactactcccaactgggtatcatctgctcgctgacccgaaggaaagcccacaagtgctcgataggaacccagaagcctcgcgattgcatcgcttgcccttatctcccccctcgccagccggagaaccgagccacttgactggctaactcgatattgatatcggctatcgtggagccagagatcgtccattggcctttggcattcgatactgagaacaccggagaggcactacgctgagcaaccttggggagtgactcacttggcgttcggcgctccaatcagaatgcgaatgagcagcaaggcgggcgtggataaacaagtgtagtgcaactgagcaaacggcgaagtggtgacaagaggagtcgaataaacgcggtgtgcggagagaacaacattggcagtgataagcgtataattatcaaatatatcaaaacaaacttatgcaagccacataaactgacttcccttctcatcctctataatttatttacttatgcaataatttcgacgctacacatactgacaatttcctatttagttgcttgggttcaagtcgtacataagcatatgtacatatgtacgtacatacatactactagttaacaacaatattgaaatgggaatttaaacagtcagtcgaaggaacgcactgtcaaccgattaatgagctgagcattacatgtatgatgtcctgtaataatgaatcaattgaatatgcatgcaactgatagctttcccagtccagtgaattttaattaatgttttccagcgccgaaacagcacacattgttggtgggaatgggaatgtgaagtgggggaaatgggaaagcgggccgaagaaagtggagctttcgtgggaacccataaattcagcggccaaatgaagcaagatgattgcagggcggattaaaatcaatagccagcatgcaggtggagcaagtggagtgggccgaatggcaatgaagttacttatttactatgagtaccacaggcacattcgcactcaggtggtgataaattcatagcatttcggctgcccgtccgtctgctaattgaattttcaatatttattgcctggccaggacacatagcgtacataccactaccgaatgcctgcagccgagtgaaaatgcccctcgatgggcagagaatttatgtgctgacattacaatggacgcaatatggcagggatttgaggcgtttattgattcaggcagcactccaagtcgaagtcggcatcgaaggcatcgattggccaggacgaggatgggccatgcaacagtttcgggccatgtgccctggacaaagatccaccgaaccacacactggccgtcaggggcgattatgcatatacatatacatatatatgagtctgcctaccggcaaccgatggcagggtgctcccattcttattttcagcaatgcggcactaaatttagcaaataaaagctcacccggctcgttctttggcagccagaaagcgagccactgccaggggcatcgaagcggagataccctgtaccggacacctaatagttcctacacaaacttttctctatgtgcactccatcaaacatctggtgccttcttgttcactagctcgcagcagcgcacgtgataccctgtaattcgaaaccaggaagcatccgccttggacttacgcaaattcccagtggtccgctggtggctcggctctcatttttgcatttttcttcggaaaagtccgcgcgctggaaaagtcaacacaagttcacctctccaaattcgtgcgtgggtgtgggcggaaggtggtggtaggtggatggtgggcgggagtgggtggttggcgattcgagagggggcggtgcgtgggtgggtttatttttagcgctgctgcgacggaaacgcgacaagtcggagattctgcttccgcaatgttgttgtttttgcagccgttattattaacaaatattacgctatccacgggctcttcttcttgcttgtttgcgttgacaaatctcgttgcgctttcacaatcacatcaaatcgtgggaaaactggttttccccccgtttctgagcggttcactcttcggttcgtgatcgtttgtgtccgcgggcaatggaaagtctttgtttttcacacgcgtttatcacaacagtaaataaaatatcactttagccagtttaatcaactcggagagcagaacttttaaccgtgagaaataaccgcatactgaagtggccaaaatctgggaaatcgccatggaggaactcgcggaaaataccaaatccatggcatgcaagctttattatcagtggcgtagaagaggggccttatctgattaatcctcgctctataattttgaaccgcttgccatttttaagggctcaggataatgagatttgttattcttccagattaatgtcattaaattaaaatcttatgtttcccccttatgtttataagagtaatcgcaaatattcaatgaagaaaagaatattttattttattgaactgccgaaatcaacaaattaaacgaatgtaattaatttaaattttaaattataacacccaaaaagtgtgattccccgaaaatatcagttattatacaacgttatttcggaatttgtagaggtattttctggcgctcccgctgcggtcacactgaacacgagtttcgtttcggagattgaaagaaatggagattgacttgggatttgcggaaaagagcgacaatggcgcctggctgagcaaccgctactttcccagcaagctgggaggccagcccgcatggctggaactggaggccttgccgcccacgtcgcagctgcagtgcagcaagtgcagggcacccaaatccttcctggctcagctatacgctcccttcgaagacgagtacaactttcatcggtccatctatgtgttcctgtgccggaattccgactgccaggaggcccaaaatgcaaggtaatcccttctagctctgaaaaccaacttgcaacctaatcttacccatctttccagcaatttcacagtcctcaggtcacagttgccgcgaaaaaataagttcttttcggaggaggagccgagcgacgtgggtcaacccctggtaggaacagcagccatattttcagaacatactcatcataatatgttttcttagcccgccgttccctgcctaaagaaactatgcgccgcctgcggttgccatgctcct

SEQ ID NO: 7925 - DNA, 2970 bp, DROSOPHILA
cacggttaaaagttctgctctccgagttgattaaactggctaaagtgatattttatttactgttgtgataaacgcgtgtgaaaaacaaagactttccattgcccgcggacacaaacgatcacgaaccgaagagtgaaccgctcagaaacggggggaaaaccagttttcccacgatttgatgtgattgtgaaagcgcaacgagatttgtcaacgcaaacaagcaagaagaagagcccgtggatagcgtaatatttgttaataataacggctgcaaaaacaacaacattgcggaagcagaatctccgacttgtcgcgtttccgtcgcagcagcgctaaaaataaacccacccacgcaccgccccctctcgaatcgccaaccacccactcccgcccaccatccacctaccaccaccttccgcccacacccacgcacgaatttggagaggtgaacttgtgttgacttttccagcgcgcggacttttccgaagaaaaatgcaaaaatgagagccgagccaccagcggaccactgggaatttgcgagccggaggcgccttgaatgagagtccttagcccgagatgtcggatttcgtgccgcacgacctcatccccgatctgtgggatgagattctccggcgccactggatgtttctcgagacggaggagagcatagagaagctcgaggaacgcaagcagctggagggctgcctgaaggagttcctctgcgtggtgcagcacgatcgcaagttctttctgccggaaactgggcatgtcctgcggaggtctgtgctcgagctgcccgacttttcggcccagaacgccatcgtagccttcgagaccatcagccagtatgccaacaatctgtttacgaagccatggcgaaaggagtatcgaactctcaagacctattcgggatgctttcagcacgacatccaatcccgcctgctggacgccgaacagctcttcctggccatgggctatcgccgggctgccgaggacaccttcgtcctcgagggtcccatctgtccggatcaggttacgaatgtttcgcgcgacgcaatggccgcctacgtggagtgccagattatgaagcacatctacgcgggagtgacggcagcgggatacgtctgcacttggaaggacatcctacagttccgcgagcgttacgtgggtggaacttccacgaccatcaaggagatggtcaggcagctgagtgagaaacgggtacgaatggagcagccaccgatgcaggagaatacatatagcaatgtggtgagtgctgctccaactgcctgcggcatgcgcagcaacaacgttgcccatcatcccagcagttccggcacttgtgccctgcatcccaatgggctgaacgaggcgggtaagtatctgccgccttacccagcgcctccgccgcagcaaccgcacctgcctggtccgctgatgacgcattctcgcagcctggatcactaccaggaaccgcaggcccatctgcctcaccgtcactccttcgatcagcagctccaacagcagtgccagctgccgcacgtctacgaggcgccctatgactgcttagatggcctgagcatgggcagcagtgcgtcctacgctgccgtgactggagcctacaatgcaccgggaaaccgctatccgctgccgtacaacatctccagccagctgaatgccccgtatgcgtcgcccgccgacttctatggcaatggacagcacaccaacatgtacgccacgctgggaaagacgggcccagcccacagctgcgatttgcaccgtcgccagccgaacacttctgctgctgccgctgctgccttggcggctatgcagcaccgtcagagcacctatccgccggatcaccacctcatcgactttgacgagcgagcgcatctgacccagcatgactttgggacgcatgactacgatccgcagtatgccgagctgagaggtcaggtgcagcctagcatgcgggggaatccggtagccatgtatgccacctacgggggctacgacctgcccaccacgctaccgcaagcgccgccgccgaccggccaggatatgtacatctatgcgcggccggttccgaagagcagccgtatgcgggctttggccgaggcgggtggcattaattcgactgacaaacatccgcgatcagcggaaaagcaaagcaccatggacaataatcgcaagatgcacaaggaattgaaggagcggaatagtcggactgcaccggccaagaggtccggcactgaacgtgatatacccaccaccatttcggacttgaacagttacgactcggctagtctggacggatttgtggccctggacagtagtagctcgccgcctctcatgcccaaagtgcaggagggtgtcggcagtttcgagtcctggaactatgtattcaagaacctcgagcgatcgggctacacaaaggacctgggtgaccgcgaggacttgctggtgcagagcttggacctaggctcgctgtccataacgaacggcggtgcagctcctccggcggagaagcgccgtgaggccacgaatcccacaaacggagagaaggcgcgaacgctagataaaaaatccggtacggggcgacgcgaggctaaggtggtgcaagctcctgcacccagtcctctgcccaatagcagcagtgccggcgttaagaaggtcaagtccgccttgaagacggccgtcgtggacaatcggggaaccgggtcaaggcaacgcacaggagctgtgcccaagcagccgccgaatgtgtctccccagctgattgtgaccagtccgaacgagtggagctgcagcttctgcacgttcctcaatccggacacgaagcgcatctgcgagatgtgctgccgcagcaaggacttcaacctggaggccgcatcggcggcttcctcctcggcggctgcagctgcggcgtcagcggccagtgtgtcgcacgcatcctcgacctgcgtgtag

SEQ ID NO: 7926 - protein, 797 aa, DROSOPHILA
MSDFVPHDLIPDLWDEILRRHWMFLETEESIEKLEERKQLEGCLKEFLCVVQHDRKFFLPETGHVLRRSVLELPDFSAQNAIVAFETISQYANNLFTKPWRKEYRTLKTYSGCFQHDIQSRLLDAEQLFLAMGYRRAAEDTFVLEGPICPDQVTNVSRDAMAAYVECQIMKHIYAGVTAAGYVCTWKDILQFRERYVGGTSTTIKEMVRQLSEKRVRMEQPPMQENTYSNVVSAAPTACGMRSNNVAHHPSSSGTCALHPNGLNEAGKYLPPYPAPPPQQPHLPGPLMTHSRSLDHYQEPQAHLPHRHSFDQQLQQQCQLPHVYEAPYDCLDGLSMGSSASYAAVTGAYNAPGNRYPLPYNISSQLNAPYASPADFYGNGQHTNMYATLGKTGPAHSCDLHRRQPNTSAAAAAALAAMQHRQSTYPPDHHLIDFDERAHLTQHDFGTHDYDPQYAELRGQVQPSMRGNPVAMYATYGGYDLPTTLPQAPPPTGQDMYIYARPVPKSSRMRALAEAGGINSTDKHPRSAEKQSTMDNNRKMHKELKERNSRTAPAKRSGTERDIPTTISDLNSYDSASLDGFVALDSSSSPPLMPKVQEGVGSFESWNYVFKNLERSGYTKDLGDREDLLVQSLDLGSLSITNGGAAPPAEKRREATNPTNGEKARTLDKKSGTGRREAKVVQAPAPSPLPNSSSAGVKKVKSALKTAVVDNRGTGSRQRTGAVPKQPPNVSPQLIVTSPNEWSCSFCTFLNPDTKRICEMCCRSKDFNLEAASAASSSAAAAAASAASVSHASSTCV

SEQ ID NO: 7927 - DNA, 5589 bp, DROSOPHILA
cgtttttaaatgcaattaagtggcaagcccccttaaccccttaatggcacctaagtgagtcagtcccccagtccccagtctaagcgccttaaaattttaattggccttcgaaaacaattgaaacacgaaattggcaaagcaaattgctgctatttggaggcttaaaatatgtaaaagcaaattaatgcttacaccgtccagttaaagaagattttttctcctatctgtgtggttggaaaaagaatttttaatttttacattattagaaagtgccttccgttttttttttttacctccccatgtgaaaggttacaatctgcacgctaaaaatgtgtgtgggcaaaaaaaggaagtaaacgaaaaccagcacaattaataatgaattgtgtaaaaccgctgaggggaaaacgagggaggttttttctttttccgaacgaaaagcttcagtccagttttacgcattcaaaccgagtacaagagtcacggtgaaaagaaacagggggattctcccactcgaagggactccacaaaaatgggaggacaagtgagcggaaaggacgtcacgatgaatggacgacagctacaattgcaaaatggaaagtgtattacaaaatgctgcggaccaacaacaaacagtatgcgaaaaaacgtggcagcaaatgttgaagcgtttagaaaaaattgctgtttcaacaaatttacaacggaagtggaaagtgcttttccccgcttttccaggtgcgtagaaggggccaaggtggctgacagaacacaaaccgcgcttgatgaatgctctcgccgccatcgatttgcactcaactccatttcgcacttttccatttcagcccgttttcaggggcagcataatttcgagaaaaaaatagccgtggaaatccccctccggataccccatcattccactccgaaaatgttccttttaaacgtcagcacggatttcattttgtgcggaagtgtacgtatttgtgtggacaatgaaaaatcaccgcaaaccaaacggaggtgagtgccccaatacctttggataaaaaagggaccctaaggacacgtaccaaccggaagtatttctcacattggttttcgatcttttagttttgtgtttgacacctgcacgtgggtaacacttaaagttttacaaaggtattaaaggggtttgaaaaatcccgatcgtatctagtccacataacatccgaaaagaactgtcatgaaaccttccagtattttcctatattctatagctacattgtctacataatatgaattattaagtttgtttgtttttttgtactcacattcatttccgggcatcgtgtgtgcgctgagtccaggtattccattgacgccgacgccactgcctccgattccgcccactccgccgcccattccgctgaccacgctgccgccaacacccactcccacaacgccgccgcccatgccaacgcccaccaccccacttcccggatgatagctatatccattctgggtggcgtatagtgccgttttctgatcctccatgctgagggcgagatccattgagtgttccaatgccttgttgtccagcccagaggcggggtagtagggtggtggcgcctggttttgctgagcggccacaatcgaaggacgcaccgagtccatctcgtaatctttggcggcggcgctcttcttcgattgattgcgcttgcagcggcagaacatcaggattaggccagcgaagagggcaaagaccacgcaggacacgattatcgcaatgagagtgggcgtggccagggcattagcctccgctatatacggcctgccaactatcggggtaaaaaaaagagtggggattagtggataatattatcaacatatcctttagaatattttgaaaactaaatatttttttttaaatatgtattaaactcttcaatcgtgctatttccaagtcaaatttttaatttcattccagtttttggctctgtaatcgagtgcgggttgaaatgaagccatgaaaaatgcatcgcgaggagctgaagtggatggatgaatggttggttgcttggtggatggttggatagatggtttaaaagatgggtggcaaggagtggagagaccactgacgggatgagtgattgatggtccgccggcagccggtcattcaagtggtgcaattgctcgtaatggctttgcatataatggaaatcatcagcatcggcgggagtttccagccagcaagccaattctcgttattttcgttaaaatactctattcattttccacccacttcacttcagcgcattcctcatttcaagaatctcaatttttaactgcgagtctttgttgtgattgtttcgattcaaagattaacttactatagtgaaatgctctctttttgtactcactttctgcgtccgtgtaatcgccgcagtgctctggattggtcctcagacacaatttgacccgcacagtgggactgttttcgtcctcgagggccagcgagttcaaaccattgtcatcctcgtcctcgctgatggtgtgccccagagcacgtcctccgccaactcgccgcgctccaattattctgtcgatgatcttctccttgtgggtgggtccatttccggacagctgcaggttatccatggtggtcaccacctcccaggcggccatcggagaatctgcattcaccatggactccacaacggccaccaggttcaagcacgtggcccccacatcgatgccgagagttcgagtattcggctcataggtcacctgcaatggtggcggaatcctgctgacctttgtcgtcaccatgatttcactcgagtacggtgaatcgctcttgggattcagagccttgaccttaaaggcataactctggtgttgctccagggctgtcaccttgcagggaatatcccgctggcaatcgacttccacccaagccgaattcgagttggccaaagtggcgcaatccggtatcaattgttcttcccttggcatggccacacggcgatagctaacaaagaacttggtcttgctcagacctccatcgaatccgggatcccagctcagtgatacgtaattgtgacccacctcggtggctcgcagatttgttggtttctctgggggtcctttctgctgcagtctaatgggagctcgaatcgtatccagggtgttggccacccggcaggtgtattctccgtaatccgaatgagtcagcgagttgatcttgagcacggacgtatagatgtcgttgttatcggtggtggtactaatctcgtagtgaccatcggaggacatggtcaggggcgatggattattgccaaactgccattggaactcgggcttgggataggcctgaaccttgcaaaccacctcggctgtctccctgatatcaaaggccaccttgttatactgatggagtacaatgggctcatgttcgatcctcagttgcatggacgagttggccgagttgacctcgttctgatacaagcaggtgtacaagccacgatctccaggcactaaagcgtttccattcggtctggcctttcctcggaacttaagttgactctgaaccgtgaccatgccgttgaggccctgatcgggattggtctgcacttcgtagagattttcctcgggcaggatttccactgcgtccttcagccatttaacactgggtgctggctttcccttggcactgcacgtgaccgtataatccgtatcggccactctgcgagtcatatgctgctgtagcttggccaagaactgcggaggctggtggatctccaggacaatggtggccatcattccgatgcccagttcatttacagcatgacaatggtatttaccctcgttacccaagtgagctttgggtatcgagtactgagggccttgtgcaaggattttctgcgtgctggagaactctccatccatatccctgaaccatctgtactggggcactggccagcctggcggattagcggagcaggtcaaggtgacaccattacccacatgaaccacgggcttattgggtgtaatgtaagcctgtcctggtcgatggcgaactagcagggccaccgtggagttacccactcgttcactgcgctccattccctggctctgcattatgttcacggcacggcagatgtagtttccggcatgatcggctcgcacggaagttagggtcagtacgtcgccattgtagcggaagtcgggactgttctccttgagccactcaatggtcacgggtgcaggattggctgtgacattgcagcgaatggtcactgtatcgccctcttcggcctctcgcgtcttggactctatcacgaccatgggtggatacaggatatccaggatgagctcctgttctccggtctttccaagaccgttgtccgcaatgcaggtatacttgccggcatcttgaacactcacccgatggatcgtgtgaactaatgaggagctgatgaaccgaccattgcgattccaacggacattgggaaccttcggcttggcatccacattacactccagtttggcagtccggtcacgttccacccgcaaaggattctcgggtccaacctcgactcgggggtaatctgaaaaaaagcaaaggcaaaaacagaaaagtaggcaaaattagtcaagtcacacaggcagaattggaatcaaagcaaaccgctggatgaaaattaataaacacgcagcatttttggcataatcaggcggcataatccgaaacttctaattgaattagtcagggaaaatgagagcgccagcgcactggttatgattagtctgctgattagacacgaaatttgtcaattattaattaaactaatgaagtgtctgaaggtcggccaaagccaaagtgactccaagagactcattagcaaagttgaaagagcggaggaaccagggttttatgcagataatttgttgttaatggaagtggtaatctatttagaaggggtcatcctttcgatacttccaaatgtataattaagtattattatatatgttcttccagtaaattttactaaattttctgagtaaattaaattactccactttaatgaacttatggatatccgcggctcttaaaaataagtttagcacaggaatcttattcacctgcagttaattttcttcccactttcccggctcactctgaaaactccgcccctgcacttcatcgccgagttggagttgctgactgcaagtcatagtcctcttatgcaccgcaaatggcgtgaaattatgtctgagccaccgcaaccactttgtaattaactgccccctggataagtgtcgccagctgcctaatgactttgcccataaaaccgcactccgcaccattgacggccggcgaacaaaaaaaaacaaaaaaaaaaaatgtagaaatgtggcggcagtctagagaactttagcagccgcaatcttgagaaactggagcacggtcttcgacttggaccctttaccccatccatccaaccatccacccaaccatccatctccacttgcgcaatctcctccagcaaattatagtaaattgcgcgattctctcgtggctacctcttatgaaaggtctaaaaggcg

SEQ ID NO: 7928 - DNA, 2783 bp, DROSOPHILA
attacccccgagtcgaggttggacccgagaatcctttgcgggtggaacgtgaccggactgccaaactggagtgtaatgtggatgccaagccgaaggttcccaatgtccgttggaatcgcaatggtcggttcatcagctcctcattagttcacacgatccatcgggtgagtgttcaagatgccggcaagtatacctgcattgcggacaacggtcttggaaagaccggagaacaggagctcatcctggatatcctgtatccacccatggtcgtgatagagtccaagacgcgagaggccgaagagggcgatacagtgaccattcgctgcaatgtcacagccaatcctgcacccgtgaccattgagtggctcaaggagaacagtcccgacttccgctacaatggcgacgtactgaccctaacttccgtgcgagccgatcatgccggaaactacatctgccgtgccgtgaacataatgcagagccagggaatggagcgcagtgaacgagtgggtaactccacggtggccctgctagttcgccatcgaccaggacaggcttacattacacccaataagcccgtggttcatgtgggtaatggtgtcaccttgacctgctccgctaatccgccaggctggccagtgccccagtacagatggttcagggatatggatggagagttctccagcacgcagaaaatccttgcacaaggccctcagtactcgatacccaaagctcacttgggtaacgagggtaaataccattgtcatgctgtaaatgaactgggcatcggaatgatggccaccattgtcctggagatccaccagcctccgcagttcttggccaagctacagcagcatatgactcgcagagtggccgatacggattatacggtcacgtgcagtgccaagggaaagccagcacccagtgttaaatggctgaaggacgcagtggaaatcctgcccgaggaaaatctctacgaagtgcagaccaatcccgatcagggcctcaacggcatggtcacggttcagagtcaacttaagttccgaggaaaggccagaccgaatggaaacgctttagtgcctggagatcgtggcttgtacacctgcttgtatcagaacgaggtcaactcggccaactcgtccatgcaactgaggatcgaacatgagcccattgtactccatcagtataacaaggtggcctttgatatcagggagacagccgaggtggtttgcaaggttcaggcctatcccaagcccgagttccaatggcagtttggcaataatccatcgcccctgaccatgtcctccgatggtcactacgagattagtaccaccaccgataacaacgacatctatacgtccgtgctcaagatcaactcgctgactcattcggattacggagaatacacctgccgggtggccaacaccctggatacgattcgagctcccattagactgcagcagaaaggacccccagagaaaccaacaaatctgcgagccaccgaggtgggtcacaattacgtatcactgagctgggatcccggattcgatggaggtctgagcaagaccaagttctttgttagctatcgccgtgtggccatgccaagggaagaacaattgataccggattgcgccactttggccaactcgaattcggcttgggtggaagtcgattgccagcgggatattccctgcaaggtgacagccctggagcaacaccagagttatgcctttaaggtcaaggctctgaatcccaagagcgattcaccgtactcgagtgaaatcatggtgacgacaaaggtcagcaggattccgccaccattgcaggtgacctatgagccgaatactcgaactctcggcatcgatgtgggggccacgtgcttgaacctggtggccgttgtggagtccatggtgaatgcagattctccgatggccgcctgggaggtggtgaccaccatggataacctgcagctgtccggaaatggacccacccacaaggagaagatcatcgacagaataattggagcgcggcgagttggcggaggacgtgctctggggcacaccatcagcgaggacgaggatgacaatggtttgaactcgctggccctcgaggacgaaaacagtcccactgtgcgggtcaaattgtgtctgaggaccaatccagagcactgcggcgattacacggacgcagaaagtgagtacaaaaagagagcatttcactatattggcaggccgtatatagcggaggctaatgccctggccacgcccactctcattgcgataatcgtgtcctgcgtggtctttgccctcttcgctggcctaatcctgatgttctgccgctgcaagcgcaatcaatcgaagaagagcgccgccgccaaagattacgagatggactcggtgcgtccttcgattgtggccgctcagcaaaaccaggcgccaccaccctactaccccgcctctgggctggacaacaaggcattggaacactcaatggatctcgccctcagcatggaggatcagaaaacggcactatacgccacccagaatggatatagctatcatccgggaagtggggtggtgggcgttggcatgggcggcggcgttgtgggagtgggtgttggcggcagcgtggtcagcggaatgggcggcggagtgggcggaatcggaggcagtggcgtcggcgtcaatggaatacctggactcagcgcacacacgatgcccggaaatgaatggtcccttttttatccaaaggtattggggcactcacctccgtttggtttgcggtga

SEQ ID NO: 7929 - protein, 839 aa, DROSOPHILA
MVVIESKTREAEEGDTVTIRCNVTANPAPVTIEWLKENSPDFRYNGDVLTLTSVRADHAGNYICRAVNIMQSQGMERSERVGNSTVALLVRHRPGQAYITPNKPVVHVGNGVTLTCSANPPGWPVPQYRWFRDMDGEFSSTQKILAQGPQYSIPKAHLGNEGKYHCHAVNELGIGMMATIVLEIHQPPQFLAKLQQHMTRRVADTDYTVTCSAKGKPAPSVKWLKDAVEILPEENLYEVQTNPDQGLNGMVTVQSQLKFRGKARPNGNALVPGDRGLYTCLYQNEVNSANSSMQLRIEHEPIVLHQYNKVAFDIRETAEVVCKVQAYPKPEFQWQFGNNPSPLTMSSDGHYEISTTTDNNDIYTSVLKINSLTHSDYGEYTCRVANTLDTIRAPIRLQQKGPPEKPTNLRATEVGHNYVSLSWDPGFDGGLSKTKFFVSYRRVAMPREEQLIPDCATLANSNSAWVEVDCQRDIPCKVTALEQHQSYAFKVKALNPKSDSPYSSEIMVTTKVSRIPPPLQVTYEPNTRTLGIDVGATCLNLVAVVESMVNADSPMAAWEVVTTMDNLQLSGNGPTHKEKIIDRIIGARRVGGGRALGHTISEDEDDNGLNSLALEDENSPTVRVKLCLRTNPEHCGDYTDAESEYKKRAFHYIGRPYIAEANALATPTLIAIIVSCVVFALFAGLILMFCRCKRNQSKKSAAAKDYEMDSVRPSIVAAQQNQAPPPYYPASGLDNKALEHSMDLALSMEDQKTALYATQNGYSYHPGSGVVGVGMGGGVVGVGVGGSVVSGMGGGVGGIGGSGVGVNGIPGLSAHTMPGNEWSLFYPKVLGHSPPFGLR

SEQ ID NO: 7930 - DNA, 3983 bp, DROSOPHILA
acgagtgcgcactccagcaatccagcagacacacactccacaccccaaaataatccccaaaagatgaaaattgtgtaaaatttgtgtgttggtttcactgattaaggatggcttactggctgcttgtcggcccccaaaaactgctgcttctactgctggccccatcaggggaaatctcttgaaagccaaaaagatgaatagaccagaccaacatctaatatgtgcgaaatttatcagcctcgatacacacacacacacacacacacagaagaacagacaaacagacactcacacacgtggatggagaaaggatatattcaggagcaatgctgctgcaaggacgaaggcaaacggcatggaaaatcgcaataataattttgcctttcagcttcggtttcggtttctgtggcatccgaaaggaggaggtgggccaagtgggcggtttgaaagctgcctcaaggatctagccatccaaggatgcccagccatgtgagtggacagttgcggtccctcggatgcgaatgctccaattatccaggaggtggggcgtagatgaaggtggagctggtggtgtagttgggcgggaatcgaaacacacgaattgcaatgcagtttgcagatgctcggctactcgagcatcccatcatatattttcgttatgcttttgttggctacaacaggaaagggggaaggtttttggttacagtaacagttggattaaattgtacaatgctccggcggagtaacccatcccattcctctgctcgtcgcttgctgtcgggtccgtttgctttttctgggggtagtaatgcctattttccttgatccatatccgtttactcattcggtgctttcaaatttgggaagggtcatcgatttcctttgtgcatcctagcaaccaatggcctgcaagtagccctggatctgctcattcagtgcatgactataaaagtgattgattagttcatatctcctccagtgaataccatgtacaatatgcttacccaaatcccttgccgctggccgtggacttcttgtagagagcggccacgaggaggatctgcccggtcatcagcagttctcgttttccatagctcagccagcctttggttttcacttgggagtcaagaagtacacgctcatccaagggctcacgaatcgctcgtctggaaagctcgcgttgaacatgatcacggtctactcgttcctcacggcgctgtactcggcgttctcggcgaagatcttccctttgattatctcgctcttccctgcgaagatcaactcttcgaaaatcaacccgctcctcgtctcgttcttctcttcgcagaccatcgcgctcgactcgacgtgtgtcttctcgctcctcgcgagatgtgtctactcggtcctcacgacgtgtgtcttctcgctcctctcgccgctcattagtacggaactcttccccatttactcgccgttgtatttctcttcgctcaactcgtcgggaatcttcgcgttctacttcctcttcgacacgctccattctgcgctctgctacacgttcctcggtacgttcagcttgacggtcttccctgcggctaatactgttttcaatccttcgtccctcatctcgagcaccgtcgtctaccaccactcgtcgcaagtcgattcgacggaaggattcttgctctgcacggcgaacgtcttcattcgcttctcggcggtggttgaccctgtcgagatcttcatcttggtccgcacgcctagctgagttccgctcttcccgtcgctctacgctgcgttcattgtcgcgctcttccttccggacttcgcttcgtcgagagttgtcttcgtcagacctaacatcaaaaacaaatcgaactcggttctctcgctcttcgcgtcgttcaacacgtcgatcttctgctcgtcgatgattgtcgctctcgatgcgttcctcagagtctcgctcagtctgttcacgttccatgcgtcgggacaaatccatgtctagactagttcgatcgtcacggcgattaatgcgttcctcacgtctggacatttcgcgttctactcggcgttcaactcgtctttcgttcgccgctagtcgccgagtttcgaagtcacgcctgtccgattcgcgctccccacgtcgctccatcttacgagtatctcgttgtccttcgtcagcttcatgtcgctcaacacggtcctcacggatgccgcgttgctcgactcgttcttctggagttacacgtcgatgttctcggatctcacgaatttcacggagctcaacttgattgtcacgagcttcgcgttgctccactcgttggacgcgagcttcccgaccctccaatcgatcttcacgagattcacgtcggtcttctcgatctgcacgcgattcacgtcggtcttctcgatcttcacgagattcacgtcggtccactcgagcttcacgagtttcgagtgcctgtactcgttcttcccgagcttctcgtcgctcatcacgagcttcgcgagcatctagttgatcttcacgagctgcacgtcggtccactcgaacttcgcgagtttcgcgtggctgtacacgctcttctcgggtttcacgtcgctcattgcgagcttcacgagcctcaagtcgcagggatgagtccaaccgaactcttgtttcctcgcgcctttccttgccgcgatcatcacgcgccactgaatctacgcggtctctcctctgactctccgccgcgccttgtctgtaaaccatgtgctcatcgtaatcgtcctggcgctgatggccatcccagcggccatcgttgcagatgtcacggccggaagtgtcgccacagaagtgcctgctgcttgcccatgccaaagttaaacagccaaggtggagcagaaggagcagaacgctaagccgttgtctcatcattggtggctcagtggtgcttggttgtcaggtacgatggaagaagatcgaagattcagtccgttgctgtttcaccagcagtatacgcaactggaatgacttggctagaggattgtcgccacttttatagcgaaatccggcctagaatcttggtgggcaacacccacgctggcacttcctgctcccaatttgctgggctgattgattgaatttcgcttatcgcacatgtgcaccactgcaccaccaagacgacgcaattccaagtggcgcagacgccactgtccattcgagtgagcctaatgcgcggccgcctgttccaattttccatgaatgaaaactgccaagcccgtgacgtcacatggggtatatgtacaatgtacatataaataataaataaaatagggaatcgatttgcggagctcgttaagcactcgtgacgtcaatatatgcttgggaggatgctcaactccgtttttcccggagcgagtgcacaattgcgataagcgcaattcaatcaaaatcaaattagagtgcatcgagcaaaggagccaacccaataattgaggatactcctgtggcgctttagatggccatcagggcataaaattgcccatcgacttggcaactgtgtcccggacatggccatgaaaccactacgggtataaaagcaggcgtcggcagctcgcagagctgtcagttgtaaggataatcgggcacagagcgagatgttcttcgaactccggttagcctcggaactggagcctcgaggatggaccgaggatagcaagaccactttctggactaacattggagggacgagcaaatggagtatcagtactgttctactaagaatatcacataaccaaatatcaactgtgtattaaccgaaacagtctagttatacatatatctgcaccttattcgcattaaccaacatttaatctatccgtagctcagtaatctaaatgtaatcactgtttaaacttagccagttaaatgttgctgttgtttgggatcgtattgtcatggagctgaaagatttgagcagcttcttctcttactcgtctatccgttaactact

SEQ ID NO: 7931 - DNA, 1983 bp, DROSOPHILA
ctgctggtgaaacagcaacggactgaatcttcgatcttcttccatcgtacctgacaaccaagcaccactgagccaccaatgatgagacaacggcttagcgttctgctccttctgctccaccttggctgtttaactttggcatgggcaagcagcaggcacttctgtggcgacacttccggccgtgacatctgcaacgatggccgctgggatggccatcagcgccaggacgattacgatgagcacatggtttacagacaaggcgcggcggagagtcagaggagagaccgcgtagattcagtggcgcgtgatgatcgcggcaaggaaaggcgcgaggaaacaagagttcggttggactcatccctgcgacttgaggctcgtgaagctcgcaatgagcgacgtgaaacccgagaagagcgtgtacagccacgcgaaactcgcgaagttcgagtggaccgacgtgcagctcgtgaagatcaactagatgctcgcgaagctcgtgatgagcgacgagaagctcgggaagaacgagtacaggcactcgaaactcgtgaagctcgagtggaccgacgtgaatctcgtgaagatcgagaagaccgacgtgaatcgcgtgcagatcgagaagaccgacgtgaatctcgtgaagatcgattggagggtcgggaagctcgcgtccaacgagtggagcaacgcgaagctcgtgacaatcaagttgagctccgtgaaattcgtgagatccgagaacatcgacgtgtaactccagaagaacgagtcgagcaacgcggcatccgtgaggaccgtgttgagcgacatgaagctgacgaaggacaacgagatactcgtaagatggagcgacgtggggagcgcgaatcggacaggcgtgacttcgaaactcggcgactagcggcgaacgaaagacgagttgaacgccgagtagaacgcgaaatgtccagacgtgaggaacgcattaatcgccgtgacgatcgaactagtctagacatggatttgtcccgacgcatggaacgtgaacagactgagcgagactctgaggaacgcatcgagagcgacaatcatcgacgagcagaagatcgacgtgttgaacgacgcgaagagcgagagaaccgagttcgatttgtttttgatgttaggtctgacgaagacaactctcgacgaagcgaagtccggaaggaagagcgcgacaatgaacgcagcgtagagcgacgggaagagcggaactcagctaggcgtgcggaccaagatgaagatctcgacagggtcaaccaccgccgagaagcgaatgaagacgttcgccgtgcagagcaagaatccttccgtcgaatcgacttgcgacgagtggtggtagacgacggtgctcgagatgagggacgaaggattgaaaacagtattagccgcagggaagaccgtcaagctgaacgtaccgaggaacgtgtagcagagcgcagaatggagcgtgtcgaagaggaagtagaacgcgaagattcccgacgagttgagcgaagagaaatacaacggcgagtaaatggggaagagttccgtactaatgagcggcgagaggagcgagaagacacacgtcgtgaggaccgagtagacacatctcgcgaggagcgagaagacacacgtcgagtcgagcgcgatggtctgcgaagagaagaacgagacgaggagcgggttgattttcgaagagttgatcttcgcagggaagagcgagataatcaaagggaagatcttcgccgagaacgccgagtacagcgccgtgaggaacgagtagaccgtgatcatgttcaacgcgagctttccagacgagcgattcgtgagcccttggatgagcgtgtacttcttgactcccaagtgaaaaccaaaggctggctgagctatggaaaacgagaactgctgatgaccgggcagatcctcctcgtggccgctctctacaagaagtccacggccagcggcaagggatttgggtaa

SEQ ID NO: 7932 - protein, 579 aa, DROSOPHILA
MVYRQGAAESQRRDRVDSVARDDRGKERREETRVRLDSSLRLEAREARNERRETREERVQPRETREVRVDRRAAREDQLDAREARDERREAREERVQALETREARVDRRESREDREDRRESRADREDRRESREDRLEGREARVQRVEQREARDNQVELREIREIREHRRVTPEERVEQRGIREDRVERHEADEGQRDTRKMERRGERESDRRDFETRRLAANERRVERRVEREMSRREERINRRDDRTSLDMDLSRRMEREQTERDSEERIESDNHRRAEDRRVERREERENRVRFVFDVRSDEDNSRRSEVRKEERDNERSVERREERNSARRADQDEDLDRVNHRREANEDVRRAEQESFRRIDLRRVVVDDGARDEGRRIENSISRREDRQAERTEERVAERRMERVEEEVEREDSRRVERREIQRRVNGEEFRTNERREEREDTRREDRVDTSREEREDTRRVERDGLRREERDEERVDFRRVDLRREERDNQREDLRRERRVQRREERVDRDHVQRELSRRAIREPLDERVLLDSQVKTKGWLSYGKRELLMTGQILLVAALYKKSTASGKGFG

SEQ ID NO: 7933 - DNA, 2766 bp, DROSOPHILA
accttctcccagatttttgttggaacttatagccgtttccaggaaaagactcgagcagggagattaagtgcatgtcgcaatcgaagagaacgttggcagatttgaccattgttatttgaggcttcatcgacactttgattaactttagttattttctatgaactgtatctgtgttgtgggttgctaattgtttgaaacttctttcttgcagacgtcgatgaggcctccaagaaggagatcaaggacattctggtgcagtacgacagaaccctgctggtcggcgatccgcgtcgctgcgagcccaagaagttcggcggtccaggtgcccgtgctcgctaccagaagtcgtaccgttaaactactctgtctggttttcaatttggattagagctattttttacaatttgaaaatggtttgcacgcacgtgcgaataaaacggaataattaactgtacaaacgagtagttttgttctataaagtgggtgaaatatgtataacaaaaccttttttggaactaagtgacggtttccagaagaattgagttttcgaaaaattaatttttgaagcagatgatattcagtttgagaacataattttataaagaggtgtttatatcttggaaggagtaatatttgaaaattcttgaacaatgttcggtaggtttgcgcctctgctaagaacaatcactgagtatggtatctttttggtatttaattagatggacttatttctgaactccgccaacggccactctataatgcagccatcgtttgtttttcaaaacgtatagctaaatttcgggttaataatatctatcaaatgtttatttgaaaatttaaaattctacaagtaattttttcccctataagcacttatatatatatttatttttatattcatattttattcctttgcaaattttttcgacttaagatttcctcgaatttcccactgcagctacaaagtagctaagttgcctacacagccacgtagttagtcatgggagctttgtttggaaaaaccagcaaaaagacggctcctagtcggatcaccgaccaggacaaggcggttctggtaagttggtggtaactgagtagccagaaagtttgcccaaacacttagccacttccccattgcagcaattgaagcaacagagggatcgtctgaagcagtaccaaaaacgcatcgagacgcagttggagaatgatcgcctcctggcaaggaagtgcctacagcaaggtcgcaaggagtatgtgtcatacccatatgtgatctaaacatgttcaactaaaccgattgctttcattttagccgggccaagctgctgctgcgcaagaagaagtaccaggagagtctgctgaccaatgccgacaaacagctggaaaacctggagaagctggctgcggacattgagttcgcccaggtggagatgaaggtgctggacggcctcaaagcgggcaatgctgctctgaagaaggtgcacgaaatgcttgacatcgacgaagttgagcgaatcatggacgagacacgcgagggcatcgaaaagcagcaggaaatagacgccatactgacggatgtgctgaccacgcaggacgaggaggacgttttggccgagctggatgccctggaggcggaggaagagcagcagaagggtgcacagctgccggatgtgcccaccgaagatctgcccattcccgctgagatcgagtccgtcgaggagccggcaaagaccaaagcaaccaagaaagtcctggtggaggcatagaacctatagtaaaacgaaaccaatgccattttgtatgtatatatgtcgttcaactaaatttctcgataagtccaatgtgaaatacatattttaatagattatgcttgactaaagaacacatagactcgcatgtctacttgtgtattgtctttgttgatcgacgcaggtcctccttcaccttgctgcgcagcatcttattggtctcgttcagcttctcgatctcctcaatcaggatcacgttctccttgaacagcttgtcgtacttcttctgcacggatttgtcctcggccaccgacttgtatcggtccagaacattctcgatctgcctgcgctgccgcataaactcgtccctgacctccgcgtccagagtgacgaatcgctttagctcgtcgtcggaggcgtgtttgcggaacagttctttcaccgccttcttgagggcctcggccgagttgatctccccggccacgtagtaaatatccgagcagatggagtgcaggcactcccgagaagcctttgcccgatgtcgctccgtccgaagttcggccacattactgaggtatttatcccgcatctcctttaactgcagctccaactgcacgttgttctgattgagaccctccagctccgcttccatttcgatgatgtgcttgcgcttgtcgttgatctgaaactcacgcggctcaatctgcgccttgagctcggcaatcttgtggcccagcacctgcttgtacttgtccagctcctggttcttgtgcagcaggtcttggatgcgtttttccttgccgttgatggcgtagtcgcgatcggcaatgtccttctgtagatcctcgatgttgcgcatctgtttctggatgttgcgctgcgacttgtggtgctcctcctttaggatctcaacttcctctaggagattgtcaatctctcggctctgcgactcgaatttcttctgcaagacacccgctttacctcgccacatttgggtttcatttcgctcagtggtcaa

SEQ ID NO: 7934 - DNA, 639 bp, DROSOPHILA
atgggagctttgtttggaaaaaccagcaaaaagacggctcctagtcggatcaccgaccaggacaaggcggttctgcaattgaagcaacagagggatcgtctgaagcagtaccaaaaacgcatcgagacgcagttggagaatgatcgcctcctggcaaggaagtgcctacagcaaggtcgcaaggaccgggccaagctgctgctgcgcaagaagaagtaccaggagagtctgctgaccaatgccgacaaacagctggaaaacctggagaagctggctgcggacattgagttcgcccaggtggagatgaaggtgctggacggcctcaaagcgggcaatgctgctctgaagaaggtgcacgaaatgcttgacatcgacgaagttgagcgaatcatggacgagacacgcgagggcatcgaaaagcagcaggaaatagacgccatactgacggatgtgctgaccacgcaggacgaggaggacgttttggccgagctggatgccctggaggcggaggaagagcagcagaagggtgcacagctgccggatgtgcccaccgaagatctgcccattcccgctgagatcgagtccgtcgaggagccggcaaagaccaaagcaaccaagaaagtcctggtggaggcatag

SEQ ID NO: 7935 - protein, 212 aa, DROSOPHILA
MGALFGKTSKKTAPSRITDQDKAVLQLKQQRDRLKQYQKRIETQLENDRLLARKCLQQGRKDRAKLLLRKKKYQESLLTNADKQLENLEKLAADIEFAQVEMKVLDGLKAGNAALKKVHEMLDIDEVERIMDETREGIEKQQEIDAILTDVLTTQDEEDVLAELDALEAEEEQQKGAQLPDVPTEDLPIPAEIESVEEPAKTKATKKVLVEA

SEQ ID NO: 7936 - DNA, 3341 bp, DROSOPHILA
ctgttggctgagctgagctaagcccatcgtgccacagtcagtgccggcagaattgcatcaccgccagcggaactagaacaagaacacgaaataccagcgttttattgcggttgccatgactcttcgagtggaataaccagaacgataagtaaaccaaattttccgtcactgccttcgtaagtaattgggaaatggctgttccttagacctgttgatacggatagtaccgaacaaattgttgatatctcgctatctcgaggtaaacattgtatctttggacacattgtattcttgtctttggttaaggagttcgaaaataatgctcttaagagcgtacacattcaatatcattctatacgcatggaagccatgtcaggtgtattatgtcctaagcccattccgtcaatgtctgcttgagcgaatgttgacacagtccagttatgcggataggcttatttttatcagacccagggaatgggactctcaaaatacagttgagccttaaaaactcgaagagcattttccaacggaaagtggtttcaattaaatgtattagttattagttacttttttcttatttgcagccctcctactttggacacggacaggcaaaaaggccagtcaagcattccagtggagaaggaggaccaagctagcgattgcccaattgccaagtgattcgccttcgatgcctcgggccagttaaaccactgctaagctggactagaacaagatacataattgccttcgcgatggcacgttgcagataagttaatcgcctgaaggcggcacgtacgaccatgcgccggcggacactgcacacttacacagccatctctagttaacttttaactattgcgctggtaatgtattattttgtaaaagttcgcttgtttacgtctggccagtgctgccggaccagttcgaatggtgcgcgccttgagtggttccacagtggcaggtgtttgtttccaagcaaacgcgagcgtcgggcacactgcccggatcacagtgtgccgtcccaatcgagtgaaatggagctgttattcttagcccctgtcattgtgatatttgattgctccgattgttctgacacacacttggctgacaacctgagaggaaaccagactgaaaatccctgaacataaataaattgggaaaatggacgcggaaaaaatgttggagatcgacggctcctacttggagggcggcgggcaggccctgcgcaacgccctcagcctcagctgcattttgggtaaaccggtgcgcgtggtaaagatccgggccagccgcccgagtcctgggctctcgcaccagcacctgcatgggctgaacctcctgcgggacataaccaatgcggacgtggtgggaaactacttgctctcctccacagtggagttcacgccgcgcaccattttggacaacacgtatcgcgtggaaacgcacacggcggccagcattactctgatttatcagatggcgctcccagtacttctctttgccggacgcccgtcccgcctgatcgtatccgggggcacgaacgtcgactttgcgcctccggtggaatacatgcaggaggtgctgctgcccaacctaaaacacttcggggttagtttcgacctgaaggtgcagcggtacggcttctatccacgcggccaaggcagatgccagttggacgtgcaacccgtgaccaagctgaattccggaaaattagtggctttcggccgcatcaaatcggtcagcggagtggcctactgcgccggccgcttgccggtaaatattgctattgacatgcaacagacggctcaacgcgagatacatcgtttgtggccgtcccagcagtgcagcatcgagccgattaagcattcacgccagaaggcattccacaacggagccggcatcctgatgactgtcaacacgacctccgacgttgtcctaggtgcttctgcattgggcaaaaagaggatcgacggacacgttctcggctcagaggcgtcgtgccaactgggcgactacatgcgcaaacaggtctgcgttgatgattacatgcaggaccagctcatcatctacatggccctggccgtgggccgctcaacgatgcgcacaggcaagctgaccaatcacacgcgcaccgccatcaatgtagccgagcaaatgacaggggtcaagttcgatgtggcgatggagcccggcggccagatgctagtcagctgcaagggcttgggacatgtgaacaagttgatttaacaatcgatagatctctttactctaaggaaaccttaaattaatgtctacatatatagagaatatacgtgtcctaaaggcgccggaaaatggccagaaaatgatcgcccttgtttcgaaccaccttagcgccctcctcgctgctttggtacagcttcggggtgatgggatcagcattctgtgggtttaaacgtaatgattaatgtgtgacttggctgcgtgatctcggttttgaactacgtacggcctcctcttcggtaagacgctcgtacagcggatgctcctccatatgtgtcactatccacttgtgcaagtcctcaacgtccgtcatggtgtacaacagaccctgggtaagcagactaagcagtaagcagaccgcatttcgagtactttcaggaaactgttggacttacccccttcctgaggatataggcatattcggagagtagagcctggttgataatacgccacttgtgcttggcgcgcttgaaatgtgggtccgggtagaggaagaacatcttctccagctggccctttacgaagtagttgggcagatacttcatggcgttggtgcgtaagcaggcaatgttctggtatgcacccgtatccgcgcatcgtcgacgcagtgccgcaatccggtccaccacgtagtccgacaccttgacgcggatttccatgccgatggacagcttctcggggaacatctcccccagggtgacgagaaagccgccatagccgcagcctatgtccgcaaaacttacctgctggccctgctgaatgcctgggtacatggagcgccagtccacatcttccgggcgagcaggactatgtgaaggagcctttagtgtgtgcagtccatttcgtggtctactcactagtcgaagctgtggtccgcaatgggattcgagtgcgcacgctggcggtagtagcgcttttgtggcaaccccgtcaccgccgacgtggggtttagcacatccggctcctggttctggccctgatcctgagcctgtccaccggtggccaccattactagaaattagcagaagcgagtgatatcaggcaccgacgaggagaagcagcagcacgttgcgaacgct

SEQ ID NO: 7937 - DNA, 1341 bp, DROSOPHILA
cccggatcacagtgtgccgtcccaatcgagtgaaatggagctgttattcttagcccctgtcattgtgatatttgattgctccgattgttctgacacacacttggctgacaacctgagaggaaaccagactgaaaatccctgaacataaataaattgggaaaatggacgcggaaaaaatgttggagatcgacggctcctacttggagggcggcgggcaggccctgcgcaacgccctcagcctcagctgcattttgggtaaaccggtgcgcgtggtaaagatccgggccagccgcccgagtcctgggctctcgcaccagcacctgcatgggctgaacctcctgcgggacataaccaatgcggacgtggtgggaaactacttgctctcctccacagtggagttcacgccgcgcaccattttggacaacacgtatcgcgtggaaacgcacacggcggccagcattactctgatttatcagatggcgctcccagtacttctctttgccggacgcccgtcccgcctgatcgtatccgggggcacgaacgtcgactttgcgcctccggtggaatacatgcaggaggtgctgctgcccaacctaaaacacttcggggttagtttcgacctgaaggtgcagcggtacggcttctatccacgcggccaaggcagatgccagttggacgtgcaacccgtgaccaagctgaattccggaaaattagtggctttcggccgcatcaaatcggtcagcggagtggcctactgcgccggccgcttgccggtaaatattgctattgacatgcaacagacggctcaacgcgagatacatcgtttgtggccgtcccagcagtgcagcatcgagccgattaagcattcacgccagaaggcattccacaacggagccggcatcctgatgactgtcaacacgacctccgacgttgtcctaggtgcttctgcattgggcaaaaagaggatcgacggacacgttctcggctcagaggcgtcgtgccaactgggcgactacatgcgcaaacaggtctgcgttgatgattacatgcaggaccagctcatcatctacatggccctggccgtgggccgctcaacgatgcgcacaggcaagctgaccaatcacacgcgcaccgccatcaatgtagccgagcaaatgacaggggtcaagttcgatgtggcgatggagcccggcggccagatgctagtcagctgcaagggcttgggacatgtgaacaagttgatttaacaatcgatagatctctttactctaaggaaaccttaaattaatgtctacatatatagagaatatacgtgtcctaaaggcgccggaaaatggccag

SEQ ID NO: 7938 - protein, 361 aa, DROSOPHILA
MDAEKMLEIDGSYLEGGGQALRNALSLSCILGKPVRVVKIRASRPSPGLSHQHLHGLNLLRDITNADVVGNYLLSSTVEFTPRTILDNTYRVETHTAASITLIYQMALPVLLFAGRPSRLIVSGGTNVDFAPPVEYMQEVLLPNLKHFGVSFDLKVQRYGFYPRGQGRCQLDVQPVTKLNSGKLVAFGRIKSVSGVAYCAGRLPVNIAIDMQQTAQREIHRLWPSQQCSIEPIKHSRQKAFHNGAGILMTVNTTSDVVLGASALGKKRIDGHVLGSEASCQLGDYMRKQVCVDDYMQDQLIIYMALAVGRSTMRTGKLTNHTRTAINVAEQMTGVKFDVAMEPGGQMLVSCKGLGHVNKLI

SEQ ID NO: 7939 - DNA, 3158 bp, DROSOPHILA
tttagtttgaaatccaattcaaattcaatactatcattttgtctcaatttggcacatttaaagctgacaatatatcgcccaacacttacgccccatcgaatggagacaaaaacctagaccttgggccagaccaaaactgatgcgaaatactgaagtccccggcatatacaattttcaatttccatttgatagctcaggtttcgaacaataaaacaaaatagagacaatggtcccgtagacaaaagtgcattttaagtcggtcgagtaacctcgtccgcctatcttcgtcatcaatatttacatattactctgggacattcaactgatctgcaaaaactacgaagctaaacaaaacttttgtattaatttaaacgacgatttgattgtccacttggcagccatggatatgcttgggtattttaattatatttacaattaaatgattaagtagtttctcaataaatgtttttactgcctgtatgaaaaaatctaaatataaatctataatcaaattcaatgaattaattgcaatattgagattgaagttagtatagttactagggatctgatgaatgaatagttatttgaattttgtttatattctgaaatcgtattagatacttgcttggagtgaacgcacacttaatatatattatatttataaggcaaatgttcaaaatgatatagttacagctcgactaacttgtttacaacaaatgcagatttttttttgtcgtatctgtatcacccattgttggggcttcctctcgctcgacttttgtggaaccccatgtaaagtcgatacaaaagcccacttgccacccagccaaatgaatccgaacaacctcttcgccacgcataacaaatgttttatgacccctcgactgttgcaactgtgttggctgctgtttcacgatttgtttccgattataaacaagttgggcccgtggattggtataaaaggccaggtgcccggttgacccatcatcacagcactaagaaactcggacagcgagggagcatccggcttaagacagctaaccagcagagagacacccacccaagcggcagcatgaagatatttgtggtgcgttggaacttggactacctctatgccaattggattacaagggattataatgattgcttctctttcagacggttctgatgggcgccatgtgcctgagcctcagccaggctgacatcagcttgacccaggcgggttacaactaccgcatccaacagcagcagcagcaacagcaaccgcccattgtggcccacctgttgaaccagcaactgcagcagcagcagcagctccagccccagcaatcctcgcacccggtgcttccacctctcccactgccctacctcccgcccgctggccagttccattctgcccagcctgcagttcgtcccacagccggatcgtttcccatgcccgccggcttccccgtcaatttccagaccgctcccatccagcagcagcgacgcgctcgtccgcgtgtcaggattcccaagcgtcccattgtgaccaaaaactttttcatccactcggcgcccgaggagtctgaggatgaggtccaggacgagctgaaccagttggcccagcagccccgtaaccactacaatgtgctgttcgtcaagacgccggctcagaccaatcgcgcggcggctcttaacttggccaagacccttaagcaggagaagaccgtggtctatgtgctggccaagaagacgaccgcctccgatctgcaggatgccattgccgaggcgccacagcacatcaataagccggaggtgttcttcatcaagtaccgcactccagaggaagctctgaatgcccagcggcagattcagtcacagtacgatactttgggaggaagttcgaccatcaccgacgagggtgtggcccccatcacctcggtggtgggatccctggatcctccagaggaggaggaggaggaacagcaacagcagcaacattcagagggacaatttgcggagaacggtgccggaaactctggcgtcggtcccatcggcaatcattatttgcccgcgaaccagttctaagtattcttcattgctcgtcacatccagatctagttagctgtcatcaacaccacttaggtttaagtgcttgccaatgttacccaaatccgtattaaaatataattgttaaaaaaaaaaccattgaattttaactagatgacgattttaagaagtgattaatagtactttaataagtcccactaaatgggaatgaatttagctttccaaactgaacgaacgtattattggaataagaggaatttttttggatccaaagtatgttctaggaaaacacattcaatacttgcacttaagctctggcggcttgtcttttgaagctggacatgtttcaagtacatccttcatttcagcaaaggactgcgcaagcgccttggcgatcttttggtgatcagttgcctgacaatgtcgccatgcggatatggccaaaatgatgtcatgttcacggggattgtagcaacaggcatatccatcttctacagaaggtccatatcccatgaaggcatcatatttggtggccacctgcgaagtggacattcgaaagtgcgtggactttacatatcctggcgaagagaagaactccggaacaggtaggcagttctccaccgccattagtttaagtccaaagaggtgacgatcgacaccctttcccagaagcgccagcttcgcatacatctgatggcacatcactgcctcgcgaatcttactagcccgctcctgagctgatgcactcacatcatccatggcgtggcaaaaagccagggattcattggagcacgaacggatggtttcggttcggccgccatcgaagatgcgcaaatgcgccgattcatattgagcagctggctcatagtgcaatttaaagaatgccaactgcaatgccatctgaacaaagctatctggaccaagtcgctgtttcttgatgaaatccttgccgtagcaatcgaacttaagaaccttcatttgcaggtcctggacaagtttgtccacgtttttttgcgcgattatcaaccattgctccacgcatttgcttacatcacagaactttattttcttcgctggaataaagttttccgatccgcattccccat

SEQ ID NO: 7940 - DNA, 1087 bp, DROSOPHILA
aaactcggacagcgagggagcatccggcttaagacagctaaccagcagagagacacccacccaagcggcagcatgaagatatttgtgacggttctgatgggcgccatgtgcctgagcctcagccaggctgacatcagcttgacccaggcgggttacaactaccgcatccaacagcagcagcagcaacagcaaccgcccattgtggcccacctgttgaaccagcaactgcagcagcagcagcagctccagccccagcaatcctcgcacccggtgcttccacctctcccactgccctacctcccgcccgctggccagttccattctgcccagcctgcagttcgtcccacagccggatcgtttcccatgcccgccggcttccccgtcaatttccagaccgctcccatccagcagcagcgacgcgctcgtccgcgtgtcaggattcccaagcgtcccattgtgaccaaaaactttttcatccactcggcgcccgaggagtctgaggatgaggtccaggacgagctgaaccagttggcccagcagccccgtaaccactacaatgtgctgttcgtcaagacgccggctcagaccaatcgcgcggcggctcttaacttggccaagacccttaagcaggagaagaccgtggtctatgtgctggccaagaagacgaccgcctccgatctgcaggatgccattgccgaggcgccacagcacatcaataagccggaggtgttcttcatcaagtaccgcactccagaggaagctctgaatgcccagcggcagattcagtcacagtacgatactttgggaggaagttcgaccatcaccgacgagggtgtggcccccatcacctcggtggtgggatccctggatcctccagaggaggaggaggaggaacagcaacagcagcaacattcagagggacaatttgcggagaacggtgccggaaactctggcgtcggtcccatcggcaatcattatttgcccgcgaaccagttctaagtattcttcattgctcgtcacatccagatctagttagctgtcatcaacaccacttaggtttaagtgcttgccaatgttacccaaatcc

SEQ ID NO: 7941 - protein, 297 aa, DROSOPHILA
MCLSLSQADISLTQAGYNYRIQQQQQQQQPPIVAHLLNQQLQQQQQLQPQQSSHPVLPPLPLPYLPPAGQFHSAQPAVRPTAGSFPMPAGFPVNFQTAPIQQQRRARPRVRIPKRPIVTKNFFIHSAPEESEDEVQDELNQLAQQPRNHYNVLFVKTPAQTNRAAALNLAKTLKQEKTVVYVLAKKTTASDLQDAIAEAPQHINKPEVFFIKYRTPEEALNAQRQIQSQYDTLGGSSTITDEGVAPITSVVGSLDPPEEEEEEQQQQQHSEGQFAENGAGNSGVGPIGNHYLPANQF

SEQ ID NO: 7942 - DNA, 4183 bp, DROSOPHILA
ctcaaacaagtccctccttccgctcgacagacgctggaaaatcaaagccagcggaagtgacttccggcggttaagattttccagcgcctgtgaagcgccgggagcgaacttgttggagtcaaactacaggctaccagggcgctacattcaataattaacacactaataatggttacaatttgtatggctctgtgtttgtgtatgtgtggtgggtggtttgagtccacgcagaacaactcattccccattctgttcttaagggccccccagtatcctgtagttggactcaaacaagtccctccttccgcttgactgacgctggaaaatcaaagccagcggaagtgacttccggcggttaagattttccagcgcctgtgaagcgccaggagcgaacttgttggagtcaaactacaggctaccagggcgctacagtcaacaattaacactcaaataatggttacaatttgtatggttctgtgtgtgtgtgggtgtgtgttttgcgtggactcattccccattctgttcttaagggccccccagtatcctgtagttggactcaaacaagtccctccttccgcttgactgacgctggaaaatcaaagccagcggaagtgacttccggcggttaagattttccagcgcctgtgaagcgccaggagcgaacttgttggagtcaaactacaggctaccggggcgctacattaaacaattaacacactaataattgttacaatttgtatggctctgtgtgggtgtgagttttgcgtggactcattcgcccatactgtagttcagtgctctagtctaggctaaagtaacgtctaggctaaggtgttccttgaaatgttaaatattactcttgaatgatatggaacctgcggctaaggaagggagcttggctttcggtcgccgttaaatagcttagtgtataacaaacgtaacagggtggttactatattccctgcgagacgctagacatctcctatctatctctctctctttcgttttcaatcgcctatacgattttggcttgtggagggggaggagcatgtggttccgccgtcagagtcgctgtgtttacctcgtttgccgatgctggtcccacaaatttggctggcttcagcaggataaacttgggatttggcaccgtcacctttttgcccaccgatgacggcgttatagtcaccgtgctcggcgcaattgcgttcatggcagctgtttgattgctggctgccaacgaggaggctggcacaatggtggtcacgccgttctcatgctgaatgctgctggcgctattgaatatagcacgcattttattgctattgccctgagatccgccaagtacgttgattttgagtggggttgctcctgtcgatggagtaccggttccggctccggctgcggttgcagctgcaattccggcttctctttgctgcacaatacgtgccgtaaactcgttgcccgccagcatcagattctgagattgtccagccagaggcaggccgctgactaggattagctgcaccctgccacccgtggttccgcgcagtttgcactcgtcctgctaaatagatttaaaaaaaaaaaaaaaaaaatataagaattagtcaaatgctctacagatatcaagcaaataagaaacacctaccgttggtgggctgaccgacttgcgctctagcacatgctcatcgaatcccgaatccgaggaattgtcgttgaacttggtggccaccgaggacgaggtggagcagttggacaaggaggacagcgacgagggcgacgcagcgcccacggagaccacttggctctgggcctgcgactgtggttgctgttgttgcatttggacggtgggcttgaggatcagggacagagtggaatgtggcttcggcgacagtggttggccgtccgtttcagtcttgctcattggaattggacttatgctatggatttcaccttgcggaaatgaccccgattgtcgcttgcagaacaaatgatgcttcttaagtggcccaatcgttggcaccttactttgaacttgagtggtgtgtggcgatgagttggtcgtgaccgttggagtggtcgtgggggttggagtggcatttaccgcctccgcctgctgatgttgcagctgaagctgcatctgctggtggcgtatgcgctggtgcttcgcacacggtttgtacagctccggatcgatgatgtagtaagtgctgccgagggataaactctggaagaccacaccgcaacagacctccaggcgaacgagatcattttcctcgaagaaggggatattgtcgacggaccgacgattcttttgtggcaccagctgacgacgtcggtagctgccggttaacttcggacgtttgttgttgggctccttcgattcgttggcagtcgctagtgcggcagccgcggttcgcttgcgcgtttgatatggtttatttgccggcagcgtctgctcatcatcgtagctctcattcgaatcgctgtgctgatgatccgaggtgggtgaagtgctgctaggtcgatttacagcactggtcgataatgataatgatgatggtcttgctgctgctgcttcagtcgccgctctctccttgctcttgcggttcttggcgaacttctcgggcaggaatgagttgccactgccattggcggccctgctcttcgcgtctgcgttgtcgcgcttcttctgtttggccatggacttggtgccgggtccagcacgggcatccaccacctgtaatgtgcgcaaaacgataagctactatttttctttttttttacatatgccttaatacttacatgaccccagtgacgcttactacctatgggtagtcgcttgtagcgcttgaccaaaaggacgcaggcgttgcagatttcaccatttcgaggctcgttaagattaaagcactgcatcgactccttttcgtacttgcgggaggcggtgaagcgcgagctgctcgacttggcccggcaaatgcaacatccatccgcagagcggtagacgcgtggcttatgaaaattgaacatggctttgttattggagtatgtttgtggttttgatatttgggttttcaatgttccgtggagatttcacaatgatttacgatgactatattttcctgttcttttttttctctcttttttacgcttttaatgtttttttcctcttttttttttttgacgcttttaatgttttgttttttttttttttttcctttttttacgcttttaatgctttttttctatttttttttacgcttttaatgttttttgctttccttgcttgatttaaaatgatgtttcttctttgtttttggaaagtgttttgagtggcaattcgggtttctgtgtttggtgtgtgctgcgacggtgttcactgttattgtgctagtgttatttgtgcgcgctttttccctttgcacccgttgttctgagcgcgtgcattgccaacatccattgtccaggcttcactgtagctggctgcatttgtgctgaaaagtaaaaaaaaaagaagcaaaatgagctaatgttgggtaattttcaaacgtcaagtgttgactaacgtcgagaggtacgcgaaacattgtctaacatttgctgaacagctgttggaagtgttgaaaagcgcccaaactgacaacatgtaaatgcacttatgcatatatgcatatgtatgcttcaagttcacaaaccaaaatgacagcaaaacatttaaacattttaaattttcgccacattgagcgcggcggagcgacaacaaatggtaatgctcacatatcgtatcagctgagcgtagcaagtgttttgggtttatttccagggcagtgctaattaaatttagcaaacctgttttacgtacagagtccaaaaataaaaataaaaacataacaagcgagcgcaataacaacggtggaaggtgtgcgagcgagatagctggctaagccacgcgcgcgctcctcacacacacaaacgcaacatttttcgtattgccggcaacacttccatatacgagcatatacacacacacgcgcgcatatttatgtttggctctgtgtgcgtgaggatgcaaatgcaatttttggctgtttttctggtggaaggaagggggggataaacaaagtgcgaaaagatacacttgaaatcgcgctctttcgctgcatttgcagaagtatgcgta

SEQ ID NO: 7943 - DNA, 2034 bp, DROSOPHILA
aaaaaaaaaagaggaaaaaaacattaaaagcgtaaaaaagagagaaaaaaaagaacaggaaaatatagtcatcgtaaatcattgtgaaatctccacggaacattgaaaacccaaatatcaaaaccacaaacatactccaataacaaagccatgttcaattttcataagccacgcgtctaccgctctgcggatggatgttgcatttgccgggccaagtcgagcagctcgcgcttcaccgcctcccgcaagtacgaaaaggagtcgatgcagtgctttaatcttaacgagcctcgaaatggtgaaatctgcaacgcctgcgtccttttggtcaagcgctacaagcgactacccataggtagtaagcgtcactggggtcatgtggtggatgcccgtgctggacccggcaccaagtccatggccaaacagaagaagcgcgacaacgcagacgcgaagagcagggccgccaatggcagtggcaactcattcctgcccgagaagttcgccaagaaccgcaagagcaaggagagagcggcgactgaagcagcagcagcaagaccatcatcattatcattatcgaccagtgctgtaaatcgacctagcagcacttcacccacctcggatcatcagcacagcgattcgaatgagagctacgatgatgagcagacgctgccggcaaataaaccatatcaaacgcgcaagcgaaccgcggctgccgcactagcgactgccaacgaatcgaaggagcccaacaacaaacgtccgaagttaaccggcagctaccgacgtcgtcagctggtgccacaaaagaatcgtcggtccgtcgacaatatccccttcttcgaggaaaatgatctcgttcgcctggaggtctgttgcggtgtggtcttccagagtttatccctcggcagcacttactacatcatcgatccggagctgtacaaaccgtgtgcgaagcaccagcgcatacgccaccagcagatgcagcttcagctgcaacatcagcaggcggaggcggtaaatgccactccaacccccacgaccactccaacggtcacgaccaactcatcgccacacaccactcaagttcaaagtaaggtgccaacgattgggccacttaagaagcatcatttgttctgcaagcgacaatcggggtcatttccgcaaggtgaaatccatagcataagtccaattccaatgagcaagactgaaacggacggccaaccactgtcgccgaagccacattccactctgtccctgatcctcaagcccaccgtccaaatgcaacaacagcaaccacagtcgcaggcccagagccaagtggtctccgtgggcgctgcgtcgccctcgtcgctgtcctccttgtccaactgctccacctcgtcctcggtggccaccaagttcaacgacaattcctcggattcgggattcgatgagcatgtgctagagcgcaagtcggtcagcccaccaacgcaggacgagtgcaaactgcgcggaaccacgggtggcagggtgcagctaatcctagtcagcggcctgcctctggctggacaatctcagaatctgatgctggcgggcaacgagtttacggcacgtattgtgcagcaaagagaagccggaattgcagctgcaaccgcagccggagccggaaccggtactccatcgacaggagcaaccccactcaaaatcaacgtacttggcggatctcagggcaatagcaataaaatgcgtgctatattcaatagcgccagcagcattcagcatgagaacggcgtgaccaccattgtgccagcctcctcgttggcagccagcaatcaaacagctgccatgaacgcaattgcgccgagcacggtgactataacgccgtcatcggtgggcaaaaaggtgacggtgccaaatcccaagtttatcctgctgaagccagccaaatttgtgggaccagcatcggcaaacgaggtaaacacagcgactctgacggcggaaccacatgctcctccccctccacaagccaaaatcgtataggcgattgaaaacgaa

SEQ ID NO: 7944 - protein, 622 aa, DROSOPHILA
MFNFHKPRVYRSADGCCICRAKSSSSRFTASRKYEKESMQCFNLNEPRNGEICNACVLLVKRYKRLPIGSKRHWGHVVDARAGPGTKSMAKQKKRDNADAKSRAANGSGNSFLPEKFAKNRKSKERAATEAAAARPSSLSLSTSAVNRPSSTSPTSDHQHSDSNESYDDEQTLPANKPYQTRKRTAAAALATANESKEPNNKRPKLTGSYRRRQLVPQKNRRSVDNIPFFEENDLVRLEVCCGVVFQSLSLGSTYYIIDPELYKPCAKHQRIRHQQMQLQLQHQQAEAVNATPTPTTTPTVTTNSSPHTTQVQSKVPTIGPLKKHHLFCKRQSGSFPQGEIHSISPIPMSKTETDGQPLSPKPHSTLSLILKPTVQMQQQQPQSQAQSQVVSVGAASPSSLSSLSNCSTSSSVATKFNDNSSDSGFDEHVLERKSVSPPTQDECKLRGTTGGRVQLILVSGLPLAGQSQNLMLAGNEFTARIVQQREAGIAAATAAGAGTGTPSTGATPLKINVLGGSQGNSNKMRAIFNSASSIQHENGVTTIVPASSLAASNQTAAMNAIAPSTVTITPSSVGKKVTVPNPKFILLKPAKFVGPASANEVNTATLTAEPHAPPPPQAKIV

SEQ ID NO: 7945 - DNA, 10594 bp, DROSOPHILA
ttaattctagttaggcctgaaaatcgcatatattatggccttggtacgtgatgtggcgatgctgaccccacatcctttgccatttttcgctgagtgcgggtgtgcgattcttggtgacggttttatggcctctccaaaactgtgctgataaagtaaacaaagttggtattcggtgcgctgacgttatgatttcgcaactgcaacggcggccccaacaataactgagaaagagttacaggcgtcaggggtgcgaacgacgtttgctgtgttttacaagaaactggttagatgtcacaacaaaaacagtaggagcaagcaaaattgcccgcctttgaggttcgtgtttgatttacaccccttattttcctgcaatgtggatttgttcgcaaccagtttgtcgttgtagttgatggggtttgctgctgtgagttaagtgtgctataaagatagctaatatccgctgcgaacgcgcgtttgcagtcttttttgaatgcccgactgcagtcggcaataagtagcgtggcttagattgtatgaatcaagtatctgcaaaagacgtgtacatttaagacatattctttgagctgctaaatacacgtaaattacatttgcgttctcgaatgccaatcacaattaaaatgaatggcaaggagcttaaattttagttttctttagacatttcaataatcattgttccttggagggcacatacaattcgtgtacgcctcgccgcctcctgaggtgcatcccaattccaatttttggcccactgatcatcttcggatcggagcttatcattttgtttttatgtagttgcaaccgtcgcttatcaagaaaagcggtcgttagctcgattgaaatgcgggtgtggatggtgaagagggggatgagggtctgactggaaggtgacggccatatgctcgcattctggaatagcactgataagagcgatttgacgctctcaattggttgaatgtgccaattcgtttgtttgtcggagtccggacgggttgcttctgacgtcacggcgtgggagtggagctatcgatttttgcgtaaaaatatcctgttgacgtccgttctttcagctctctccgctctcttctgtctctcactcacacacacaggcgcaggcgccacacatattgagtctggcaacttccctctccggtaacaataatacaattaaaagcgcctgaataaactataatctattaacttgtgtctgtcgaaagcagcggtgaggtaaagttactccatgagcgggctttaatggatttcgcgctcgctgctgcgtgtaatttccctacaattagcgcctctcttttgggtccgcttttggagagaacagtgggatgaagcacccatatgctgatcaaaatagtaccatatgctgtactaaatagtagtgtttttcattgtatttcctatgaagcgctgtgttaatcattagataaacaggcatttacctttggaaatcccattgatattttattgtaaacagtggctgaacaaatttagacttgaaacgtgagtgacgtttttcagtttgtcttcgccatatttaggggacgatactcttcaatttccccactgtgcgcggcgactgaggcagcggcagcggcggcggcagaggcgggcgaatgggcgcttaaggccaatcaacgcagcaaattttcaaacagttgacttttcgagcctgagctgcaacgacgacccacgacgaacggaggcccgacggacatataagaagagagcgagttgtgtgcgggagagagctgagaagaagcggaggaaaaataactgtttctcgctcaattcgcacgccagtgataaaaacaacataatctcgacaagattgcaaatcgcaagatgccaactctgggtctcctgttcgcctccatcggcattgccgtgctggcgatgggtgtgccgcattgcaggggctacaccatcaaggaggacgaatccttcctgcagcaaccgcactatgctagccaagagcagctggaggacctgtttgctggcctggagaaggcgtaccccaatcaggccaaagtccacttccttggtcgatctctagaaggacgaaatctgctcgccctgcaaatctcgcggaacacccggtcgcggaatctccttacacctccagtaaagtacatagccaatatgcatggagacgaaacggtgggcaggcagctccttgtttatatggcacaatatctgctcggtaatcacgaaagaatcagcgacctgggccagctggtcaacagcaccgatatctacttggtgcccacgatgaatccagatggctatgcgttgtcccaggtaaagaacgcaccgtcgcttcacctgttgtgttgttttgtccaactttcgggtaaaatcaataagtggaggagccgaagtgggagggccagtggatgggaacgaggctataagcctgagagaagacaatattgcagcagatgagagtggaaagcagttacaggatagagtttgctttattcccagccatttctgaaacccgataactaagctcatgcatatcaaacgtcagagttcataagtgttatctatacccaaacccgttcacacctccaacccttttttaaactttatacatacgcatgaaaaaggttgataaaatgttgggaagtaattaaaaagaatgctcaaatgaacacttgtttggtaagtcgcaaaaatgaccaaataggtatacatcttaccccaaactttgcaccttttaagccgtttcgttactccaaaacaaactctgctccccgaatgtttgcatattgcacacatacgcaccttttttaaactctgctcgttgtttgtttatcattttcatcttcaacgatgaaaatcgagcagtaagcatacgtacgtaattaatatattacttccccattcattttcattgtgctttatacatcacatggcatattcatctgtacagaaatggcccaaaaggaaaaaaaaactaagagtatgttgtaaaggatttttaaaaacgcgctatattctcttacacttggggaacttaagttattcttatgaacaattataaagttttaaatcacattttataaagaaacgaaaaacgtcaaactttatctgtagtacaagtaatctgtattctgtagaattcaaaaattcccattattcattccgtttaaagtgctaatgcaaatggcgatttctttgcggtacttaggcttccatttctgcacggattgtactttttatctgctttatcccacgtctatttgctagatttgttgcacattatggtgtgcggattttcattgattgattgttacgttgttctttacggagaaattgggtaaaaccattgcacaacattttttagcgaacttcgacgaacccttttcttcaccgcgattgtgttgtaatcattcagttgacacctgactgccatgctaaatggacaattccggtcagaactgacctgcatatcaatcagcccataacagagtgaaagagaaacttttaagtttagcgtaaaatcgtcattgatcaaaatcatcagcaaacgctttctgctgaaaatgaaatgatgatccaaataggtgcatatagcagcatttgagtatctgtaagctaattatctaaatgtatattgaatcttttaaagcttgctggccattaaaggtattatatgattttctgtgcaggaaggcaactgcgagtcgctgcccaactatgtgggtcgtggcaatgcggccaacatcgatttgaatcgcgatttccccgatcgcctggagcagagccatgtccaccagttgcgcgcccagtctcgtcagccggaaacagcagccctggtaaattggatcgttagcaaaccgtttgtgctctccgccaatttccatggcggagctgttgtggccagctatccctatgacaactccttgtaagtcctgcaaagggatgtttatccctgacttggagaaaaactaacaacttttcaactttgcagggctcacaatgagtgctgcgaggagagtttgactccggatgatcgggtcttcaagcagctggcccacacctattctgacaaccatccgattatgagaaagggcaacaattgcaacgatagcttctcgggaggtatcaccaacggagcccactggtatgagttgtccggtggaatgcaggactttaactatgcgtttagcaactgtttcgagctgaccatcgagttgtcgtgctgcaagtatccggcagcaagcactttgccccaggaatggcagcggaacaaggcatccctgctgcagctgctgcgccaggcacatatcggcatcaagggcctggtgaccgatgccagtggctttccaatagccgatgccaatgtctacgtggctggactagaggagaaacccatgcgcacttccaaacgtggcgaatactggaggcttttgaccccgggactctatagcgtgcacgcctccgcttttgggttggtcatctgcttatttctatcctggcatgcttgctaatgttgtaattattctataccccaatgcagttaccagaccagtgccccgcaacaggtccgggtgaccaacgataaccaggaggccttgcgcctggactttaagcttgcgcccgtcgagacgaactttgatggtattagcagtttttacagtccctattatttctagagagggatgcaacggaaatacctatatatatgcgcatatatattatattgggcagttccaaaatgctatacatatatccacatttagcgatgcatagtattctctgctctcctgccctctccgcactatccttgtactatatatgttatctccgccattcccgaatccagatatacaaccattttgcatgttcatttgctccctctcatttagaacctttatttgtttaccgcgagagctagcagaaaataaacaatgttggctgtcgtgtggatgaattggtttggttttgtctcgaatcttttgtacatacacttttttaatttatcttttaaaaacttctgtttcatttttatgtttttttcgcattttcatacgcttatatgccagcctatgttccttccacgccattacttcagacgcgcacatatttagtggatgcttgatttgtatatagagaacgtattaagaacaaacacgaagaaatagcaaaccaaataacgaaatgaaataaattaaggaaataagcgaattgtacttaggcaatatgcagaaattggcccacttatggtcatcgaatgacacattcccaatacgaatcggttatagctttatcaatattccccttatcttccgcacaccctaaaacatattgtcaagtattttagcaacgatgcaaaaaaactatgataaatccaaagcccactacatgaacctactgctaaatatactgtatactaaatagactgtatgcgcactctatggttagtcctatctggaatgattgttgagcatttatccaaaaacaaaagaacctacatttgatagtgaggcgaaattattatcaattccggtccgacgcgtgctcacgcatggcttttgatatatactatagacgagaacaggttacaatcaaatgaagaatattgcaatggcgagaaccttgcgaagtataaataaaatattaatgttcgcttgctgcgttttattttcattcattgctctttaattcggtctctaaatgaattttttgttttcgagcacattattggtgttttcaaaatctggtgcagtgttttattaatcactcgtttttgaaaaaaatgagattttatttgagatcattttcaattcattaatcatcgaattcaggacatattttttctttattctgatctttagcaattttactttctttttggtttcgcagtacgacttagtttttccatttttcttttgtttcaaaggccttatatgtagcctaacggtggagtcatggttagggacgttcaagaaactcccagtcacatctaaatgaaatttaaaatgtatctttcactaagtacctaaaaaaaaaaaaacaacaatttaaagcgtctgtgccaaatgtgaagatttcggaatggatttgtttatatatatatgtatgaccagcatacaaaagtcaagcagtttctttggtattttatcttaaataaatgtgaactatgaaattatggcaaaataaacgaacaaaattatgaatttgcttgtgcttctgattctgttgctaactctatctgctcccgtcgctagacgcttagacgcactgcatcatattctcaccggaacccgcatgatgcaccccattacaaaaactggcattgcactaaagacaaccttacccatttccgtttccgctcttcctatcccgcaggcaacttccggaaagtaaaggtcgagcgctctgagcctccacagaagctcaagaagcagttcaatgggttcttgaccccgactaaatacgaacaccacaactttacggcaatggagaggtgagagtttttcctaaaatgtacaaatatatttcaacggatcaaattgttcatctgcggaatgtgtcactcatgatcttcagaagttctaatttttcccttttattcgtaaattctttttcatttccagctatctgagggcgattagcagcagctatccttcccttacacgcctctacagcatcggtaaaagcgtccagggtcgtgatctttgggtgcttgagatttttgccacgccgggttctcatgtcccgggggttccggagttcaaatatgtggcaaacatgcatggcaacgaggtggtgggcaaggaattgcttctaatcctcaccaaatatatgctggaacgctatggcaatgatgacaggattaccaagctggtgaatggcacccgtatgcattttttgtacagcatgaaccccgatgggtatgagatctccatcgagggcgacagaaccggcggagttggaagagcgaatgcccatggaattgatttgaacagaaacttccccgatcaatatggcacggaccggttcaataaggtgacagagccagaggtggctgccgtcatgaactggacactgtcgctgccgtttgttttgtccgccaatctccatgggggctccttggtggccaactaccccttcgacgataacgaaaatgattttaatgatccgtttatgagactccgcaattctagtatcaatggccgcaagccaaatcccaccgaggataatgctcttttcaaacacctcgccgggatttattcaaacgcacaccccactatgtacctgggccagccatgtgagctcttccagaatgaattcttccctgatggcattacgaatggtgctcaatggtatagtgttactgggggaatgcaggactggaactatgtgcgggctggatgcctggagctaaccatcgaaatgggttgcgataagtttcccaaggccgccgagctttcgcgatactgggaggatcatcgcgagcctctgctacagtttatcgagcaagtgcattgcggcattcatggatttgtgcatagcaccattggtacgccgattgcgggagctgttgttcgtttggatggagccaatcattcgacctacagtcaagtcttcggtgactattggaagctagcgctgcctggtcgacacaatctcactgtgttgggggacaactatgcgccactacgaatggaagttgaagtacccgacgtccaccccttcgaaatgcgaatggatatcaccctcatgccagacgatccccagcattgggcatccgccaatgactttaggattattgaaaacgtagtcaacacaaggtatcacactaaccctcaagttcgcgcacgcctggcggagctggagaaccaaaatggacagattgccagctttggatatgccgattctgaatttggcacaatcttcaattacctcaaaatgacatctgatgtgagtgtgtgattatgtcgggaactcgtattagcttagctcccactcatttgattcttttgcagattggcgagcccgaggaacacaagtacaagctgttggtggtcagttccctatacgatacaacggctcctctgggaagggaaattttgctcaacctgatacgacacttggtcgaaggatttaagctgcaggacacgtctgtagtcgagttgcttaaacgaagtgttatctacttcctgccgcagactagcaagttccaaaatgtctttgacatgtacaacagcaagtgagtttgggtggactcgaaacattagtgcttagaatcttatttgttctctgttaatccacaacagcacctccatttgcgacccagtcctgggggatgagttagcagagcgcattcttggcccggagacagaccaggccaaggacgtattcctgcaatttttgcgtagcgaacgctttgatttgatgcttacctttggagcaggcaactccgacttgaactatccgaaaggggactcggtgctagtgaagtttgcccacagaatgcagcgaacggagttcaactactcgcccctgcagtgccctccatcggccacgagacagctccaccgggagaccaccgagagattgaccaatatgatgtaccgcatatacaatttgcccgtttacaccttgggcatttcctgctgccgcatgccgcaccaaaagaaaatcgcttccgtttggcgcaaaaacatcgataagattaagaactttttggctctagtgaaaaccggagtaagtggcttggtgcagaacgataaaggacaaccattgagggaggcctatgtccgattgttggagcacgatagaatcattaatgttaccaagaatgtggcgagattccagttgatgctgccccatggtctttatggcttggaggtaactgctcccaactacgagtcgcaaatgattaaggtggacgtagaagatggtcgagtcacggaattgggcattatacgcatgcatccattcacgttgattcgtggcgttgtcctggagctgccaaataacgataacagagccaccactagcattgcaggagtggtgctggatgagagcaaccacccagtgcggaacgccaaggtctcggtggtggggcagactcaattgagaaactttacaggcagcatgggacagtatcgtatatcggcggtacccttaggcaccatcactctaaaagtagaggcaccgcggcatctggaggccacccgacaaatgcacctgattcagggcggcttggccacagagaacgtggtctttcacctaaaagttaacgagcatgtctttggattgcctcgctttttgttcattttgtgcgccagcgttctgatcattgttggtgtcatcgtctgtgtgctatgtgcccagttttggttctatcgacgccatcggggggataagccttattataacttctcactgctgccgcagaggggtaaggagcagtttggccttgaggacgatgatgggggtgatgatggggaaacggagctctttcgatctcccatcaaacgtgagttgagccaaagggcacacttagtaaacaatcaaactaattattccttcattattcaggcggcatgaccatacagccgtactttgatgaggagcagctggagcggatcctgcacacggatgacgatgacgacgacggaccgcacatggagccagaacttgatgtggctgacgatagcgaagacgacatagtgatgttgcataacaacgggaacaagagacggcactagatgttctgatagatgttcccaatcaaacacaatctcgagtgacacaaccaccagggatcacctaatccccgatcgactttaaccacacacaacataactgtgattcaaaacgttttcaagagaaaccaacgctctccttttttgttatttttgtgtaatatctacccttaaaaggtgaaacactttatttttgagttttagtgttactgagcttgcacctagaatgcatcacaatcgtcagctttaaatagaaaatcctactacccactcggcaaatctctcgttcatgaccgtttatatagagatatacatttttatgttcagccaaaagaactgtatgcgtaaatgtaacttaaactaaagactgagagcctcataattctagcaaaaaaaaaaccataacaatttgtgaaaaaatattaaatctaatctagctaaaaagaaaccgaaaatcacagccaacaacagcagaagattgagtttgttttaatgaaaaaattaactaacaatgaatcaaaaacaatgtcaatattaaattatactaatttattaagcattgtcttcagaaagctaaattacttagcagctcattatacagaaaattgattcttaaagattaattttaagcttactgttttacaatttattaaaccatatttagtagcttttatcggaaattgaatggttactcccatgaactctaaccctctgtatgctgaaatcaggctttctaaaaatgattttaaatgctggaaaaaaatgtgcaagatcataacaaaaacagttaacagcttttgtaatattttgaatatgcccaacatataaaattcaaacgt

SEQ ID NO: 7946 - DNA, 4692 bp, DROSOPHILA
tccggacgggttgcttctgacgtcacggcgtgggagtggagctatcgatttttgcgtaaaaatatcctgttgacgtccgttctttcagctctctccgctctcttctgtctctcactcacacacacaggcgcaggcgccacacatattgagtctggcaacttccctctccggggacgatactcttcaatttccccactgtgcgcggcgactgaggcagcggcagcggcggcggcagaggcgggcgaatgggcgcttaaggccaatcaacgcagcaaattttcaaacagttgacttttcgagcctgagctgcaacgacgacccacgacgaacggaggcccgacggacatataagaagagagcgagttgtgtgcgggagagagctgagaagaagcggaggaaaaataactgtttctcgctcaattcgcacgccagtgataaaaacaacataatctcgacaagattgcaaatcgcaagatgccaactctgggtctcctgttcgcctccatcggcattgccgtgctggcgatgggtgtgccgcattgcaggggctacaccatcaaggaggacgaatccttcctgcagcaaccgcactatgctagccaagagcagctggaggacctgtttgctggcctggagaaggcgtaccccaatcaggccaaagtccacttccttggtcgatctctagaaggacgaaatctgctcgccctgcaaatctcgcggaacacccggtcgcggaatctccttacacctccagtaaagtacatagccaatatgcatggagacgaaacggtgggcaggcagctccttgtttatatggcacaatatctgctcggtaatcacgaaagaatcagcgacctgggccagctggtcaacagcaccgatatctacttggtgcccacgatgaatccagatggctatgcgttgtcccaggaaggcaactgcgagtcgctgcccaactatgtgggtcgtggcaatgcggccaacatcgatttgaatcgcgatttccccgatcgcctggagcagagccatgtccaccagttgcgcgcccagtctcgtcagccggaaacagcagccctggtaaattggatcgttagcaaaccgtttgtgctctccgccaatttccatggcggagctgttgtggccagctatccctatgacaactccttggctcacaatgagtgctgcgaggagagtttgactccggatgatcgggtcttcaagcagctggcccacacctattctgacaaccatccgattatgagaaagggcaacaattgcaacgatagcttctcgggaggtatcaccaacggagcccactggtatgagttgtccggtggaatgcaggactttaactatgcgtttagcaactgtttcgagctgaccatcgagttgtcgtgctgcaagtatccggcagcaagcactttgccccaggaatggcagcggaacaaggcatccctgctgcagctgctgcgccaggcacatatcggcatcaagggcctggtgaccgatgccagtggctttccaatagccgatgccaatgtctacgtggctggactagaggagaaacccatgcgcacttccaaacgtggcgaatactggaggcttttgaccccgggactctatagcgtgcacgcctccgcttttggttaccagaccagtgccccgcaacaggtccgggtgaccaacgataaccaggaggccttgcgcctggactttaagcttgcgcccgtcgagacgaactttgatggcaacttccggaaagtaaaggtcgagcgctctgagcctccacagaagctcaagaagcagttcaatgggttcttgaccccgactaaatacgaacaccacaactttacggcaatggagagctatctgagggcgattagcagcagctatccttcccttacacgcctctacagcatcggtaaaagcgtccagggtcgtgatctttgggtgcttgagatttttgccacgccgggttctcatgtcccgggggttccggagttcaaatatgtggcaaacatgcatggcaacgaggtggtgggcaaggaattgcttctaatcctcaccaaatatatgctggaacgctatggcaatgatgacaggattaccaagctggtgaatggcacccgtatgcattttttgtacagcatgaaccccgatgggtatgagatctccatcgagggcgacagaaccggcggagttggaagagcgaatgcccatggaattgatttgaacagaaacttccccgatcaatatggcacggaccggttcaataaggtgacagagccagaggtggctgccgtcatgaactggacactgtcgctgccgtttgttttgtccgccaatctccatgggggctccttggtggccaactaccccttcgacgataacgaaaatgattttaatgatccgtttatgagactccgcaattctagtatcaatggccgcaagccaaatcccaccgaggataatgctcttttcaaacacctcgccgggatttattcaaacgcacaccccactatgtacctgggccagccatgtgagctcttccagaatgaattcttccctgatggcattacgaatggtgctcaatggtatagtgttactgggggaatgcaggactggaactatgtgcgggctggatgcctggagctaaccatcgaaatgggttgcgataagtttcccaaggccgccgagctttcgcgatactgggaggatcatcgcgagcctctgctacagtttatcgagcaagtgcattgcggcattcatggatttgtgcatagcaccattggtacgccgattgcgggagctgttgttcgtttggatggagccaatcattcgacctacagtcaagtcttcggtgactattggaagctagcgctgcctggtcgacacaatctcactgtgttgggggacaactatgcgccactacgaatggaagttgaagtacccgacgtccaccccttcgaaatgcgaatggatatcaccctcatgccagacgatccccagcattgggcatccgccaatgactttaggattattgaaaacgtagtcaacacaaggtatcacactaaccctcaagttcgcgcacgcctggcggagctggagaaccaaaatggacagattgccagctttggatatgccgattctgaatttggcacaatcttcaattacctcaaaatgacatctgatattggcgagcccgaggaacacaagtacaagctgttggtggtcagttccctatacgatacaacggctcctctgggaagggaaattttgctcaacctgatacgacacttggtcgaaggatttaagctgcaggacacgtctgtagtcgagttgcttaaacgaagtgttatctacttcctgccgcagactagcaagttccaaaatgtctttgacatgtacaacagcaacacctccatttgcgacccagtcctgggggatgagttagcagagcgcattcttggcccggagacagaccaggccaaggacgtattcctgcaatttttgcgtagcgaacgctttgatttgatgcttacctttggagcaggcaactccgacttgaactatccgaaaggggactcggtgctagtgaagtttgcccacagaatgcagcgaacggagttcaactactcgcccctgcagtgccctccatcggccacgagacagctccaccgggagaccaccgagagattgaccaatatgatgtaccgcatatacaatttgcccgtttacaccttgggcatttcctgctgccgcatgccgcaccaaaagaaaatcgcttccgtttggcgcaaaaacatcgataagattaagaactttttggctctagtgaaaaccggagtaagtggcttggtgcagaacgataaaggacaaccattgagggaggcctatgtccgattgttggagcacgatagaatcattaatgttaccaagaatgtggcgagattccagttgatgctgccccatggtctttatggcttggaggtaactgctcccaactacgagtcgcaaatgattaaggtggacgtagaagatggtcgagtcacggaattgggcattatacgcatgcatccattcacgttgattcgtggcgttgtcctggagctgccaaataacgataacagagccaccactagcattgcaggagtggtgctggatgagagcaaccacccagtgcggaacgccaaggtctcggtggtggggcagactcaattgagaaactttacaggcagcatgggacagtatcgtatatcggcggtacccttaggcaccatcactctaaaagtagaggcaccgcggcatctggaggccacccgacaaatgcacctgattcagggcggcttggccacagagaacgtggtctttcacctaaaagttaacgagcatgtctttggattgcctcgctttttgttcattttgtgcgccagcgttctgatcattgttggtgtcatcgtctgtgtgctatgtgcccagttttggttctatcgacgccatcggggggataagccttattataacttctcactgctgccgcagaggggtaaggagcagtttggccttgaggacgatgatgggggtgatgatggggaaacggagctctttcgatctcccatcaaacgtgagttgagccaaagggcacacttagtaaacaatcaaactaattattccttcattattcaggcggca

SEQ ID NO: 7947 - protein, 1406 aa, DROSOPHILA
MPTLGLLFASIGIAVLAMGVPHCRGYTIKEDESFLQQPHYASQEQLEDLFAGLEKAYPNQAKVHFLGRSLEGRNLLALQISRNTRSRNLLTPPVKYIANMHGDETVGRQLLVYMAQYLLGNHERISDLGQLVNSTDIYLVPTMNPDGYALSQEGNCESLPNYVGRGNAANIDLNRDFPDRLEQSHVHQLRAQSRQPETAALVNWIVSKPFVLSANFHGGAVVASYPYDNSLAHNECCEESLTPDDRVFKQLAHTYSDNHPIMRKGNNCNDSFSGGITNGAHWYELSGGMQDFNYAFSNCFELTIELSCCKYPAASTLPQEWQRNKASLLQLLRQAHIGIKGLVTDASGFPIADANVYVAGLEEKPMRTSKRGEYWRLLTPGLYSVHASAFGYQTSAPQQVRVTNDNQEALRLDFKLAPVETNFDGNFRKVKVERSEPPQKLKKQFNGFLTPTKYEHHNFTAMESYLRAISSSYPSLTRLYSIGKSVQGRDLWVLEIFATPGSHVPGVPEFKYVANMHGNEVVGKELLLILTKYMLERYGNDDRITKLVNGTRMHFLYSMNPDGYEISIEGDRTGGVGRANAHGIDLNRNFPDQYGTDRFNKVTEPEVAAVMNWTLSLPFVLSANLHGGSLVANYPFDDNENDFNDPFMRLRNSSINGRKPNPTEDNALFKHLAGIYSNAHPTMYLGQPCELFQNEFFPDGITNGAQWYSVTGGMQDWNYVRAGCLELTIEMGCDKFPKAAELSRYWEDHREPLLQFIEQVHCGIHGFVHSTIGTPIAGAVVRLDGANHSTYSQVFGDYWKLALPGRHNLTVLGDNYAPLRMEVEVPDVHPFEMRMDITLMPDDPQHWASANDFRIIENVVNTRYHTNPQVRARLAELENQNGQIASFGYADSEFGTIFNYLKMTSDIGEPEEHKYKLLVVSSLYDTTAPLGREILLNLIRHLVEGFKLQDTSVVELLKRSVIYFLPQTSKFQNVFDMYNSNTSICDPVLGDELAERILGPETDQAKDVFLQFLRSERFDLMLTFGAGNSDLNYPKGDSVLVKFAHRMQRTEFNYSPLQCPPSATRQLHRETTERLTNMMYRIYNLPVYTLGISCCRMPHQKKIASVWRKNIDKIKNFLALVKTGVSGLVQNDKGQPLREAYVRLLEHDRIINVTKNVARFQLMLPHGLYGLEVTAPNYESQMIKVDVEDGRVTELGIIRMHPFTLIRGVVLELPNNDNRATTSIAGVVLDESNHPVRNAKVSVVGQTQLRNFTGSMGQYRISAVPLGTITLKVEAPRHLEATRQMHLIQGGLATENVVFHLKVNEHVFGLPRFLFILCASVLIIVGVIVCVLCAQFWFYRRHRGDKPYYNFSLLPQRGKEQFGLEDDDGGDDGETELFRSPIKRELSQRAHLVNNQTNYSFIIQAA

SEQ ID NO: 7948 - DNA, 5897 bp, DROSOPHILA
ctactctttgagatgtctatagaatttcgttcattcttaatttcggtatgtcatcaagatttgaaatacatttatactttctgtataggtggtcgacaaggtagcatattgtagtcttatatatctgcctatttcagaagtttaggatagggggagaggggtgtaaattaaccttatttacggtccctggttcttagtttgtttttaactttttcaaagttctctatcataaacgcacaataattgggttaggtaaaaaaaaaatcgactgctaggttggtaaaattaattgtgcccgtacagcacctttttatctaaatcaaatatataatattcaagttgagatcgcttcgaatttctgtacttcgatattctatatacataaaatacttatttctagtacaactttcatttccaaaaactacctctctttcatttccatgaagcttccaactatctcgctctctttcacaccgccatcgctatctctttctaagttgtgtgaacgtgatttaaaccattcaatttctacatcgaaacattgatatttaaaatacattctgctctaagaactacaataactttaaactagttctgtttcattaaatatccttggtgagcaaagggccatgaaatggattccgattgaccttggccgccagattgaatagctgctctatttttgagaaagatcttaagcctataaataaatggttggctatctgatcacttgtcgatatacttattgtttccattttgaacacatttgaatttggtttgagaaaatcgcaggtgcgtcagttagagtttgatctttcggagacgctatccaacctggcagcaagtgctcggaccctttgctaccaacccctgctttttgttctggctaaaattgttttaatcattggatgtttttctgcttagacggactctaatcgaattggctggcattgaacgtggcaatgtgacttaagtaatatcctaaacgctttgaactcctctacttgttgttgttctcctgcatcagatcctcgagagcaccgttgagccgtcccttgctgagtgcctccaccagcatatgaagtctctcctcccgctccgagtgcctcctttccaaaagcgataccttgaaatagtatttaagtccaagaaattagtgacgaagccactgtatgtaactgtttatttcacattgaacaatcaaacctccatatgacttgttctctttattcttgaagttgcaatagatcttgattgtttcagaaagtttaatgctagggcttctgtaccttggctttcagggcatagtaatccacgggcaccttgcgccgcttctgggtggtcagtgcctcctcccgctcgttgaggcgctgctgcagtatacgcacggtctcgttgcaggaggccagttccctttcgtgggcactctgcagggtcttcagctgaatgccagaattaagtgtttaacaagtgagtagtagtcaagtgtggtgtgatcacttacatcctgcagccgcttgtcatgaagagttttatagtcggcctccagcagacggtacttgttttgggcctccttcagagcctgactttcggtggccgccggaatgtgatcactgtggtgatggtgatcatagccactggagcgcctctgctgcatggctccgccgctagcctgggaccttagatccagtttgctgcctgggaatgtcagatggacaatatggcaaatataataaatctaatataacgcataatccaattatgtaagctactgaaacggcggggttcattgagcttcgtgtggacaaatttttatacaaattgttcataaaaaagcgtattgcataatccgacagttatgaagagcgatttacattttttacacgcgcgtacgaaattaaaacactcgctgatgatgctatttatacggttaccgtcgtccgcttttggcatttacaattattaacaaaacaaatttgacggaacgacggctcattaattagctacaaaaaaaaacgcacaaaaataagtacaaacaaacgcagaaaaataagtaataaaaaccacgcttagcttttggccaacgacagaggcggctaacaagtcatggcattataaaacgaccatttcgccggcgacgggagcggggtgaaagaaagaggagatggggccgcagagaagacctgatccaatccaagtcgatccccagcagcgtccaccgacccgccgccaaaacaaacccgcgtctttgactttgactttcgctttcgaattttctttttcgatggcgcagccacaccgcaatagcaacagcaatagcaatagcaatagcaacaagaaatttaaatccgaatcgaccaaaggtaaataaacaagcgtcaggccgcacaggtgacataaccaagtgcccgagatggggtctcccactccgccctccactccgtgtttccacatgtatctctcggacggtcggtgtctccaacttcgactctgtggcttcagtttcgttttagctgtttgttttaaccctagcacagcactttttgttaaacaaagcaactaatatttcgtatataatattacaaagcaaacgaatatttcaaatatagttttaacgaaacgattgtttcagatgaaattataataaataattttcaatactagcacacaaataatttacagagctcttcttcgagagcctccatttaacccacgatgatcagagggttaaggcgtcttggcctggctgaaacgtgtttgtcttggccattggccgatggacgcttagccgcttagttgcgctgcaattgccgtttgaaacgagtgcaaaaagtggtcaaaaggccgacagcgtcgacagccgtacaatgatttattccagcaatttatttgccgtctctagaagcggaatggcggagaggggttcccagcttgcggacgttccggggtagcggggtctgggaggagtgggcactaggcagcgggcagaggggcagaggggggaggggaactaccaagtgtacgtgctgaccgggcagagaaagtccataaattaccagccatccatcggcgaccgagtgacacaagcacaaccgaaattagagaggggctatgggatgggtttttcgatttgattttgaattcgaatgggggatggggatgtgaacttcgagtttggagggaatcgaagcgatgcgatgcgatgcgatgcttacctgtttggctgccggagccactaccctccttgtcccgctgcagcttccgtatggtctttttgcattcatccaactcccgtgttaaacgctgcattgccttgtttttaatggccagatccacgcgcatactcctcacggagctgagcaactgtgcctcctccttggatcctccgccgccatggctgagcagtgagagcgttgagtccgactgcgagatgggcagctttgaggggcccgcggtgaccagtggcgaacgcctttgaccgccactttgtttcgagttcggacgcgacgtgttcggcgtggaattggcggtgctgctggtgctgctgcttgcggacggggcatgtggatggaggtggccatgcgcttggtggagatgctgctgctggcacacaagtgccggcgaggggcagccaatggtattggtactatgatcccgcgttccattcgccgcctgggtttgggtgcccattgtgttcgagctaaccggggtagctcgtccgtggtttactccaccgccgactgatacatcatcctcttctaatggctcagtttgggtgcaattgttgtagtatctatccgccctcttttgcatataccgatctagggtgcgcacctgtgattctatctgctcgtttagttttgtgtttatctcctgaaggctgtacatatataaaaaaaaaacaaaaaacatgattattcaatgttctttcgagcaacttcttatctagaacccaccttaaaacctgcgtctccaggtccgcgatgtgagtctcatatttggcctgcaccgaattgaagcgcgcctggacattggccagaatctgttgcgccttgcgatcctgctccttggcatccgattcgagctgggcgatgcgctgctccagcagtttgcgactattcacgttctcctggtcgttaagcggacacatgcccgaactcttggacgccactagaggaggaatagaataagaaaaagtttaaaacctaacttcagttaggtttagtctaagcgcacctatcagagcggacacggagtccggatgcttgcgcatcagtatgcgctccatctcgcggcactggcgttgcagatcctggatgacgcggctgtccttctctttaccctcaccagttcgccgccgctcctggttcgcctcctcgagttcatctcgcagggagcgctgcatctggagcgcctcgccacgatccctgcgagccgcctgcagttccgacctcaagacattggcgcactcattgagatgctgcacgtccagctttagcatctcggactcctcctgcagccggctgttgtgctcccgcagcgcacgttgcgtctgcgacagcgagtcgctctgaaggcgaacggaggccagacgctcctcggtgtccttgagtcgctcctgcagttgctcgatctccagcttaagcgcatgctcccgcgaaacactactggcgatctgctcgatgggtgaggtcaaggtgctgaccatgcgcttgggtgagctgcccaccgccttctcgctgtagctggccatcggtcgaatcggctgactgggctggatgtatgaacgcccttgactcttaaactgcctttcaggcggactcctgacctctttgccagtgtcctcagctcgcgaaaatatgggggcgtccacctccgcctcggtgatctcctccatctgcaaataatatgtaaacagaaatgtagaacataaatactggggaaagtagaaaatatttcctccacattttctgcagtttactcatgctccacttaactattatttagaaaaccattttaaaagtcttagtttttcctcgcaaattttaagactcacacctttacatctcatttacgtgaaagatgaagaggttcgatgagtcggggccacggggacatgtgaaagtgcaggggaggtgctcctggggtgtggcagcttaacggttatgggccacaaaacgagccgtgaaggtgcgcgttgcgagaataacaataatacttaatacttgtcgtcgctgggcggtttctttcggtgcctccatcatccatcctctggggagatggcgagcagagcaggccagtggaagtgtagaaatacacaacacaatgacaactttatgtccaagtggacagtggatccaaaagctcaatttcggacagaggcgatttcaaatttgcaatctaagtattaccattcttgagcaaaatatatgtaattaaattatatttcagttgtatttcatgactgcaaacttaaatggagttgcaaaaacgaaagacttaggcaacgaacttgctatgggtatgagttttggcccactgtgcgcggcagcaaccctcgtcaaacgctatcgactgtcaagtggcaccatgggtcttatgggtgcccgtaagcgtaaggagataattgggatgatgtgggcgtgcagcagcaccagcagcggcaaccacaacaacaacaacaaaaacaacaatgcactcgacaaaaagcagcgaaatatcgatgaagaaagaaagttcgtggcaccgaacctcccactccgcccaccatcgcccattgtcccactgtgctcgtcggcatgtctgtgtgtgtgtgtgtgtgtgtgtgtgtgcattggttttgaagtggcctttttcggcattttgccgccagcgattgactgacattcgctgcccac

SEQ ID NO: 7949 - DNA, 2013 bp, DROSOPHILA
atggaggagatcaccgaggcggaggtggacgcccccatattttcgcgagctgaggacactggcaaagaggtcaggagtccgcctgaaaggcagtttaagagtcaagggcgttcatacatccagcccagtcagccgattcgaccgatggccagctacagcgagaaggcggtgggcagctcacccaagcgcatggtcagcaccttgacctcacccatcgagcagatcgccagtagtgtttcgcgggagcatgcgcttaagctggagatcgagcaactgcaggagcgactcaaggacaccgaggagcgtctggcctccgttcgccttcagagcgactcgctgtcgcagacgcaacgtgcgctgcgggagcacaacagccggctgcaggaggagtccgagatgctaaagctggacgtgcagcatctcaatgagtgcgccaatgtcttgaggtcggaactgcaggcggctcgcagggatcgtggcgaggcgctccagatgcagcgctccctgcgagatgaactcgaggaggcgaaccaggagcggcggcgaactggtgagggtaaagagaaggacagccgcgtcatccaggatctgcaacgccagtgccgcgagatggagcgcatactgatgcgcaagcatccggactccgtgtccgctctgatagtggcgtccaagagttcgggcatgtgtccgcttaacgaccaggagaacgtgaatagtcgcaaactgctggagcagcgcatcgcccagctcgaatcggatgccaaggagcaggatcgcaaggcgcaacagattctggccaatgtccaggcgcgcttcaattcggtgcaggccaaatatgagactcacatcgcggacctggagacgcaggttttaagccttcaggagataaacacaaaactaaacgagcagatagaatcacaggtgcgcaccctagatcggtatatgcaaaagagggcggatagatactacaacaattgcacccaaactgagccattagaagaggatgatgtatcagtcggcggtggagtaaaccacggacgagctaccccggttagctcgaacacaatgggcacccaaacccaggcggcgaatggaacgcgggatcatagtaccaataccattggctgcccctcgccggcacttgtgtgccagcagcagcatctccaccaagcgcatggccacctccatccacatgccccgtccgcaagcagcagcaccagcagcaccgccaattccacgccgaacacgtcgcgtccgaactcgaaacaaagtggcggtcaaaggcgttcgccactggtcaccgcgggcccctcaaagctgcccatctcgcagtcggactcaacgctctcactgctcagccatggcggcggaggatccaaggaggaggcacagttgctcagctccgtgaggagtatgcgcgtggatctggccattaaaaacaaggcaatgcagcgtttaacacgggagttggatgaatgcaaaaagaccatacggaagctgcagcgggacaaggagggtagtggctccggcagccaaacaggcagcaaactggatctaaggtcccaggctagcggcggagccatgcagcagaggcgctccagtggctatgatcaccatcaccacagtgatcacattccggcggccaccgaaagtcaggctctgaaggaggcccaaaacaagtaccgtctgctggaggccgactataaaactcttcatgacaagcggctgcaggatctgaagaccctgcagagtgcccacgaaagggaactggcctcctgcaacgagaccgtgcgtatactgcagcagcgcctcaacgagcgggaggaggcactgaccacccagaagcggcgcaaggtgcccgtggattactatgccctgaaagccaaggtatcgcttttggaaaggaggcactcggagcgggaggagagacttcatatgctggtggaggcactcagcaagggacggctcaacggtgctctcgaggatctgatgcaggagaacaacaacaagtag

SEQ ID NO: 7950 - protein, 670 aa, DROSOPHILA
MEEITEAEVDAPIFSRAEDTGKEVRSPPERQFKSQGRSYIQPSQPIRPMASYSEKAVGSSPKRMVSTLTSPIEQIASSVSREHALKLEIEQLQERLKDTEERLASVRLQSDSLSQTQRALREHNSRLQEESEMLKLDVQHLNECANVLRSELQAARRDRGEALQMQRSLRDELEEANQERRRTGEGKEKDSRVIQDLQRQCREMERILMRKHPDSVSALIVASKSSGMCPLNDQENVNSRKLLEQRIAQLESDAKEQDRKAQQILANVQARFNSVQAKYETHIADLETQVLSLQEINTKLNEQIESQVRTLDRYMQKRADRYYNNCTQTEPLEEDDVSVGGGVNHGRATPVSSNTMGTQTQAANGTRDHSTNTIGCPSPALVCQQQHLHQAHGHLHPHAPSASSSTSSTANSTPNTSRPNSKQSGGQRRSPLVTAGPSKLPISQSDSTLSLLSHGGGGSKEEAQLLSSVRSMRVDLAIKNKAMQRLTRELDECKKTIRKLQRDKEGSGSGSQTGSKLDLRSQASGGAMQQRRSSGYDHHHHSDHIPAATESQALKEAQNKYRLLEADYKTLHDKRLQDLKTLQSAHERELASCNETVRILQQRLNEREEALTTQKRRKVPVDYYALKAKVSLLERRHSEREERLHMLVEALSKGRLNGALEDLMQENNNK

SEQ ID NO: 7951 - DNA, 5670 bp, DROSOPHILA
tacgccttgcagtggacgaagtggtcaaggccaccatggcgacaattacaacgacatcgcccaatgaaacccgccaggcgactgaccatttgactccggtggcctcgcgtcaagaattgaaagatcagctcctacagcgtagcaaggaggacaagatgcggcatcagctgaacacgcccaccacccaattcggacgagctctacaaaagactctgcagcttatcgaaacgcagattgtacaggatcatctccgtgcgctgcaggatgcaccacctattcacgaactttttgtgttcagcgacattgctaccgtgcggcgaaacataattggtgctccgcgggctgcactgcacactgccctgaataatccacatttttacatgcagtgcaagtgctgcgagctacaagatcaatcactgctggttggcacactgcccgatctctccgtggtttacaagctgcacctggagtgcggtcgcatgatcaaccttttcgactggctgcaggcctttcgatctgttgtgagcgacagcgaccacgaggaagtggcccaggaacaaatcgatccccagatccagtgagtaaaaaaatggatttctctctgtaatatcatcaatttcatttggttttcctttcaaccagggcccgattcacgcgtgccgtagccgagttgcagtttctggggtacattaagatgtcgaagcgcaagacggatcatgccactcgattaacctggtagctcgctcgggctatgaataaccaaaatcccttaggtatttttatcttttctatttatttatattggggcaaatttcatgtgtgggacgttatgaataaataaaacatcaatcgatttgtctactctgtacgaaatgcattaactttgtttgcgagtgaagcgcgttcttgtattttttaagtaaagcccagcagctggcaaggcaagcgtactaaatatcaattaccagtcttcccgactagcggttaccacgttccctgttcacattagtttcagagtctcgatggcggcagcgatgcgttcgatctctgcccgcgactcgcagagttttgtctcgttggcctcctgcacctcggcgggaaccttagttgcgtagtcggcggcctggatggcctgagttagcttgcccaccgtctgcaccagctggtcgctcttcttctgcagcttggctatctccttgtccgcctccacgagtcccttgagcagcaggtgcacctcgcactggcccgtcacggtgaggatcgcacagccctgcggtgcgggactgtcaaagaccacattggagcagtaggagattgtggccagatcgctggcgtagcgtttgagtatttcactgggcaccgaatccgtgcatactatatacacctcggttttaaccttgttgggcagattatagtcggaacgggcagatcggatgattcgcgccgccttctgcacaaattcaacgtccgattctatctttgtgctgcgccaggatgtattgcctagttatgaggaagttaaatttatttgaattctatcatcatgaagaaatcaaatgcgacttactgggatagctagccacgcaaatgctaggagcgggatttgccctcggaagccgctggtaaagttcctccgtgatgaaaggcatgaacggggagagtaagcgcagtccataatctagacatacgtagagcgtgcgccttgcggcggtctgctgctcctcgctgccgctctggaagatcggcttcagacactccaaatacacgtcgcacagatcgtagagccagaatgcgtagcaggcgctggtcgctgcagcaaagtcgtacgactcaaagccggtgttgcaagcttctatggcagctgccaagcgtgacaggatccaggcgtccatctggttgatcgctgcagacgcacttagctccgtgtcaaacttctcagagccggtgaagtacagcagggcgaacttggtggcgttccacagcttgttgcagaagaaacgatatcccagaacgcgattgatgtccaggttgatgtcgcgcgcttgcgtgatataggcgcacagcgcgaatcgaagtgcatccgagccgcactcgggaattccctgcggataatcctgtttctgtccagccttagccttttcgatctcccgaggatccaggttggagcccacaagttgagcatgcagtccctcgagcgtaatgccacgaataacatccataggatcgataacatttcccagggacttggacattttgcgtccgtgcgcatccctcaccatggggtgaagatagacctccttaaacggcagtttgcccagcagcttctgtccaaagaataccatgcgagccacccagaagaagagaatgtcgtgacccgtctccaacagcgatgtgggatagaacgtttgcagatccttagtttggtctggccagccaaaaacggagaagggaaagattcccgaactgaaccatgtgtccaggacatcttcgtcttgtttcagtactatcttgctggcgtccactccaaaacgttcggctgccttggtcagagcctccgcttcgctgcgtgctacaatccagtactgctcgtcgtcgttctaaaaatgaaacaaataggaaaattttaatttgtctaatttaaaagtgttgtctataatttatagagttatgttttggttttttacgcaccacacttccatgagcagactaagatatccaacgaaatatattacccatacaaattattattatccaaagtagatttactcaccgatccagtttgaagagaagggtcggtgaagctgacatggtatgccggaatccggtgaccccaccacagctgcctcgacacgcaccagtcgcgaataccgtccatccagtggtaccacgtcttggtgtgatgctccggaatgatctttagttctccggagcgcactgcctcagtggcagaggctgccatgtccgagcaactaacataccactgcggcttaatcagcggctccaccacgtccttggagcgactgcagatgggcaccaccatcgggttgttcaatgtctcgcggtatagattcagggccttaagcttctccaggattttcttgcggcactcgaaccgcttcattccagtaaactctccgtagtcgccgattatgtagccgtcgtcgttgaagattgtaatgaagggcaaattgcagcgcttgcccacctcgtaatcgttgggatcgtgggctggggtgatcttcacagcacccgtaccgaaagccatgtccacgaactcgtcacagacgattggcaggcggcgcgtggagaacggatggactacgaacttgccatgcaggtgcttgtaccgatcgtcttggggatgcacagccacagcagtatcgcccagcatagtctcgatacgggtggtggctacaatgatctcttcgtcactgccttccaccttgtaggcgaactttattagaacaccaaattccactttgtcctcgtatccgggaatggagaggaatgtgcgaccgggaatctccaccttgtccacttcaatgtccgaaatagccgatcgtagggtgcacgaccaattgaccagtcgggagctacggtagatgctgccctcctcgtgcaatcggacgaaagcctcggtaacggcgcgacagagcttggggtccatggtgaaggccactcgggtccagtcataggaggagcccagggacttcagctgctcatagatgcgaccgcccttttcccggcgccagtcccagatgcgctcaatgaacttttcgcgacctaggtcgtgccgcgatagcttctcgtcgcgccacaatagcttctctaccaccacctgggtggcgatgccggcgtggtcgcaaccaggcacccatagagtggttcgtcccttcatgcggtggtagcgcgtgatggcgtcctcgatggcgttggtcagggcgtgacccaaatgcagagagcccgtcacgtttggtggtggaatgatcatcacaaacttgccattgggattgggggcgtctatggatgcgcgctaaatgttcaaagagtattagaaaccagcatttaaccaaaaccaaggataaactcactccgtactcgggcgtgaagaagccctccttctcccaccagctgtaccactgtgcttccacataccgtggactgtaggcatccggcaaggctccactcagatccttcttctcaccgggcgcggtttgggccgtgtacacggcagcctctttcacctccttggtgcgcttctgcaaagtaaagtaattcgagcattacatataagtagcactcgctttcaccagtaacaatgggcagcaattactgcctctcacttggccacataacctcgatttgagatcacaaaataggaggcacttttgggatggatttttcactaacctcgggcttctccttcttctcacccgctgctggagcagccgcagccttcttgtccagcttcgcctgcagcttggccagcttctccgccttcagacgctccttttccagttgcttggccgtcttgggaggatcacccccggctccggctggtgcgttggcatcgttctgctgttcagcctcgggcatttttcagttgatctcaggattaaatctggatagtgcaactgtaagttaaatgacgaaatggacgaagtacattactcacatgcagttagactggagtcgcagaaaaacatatgaaaacgtgtgcagtttgggaccagggttgccaacagatattattattttgaattccatttggcacataacatttaatcatttttaaaaggtataaaaactgaatttatgatttatattaagtgtattttaaaattcttatgtaagattaatattttgtatacataaattctttaatattcatttatttttaaacggaaaaacaatagaattttatcaccttttaaaatataaggtgcttcaaatatttagaaatcaatgataatatattttacgataactaaatacgactatattttaacatgttgtataaatattttaaaagtttttaaatttttccagtatgaaaaagatttaaattatataaaacaatctgaaattgcttactccggaatcaaaacttaaatggtcaagttattccaaaatatattttttatatcttaaatgctttattttgttaaaagctttaacgaaaatgtagtttaacagcactgtcggaattcgataggcctgctcaaaatttagattgcgttatcgctgcaatctggtcacacttacagtcgtgttttttggtgtttttgtatgggaagatttttgcgaaaaataaattcagaagctagtgtattgtgtgttgttcctttgtgaaatgtaaagtgggacgaacatcagagatcggtaaatactatcacagtgtaccaccccataaaatgacaaactattccgtttagtgtaagtgctcccattcgagtgtgtgtccattggactgcagaggaagcgtctgataagcagccatcttcctataagaatggcaaggaaattcctgccaaatttatataaattctaagaactactgtcgtgcagcgatagcatggccgttctagccgctcacgagatcgaaaaacaataggtttagcaacacaacaacaacaacacactcgcagacatgtgcaaccgaaagctaat

SEQ ID NO: 7952 - DNA, 3224 bp, DROSOPHILA
taatgtacttcgtccatttcgtcatttaacttacagttgcactatccagatttaatcctgagatcaactgaaaaatgcccgaggctgaacagcagaacgatgccaacgcaccagccggagccgggggtgatcctcccaagacggccaagcaactggaaaaggagcgtctgaaggcggagaagctggccaagctgcaggcgaagctggacaagaaggctgcggctgctccagcagcgggtgagaagaaggagaagcccgagaagcgcaccaaggaggtgaaagaggctgccgtgtacacggcccaaaccgcgcccggtgagaagaaggatctgagtggagccttgccggatgcctacagtccacggtatgtggaagcacagtggtacagctggtgggagaaggagggcttcttcacgcccgagtacggacgcgcatccatagacgcccccaatcccaatggcaagtttgtgatgatcattccaccaccaaacgtgacgggctctctgcatttgggtcacgccctgaccaacgccatcgaggacgccatcacgcgctaccaccgcatgaagggacgaaccactctatgggtgcctggttgcgaccacgccggcatcgccacccaggtggtggtagagaagctattgtggcgcgacgagaagctatcgcggcacgacctaggtcgcgaaaagttcattgagcgcatctgggactggcgccgggaaaagggcggtcgcatctatgagcagctgaagtccctgggctcctcctatgactggacccgagtggccttcaccatggaccccaagctctgtcgcgccgttaccgaggctttcgtccgattgcacgaggagggcagcatctaccgtagctcccgactggtcaattggtcgtgcaccctacgatcggctatttcggacattgaagtggacaaggtggagattcccggtcgcacattcctctccattcccggatacgaggacaaagtggaatttggtgttctaataaagttcgcctacaaggtggaaggcagtgacgaagagatcattgtagccaccacccgtatcgagactatgctgggcgatactgctgtggctgtgcatccccaagacgatcggtacaagcacctgcatggcaagttcgtagtccatccgttctccacgcgccgcctgccaatcgtctgtgacgagttcgtggacatggctttcggtacgggtgctgtgaagatcaccccagcccacgatcccaacgattacgaggtgggcaagcgctgcaatttgcccttcattacaatcttcaacgacgacggctacataatcggcgactacggagagtttactggaatgaagcggttcgagtgccgcaagaaaatcctggagaagcttaaggccctgaatctataccgcgagacattgaacaacccgatggtggtgcccatctgcagtcgctccaaggacgtggtggagccgctgattaagccgcagtggtatgttagttgctcggacatggcagcctctgccactgaggcagtgcgctccggagaactaaagatcattccggagcatcacaccaagacgtggtaccactggatggacggtattcgcgactggtgcgtgtcgaggcagctgtggtggggtcaccggattccggcataccatgtcagcttcaccgacccttctcttcaaactggatcgaacgacgacgagcagtactggattgtagcacgcagcgaagcggaggctctgaccaaggcagccgaacgttttggagtggacgccagcaagatagtactgaaacaagacgaagatgtcctggacacatggttcagttcgggaatctttcccttctccgtttttggctggccagaccaaactaaggatctgcaaacgttctatcccacatcgctgttggagacgggtcacgacattctcttcttctgggtggctcgcatggtattctttggacagaagctgctgggcaaactgccgtttaaggaggtctatcttcaccccatggtgagggatgcgcacggacgcaaaatgtccaagtccctgggaaatgttatcgatcctatggatgttattcgtggcattacgctcgagggactgcatgctcaacttgtgggctccaacctggatcctcgggagatcgaaaaggctaaggctggacagaaacaggattatccgcagggaattcccgagtgcggctcggatgcacttcgattcgcgctgtgcgcctatatcacgcaagcgcgcgacatcaacctggacatcaatcgcgttctgggatatcgtttcttctgcaacaagctgtggaacgccaccaagttcgccctgctgtacttcaccggctctgagaagtttgacacggagctaagtgcgtctgcagcgatcaaccagatggacgcctggatcctgtcacgcttggcagctgccatagaagcttgcaacaccggctttgagtcgtacgactttgctgcagcgaccagcgcctgctacgcattctggctctacgatctgtgcgacgtgtatttggagtgtctgaagccgatcttccagagcggcagcgaggagcagcagaccgccgcaaggcgcacgctctacgtatgtctagattatggactgcgcttactctccccgttcatgcctttcatcacggaggaactttaccagcggcttccgagggcaaatcccgctcctagcatttgcgtggctagctatcccagcaatacatcctggcgcagcacaaagatagaatcggacgttgaatttgtgcagaaggcggcgcgaatcatccgatctgcccgttccgactataatctgcccaacaaggttaaaaccgaggtgtatatagtatgcacggattcggtgcccagtgaaatactcaaacgctacgccagcgatctggccacaatctcctactgctccaatgtggtctttgacagtcccgcaccgcagggctgtgcgatcctcaccgtgacgggccagtgcgaggtgcacctgctgctcaagggactcgtggaggcggacaaggagatagccaagctgcagaagaagagcgaccagctggtgcagacggtgggcaagctaactcaggccatccaggccgccgactacgcaactaaggttcccgccgaggtgcaggaggccaacgagacaaaactctgcgagtcgcgggcagagatcgaacgcatcgctgccgccatcgagactctgaaactaatgtga

SEQ ID NO: 7953 - protein, 1049 aa, DROSOPHILA
MPEAEQQNDANAPAGAGGDPPKTAKQLEKERLKAEKLAKLQAKLDKKAAAAPAAGEKKEKPEKRTKEVKEAAVYTAQTAPGEKKDLSGALPDAYSPRYVEAQWYSWWEKEGFFTPEYGRASIDAPNPNGKFVMIIPPPNVTGSLHLGHALTNAIEDAITRYHRMKGRTTLWVPGCDHAGIATQVVVEKLLWRDEKLSRHDLGREKFIERIWDWRREKGGRIYEQLKSLGSSYDWTRVAFTMDPKLCRAVTEAFVRLHEEGSIYRSSRLVNWSCTLRSAISDIEVDKVEIPGRTFLSIPGYEDKVEFGVLIKFAYKVEGSDEEIIVATTRIETMLGDTAVAVHPQDDRYKHLHGKFVVHPFSTRRLPIVCDEFVDMAFGTGAVKITPAHDPNDYEVGKRCNLPFITIFNDDGYIIGDYGEFTGMKRFECRKKILEKLKALNLYRETLNNPMVVPICSRSKDVVEPLIKPQWYVSCSDMAASATEAVRSGELKIIPEHHTKTWYHWMDGIRDWCVSRQLWWGHRIPAYHVSFTDPSLQTGSNDDEQYWIVARSEAEALTKAAERFGVDASKIVLKQDEDVLDTWFSSGIFPFSVFGWPDQTKDLQTFYPTSLLETGHDILFFWVARMVFFGQKLLGKLPFKEVYLHPMVRDAHGRKMSKSLGNVIDPMDVIRGITLEGLHAQLVGSNLDPREIEKAKAGQKQDYPQGIPECGSDALRFALCAYITQARDINLDINRVLGYRFFCNKLWNATKFALLYFTGSEKFDTELSASAAINQMDAWILSRLAAAIEACNTGFESYDFAAATSACYAFWLYDLCDVYLECLKPIFQSGSEEQQTAARRTLYVCLDYGLRLLSPFMPFITEELYQRLPRANPAPSICVASYPSNTSWRSTKIESDVEFVQKAARIIRSARSDYNLPNKVKTEVYIVCTDSVPSEILKRYASDLATISYCSNVVFDSPAPQGCAILTVTGQCEVHLLLKGLVEADKEIAKLQKKSDQLVQTVGKLTQAIQAADYATKVPAEVQEANETKLCESRAEIERIAAAIETLKLM

SEQ ID NO: 7954 - DNA, 4847 bp, DROSOPHILA
cctggctcagctatacgctcccttcgaagacgagtacaactttcatcggtccatctatgtgttcctgtgccggaattccgactgccaggaggcccaaaatgcaaggtaatcccttctagctctgaaaaccaacttgcaacctaatcttacccatctttccagcaatttcacagtcctcaggtcacagttgccgcgaaaaaataagttcttttcggaggaggagccgagcgacgtgggtcaacccctggtaggaacagcagccatattttcagaacatactcatcataatatgttttcttagcccgccgttccctgcctaaagaaactatgcgccgcctgcggttgccatgctcctcacgcctgcagcaaatgcaaggcaatccactactgctcaccagagcatcaaagggcccactggccacaacacaagccaaactgcggagcaccagaagtagccactgagaagcccttaacacaaatcgttttcccagaatttgagattgtaatggacagcaaccccgtggagtctggcgaggaggacaaggacgatgaggctcgcttggcggagttccaggagctggagtccagcgggaagacgggcgacttgagcaatgtttccgaggcggagatggacaagtacttcggaaactcggcggccgccgatgacaagacctttcgtcagttcaaaaagcaaacagcagccgaacccgatcagatcgtgcgctacaaacgtggaggccagcccctctggatcacgaataccgtcaaaacggtggaggaccaacttaacaagctgcccaattgcattgcttgcggaggagagcgtcagttcgaatttcagattatgccgcaagcgctgactcttctggaggacgaaaacctcgactggggcgtcctggccgtctacacttgcgccaaaagctgccccatcgacggctacgtggaggagcttctcatcaagcaggacattgtggcggaggatcagagttgacattaaaatgcgtacatttaaattttattcttgtcaattacgaaacacgtgaacatttacttcagcttgatgatggggaagtagctgtgtttggagaagtcgaactctggctgccgcttgacttccttctggtgaccgcgagccagcacattcatcaccacaaagttagtccgtgcgatttgcaggaggtccagcatctgaaattaaacgaaacgcattttaatccaggaaaaccaattcagaactaccattgacttacctcctgatctgggttttgaatgctttcgagaacattgcgggcctggtcaaagtgcttggccgcataggtatatagatcctcgacgctatgtcgcatcatgtgctcccggacgtttttgaactctgcgtacgaaactggcggaggactggtgagtgtggcgaagggcaggaagcgtcggttgtagcggatctcctcgttgtcgaacttggacagcggcagtcgcacgcgtccgtctttggtcagggcgcccattgctttatacattccgccgcagaggctgagtagcgcgtggtagaagacgatctcggcgcggtacggcctttgagtctttttgttctttttcggcttggccgccttgcggtttttagccgctccgctgccgcccgactgggtcttactttggtgctcggcgtactcctcctgggccaggaggatgttctccgtgcgcgtcagcgcggagaccaggaagccaatgaggaactcgtatggataccagtagatgtagaggaactcatgcacagcatatagttccagctcaaagccggacatcaggaagatcagcatcgcacggaaacagttgtacagcacccatgtggagaagtgggtgctgtgcttcagagcggtggccatgggctcgttgccctccatggctcgttcgttggccagttggttcatcatagagtccaatcgcgctgcatccacttggatggtgtcgaagttctctatcagacgcgccagcttatcccgctgtctggcgcgattgaagccgcagatgcgaatgaactgcgtgaaggtgttcatgttaatgcagtaacggaagaagttctccaggtgctgctgcaccttgggatcggcagccaccggatgcttggcattcaatacgggtggcgagttgaagacctgaaccgagtggcgcaggaactgcttcatgggaagctttccgtgcgccatacgcatgttggcgctgaacagggtttgcagcacgcttctggacaggatgcactggcccgactttttgctgtactcgataaagaagttctggaaagccaggatgttattacaatttattttagaagtcacttaaaaagtcacttaccagcgccgaatagtaatccttgtacttggtgactttgcaggcgtatttgaagcgcgaaatcatttcctctagaaactgataactggatggacgatccctgatcttaatgctacgcggaaacgcgggcggttggctgcggtcgtggatgcgcggagagaaacccatgggattgggagcgtcagctagtgatttagaaggaaatactcagcatttacattggcaagttatctgtgaccacttacaccccttctctggttgtgtgccccgatccaaagtgttccttattcctggaagcatctcggaggccacaagcaggattttgtatatgtctaccttgtcatcgacggtatcattgctggccatttgctccacgtggtagatcacctggaaaagatggcgcatgaaacgcagccggtgaaccacggccatccagtcctccgtggaagtcagctttttgcacttgcgtatgagctcatcctccacatcctttagcgagctataaacagtggctggctgtgccttctctgcagccagaagagcagaatttccgtacagctggaagtcctcctcctcgttgacagctgccacggcaataattttcttgatgaccacgatgagattgcgcacggcagtgcagaagacgcgcagcgccttatccttgatctgtgcgggagcgtgcaggtagaggcaggtgaatagaacctggtccatggagttgccctccagccaggacaccaggcaggaaaacagagcatcatagatgccaatcagttcggagggcgtgagatcgtccagtttgatggcgcccgtctggaaagagtcatctattaagatacatatagcttagccaggggtcagaaagacaaatctcacggcaatggctgcctcgaaagagggcggcggaagatcctgcttgtcgaagcccatgcccacgtccatcttggggtccatgatctcgatggctgacatggcctcaaaaagaccgaacagcatatcctgggccagttccccgggctgcagctccgcgcaggcatcgtggaactccttggttacgtccacccagccgtgcatcgggtactgggtgatgtcctccgcagcactgccgctccgcatggtgcgctgcacatccggatccagaaatccgcactcgcccacgctccactcgtcctgttccaagctactggcccgggcagctgccgccgcggccgccgtggcagcctggaagtccggaggctctgcaacgctgctgtggatatgcgtatgtatgtgcatttagatggttatgctctgtatgtaggcacgtctgtgggttcttgccggtggtctgttgctcaccttccgttcatggtgctcggatctgcctccgccggcaaggtcgagggatacatcttttgtacctatattcaacaggcggtcaacctgtagctcgatgtgttacaaattttcttttatttataaaagatatttttaatgaattaaaatatgtaacgtccagtgtgaccaagtgacgaacggtcagccatgcctctatgttgcaaatatacctcttggtaccaaacaagtcataattttctatttctaagttcatttttgattttgcggagataatcaatggctatatgattattagaaatctatagaacagttcattaatttaaagaagagtagttcattgatacagtcttaaataggtataagcataaatgccttcagtatttttcagcccgccaacatccaacttggcagcactggcgaagttaacagtgtactgttttaatttgggatgttttgaaagcatttaaaagaaagtcagcaaagatttatgtggtgcttttatgttttcccatgatttcagcttagaatttctgtaagttacccataaaacaagtgagttagcattcaaaatgtggaacttggagccttggtggcttttaagctgcactgttaagcttaacagccacgaccgttacaactgttaccaagttcaaatgctgagtcaggtgaaaattgaagtaaacaagcaaagcttagttcattggactgcggctggcccattaactaaacaaaatgactgaaagtgcaagccagcgttatctgagacccagacgaccgcctagaccgaacagaacagttccgcggttcaaaaaacacggatcaaagcacgagctctctttagtctcacttaattatgtttgctccgatttgactaaagcaaataaagtatgccttgaaccgaggcattctacaaccttatcagacgcgtttgttcccgctgttatcggaaacggaaaagctcgcttgcgctttcactccgcggtttcactccggatttcgagcaacgcggcgcaacgcccgccccacggattttggggttgaccgccaccccgagtgttacaagtatccaagttgcgagtgggagctgagcccgaggggttggattggtttgtttaccacggaggccccactttcactcgctcgctctccccaaatcacaatctttc

SEQ ID NO: 7955 - DNA, 2515 bp, DROSOPHILA
gtcacactggacgttacatattttaattcattaaaaatatcttttataaataaaagaaaatttgtaacacatcgagctacaggttgaccgcctgttgaatataggtacaaaagatgtatccctcgaccttgccggcggaggcagatccgagcaccatgaacggaagcagcgttgcagagcctccggacttccaggctgccacggcggccgcggcggcagctgcccgggccagtagcttggaacaggacgagtggagcgtgggcgagtgcggatttctggatccggatgtgcagcgcaccatgcggagcggcagtgctgcggaggacatcacccagtacccgatgcacggctgggtggacgtaaccaaggagttccacgatgcctgcgcggagctgcagcccggggaactggcccaggatatgctgttcggtctttttgaggccatgtcagccatcgagatcatggaccccaagatggacgtgggcatgggcttcgacaagcaggatcttccgccgccctctttcgaggcagccattgccacgggcgccatcaaactggacgatctcacgccctccgaactgattggcatctatgatgctctgttttcctgcctggtgtcctggctggagggcaactccatggaccaggttctattcacctgcctctacctgcacgctcccgcacagatcaaggataaggcgctgcgcgtcttctgcactgccgtgcgcaatctcatcgtggtcatcaagaaaattattgccgtggcagctgtcaacgaggaggaggacttccagctgtacggaaattctgctcttctggctgcagagaaggcacagccagccactgtttatagctcgctaaaggatgtggaggatgagctcatacgcaagtgcaaaaagctgacttccacggaggactggatggccgtggttcaccggctgcgtttcatgcgccatcttttccaggtgatctaccacgtggagcaaatggccagcaatgataccgtcgatgacaaggtagacatatacaaaatcctgcttgtggcctccgagatgcttccaggaataaggaacactttggatcggggcacacaaccagagaaggggtctgacgctcccaatcccatgggtttctctccgcgcatccacgaccgcagccaaccgcccgcgtttccgcgtagcattaagatcagggatcgtccatccagttatcagtttctagaggaaatgatttcgcgcttcaaatacgcctgcaaagtcaccaagtacaaggattactattcggcgctgaacttctttatcgagtacagcaaaaagtcgggccagtgcatcctgtccagaagcgtgctgcaaaccctgttcagcgccaacatgcgtatggcgcacggaaagcttcccatgaagcagttcctgcgccactcggttcaggtcttcaactcgccacccgtattgaatgccaagcatccggtggctgccgatcccaaggtgcagcagcacctggagaacttcttccgttactgcattaacatgaacaccttcacgcagttcattcgcatctgcggcttcaatcgcgccagacagcgggataagctggcgcgtctgatagagaacttcgacaccatccaagtggatgcagcgcgattggactctatgatgaaccaactggccaacgaacgagccatggagggcaacgagcccatggccaccgctctgaagcacagcacccacttctccacatgggtgctgtacaactgtttccgtgcgatgctgatcttcctgatgtccggctttgagctggaactatatgctgtgcatgagttcctctacatctactggtatccatacgagttcctcattggcttcctggtctccgcgctgacgcgcacggagaacatcctcctggcccaggaggagtacgccgagcaccaaagtaagacccagtcgggcggcagcggagcggctaaaaaccgcaaggcggccaagccgaaaaagaacaaaaagactcaaaggccgtaccgcgccgagatcgtcttctaccacgcgctactcagcctctgcggcggaatgtataaagcaatgggcgccctgaccaaagacggacgcgtgcgactgccgctgtccaagttcgacaacgaggagatccgctacaaccgacgcttcctgcccttcgccacactcaccagtcctccgccagtttcgtacgcagagttcaaaaacgtccgggagcacatgatgcgacatagcgtcgaggatctatatacctatgcggccaagcactttgaccaggcccgcaatgttctcgaaagcattcaaaacccagatcaggagatgctggacctcctgcaaatcgcacggactaactttgtggtgatgaatgtgctggctcgcggtcaccagaaggaagtcaagcggcagccagagttcgacttctccaaacacagctacttccccatcatcaagctgaagtaaatgttcacgtgtttcgtaattgacaagaataaaatttaaatgtacgc

SEQ ID NO: 7956 - protein, 784 aa, DROSOPHILA
MYPSTLPAEADPSTMNGSSVAEPPDFQAATAAAAAAARASSLEQDEWSVGECGFLDPDVQRTMRSGSAAEDITQYPMHGWVDVTKEFHDACAELQPGELAQDMLFGLFEAMSAIEIMDPKMDVGMGFDKQDLPPPSFEAAIATGAIKLDDLTPSELIGIYDALFSCLVSWLEGNSMDQVLFTCLYLHAPAQIKDKALRVFCTAVRNLIVVIKKIIAVAAVNEEEDFQLYGNSALLAAEKAQPATVYSSLKDVEDELIRKCKKLTSTEDWMAVVHRLRFMRHLFQVIYHVEQMASNDTVDDKVDIYKILLVASEMLPGIRNTLDRGTQPEKGSDAPNPMGFSPRIHDRSQPPAFPRSIKIRDRPSSYQFLEEMISRFKYACKVTKYKDYYSALNFFIEYSKKSGQCILSRSVLQTLFSANMRMAHGKLPMKQFLRHSVQVFNSPPVLNAKHPVAADPKVQQHLENFFRYCINMNTFTQFIRICGFNRARQRDKLARLIENFDTIQVDAARLDSMMNQLANERAMEGNEPMATALKHSTHFSTWVLYNCFRAMLIFLMSGFELELYAVHEFLYIYWYPYEFLIGFLVSALTRTENILLAQEEYAEHQSKTQSGGSGAAKNRKAAKPKKNKKTQRPYRAEIVFYHALLSLCGGMYKAMGALTKDGRVRLPLSKFDNEEIRYNRRFLPFATLTSPPPVSYAEFKNVREHMMRHSVEDLYTYAAKHFDQARNVLESIQNPDQEMLDLLQIARTNFVVMNVLARGHQKEVKRQPEFDFSKHSYFPIIKLK

SEQ ID NO: 7957 - DNA, 8152 bp, DROSOPHILA
gcaggcacatacaacttcagtccataaacgaggaagatgcctcgccgagcaagagacaaaaggagaactctgccgcggaggatgtctcaccactgcacaagcttctcagcacaccaagtcattcccctttgagtgagaatgtcaaccatgtgtacacctccccgccaaccacgtcagcggcagcagcagcggtggctgcagacgcgcttaatccgccgccgatctccgctgccatctactcgcccacctccaacctgcccaattacgtgctggatggcgaggcaccgcacctgggcatcatgtcgcccaagcggaaggcgaaggagaaggtggactggctgacgaatatccgcaaacagaagctgatgagtggcagggcccatgtgacgctcagcgaaaagatcagcgaggagcagcaggccgatgtgctggcatccccgcgcctccagagtctgcggcagtcagagtgcagtcccaggatacacgcctcgccccgcagacgcatctcccatacggacggaggcggtggcacgccggctggcagctcctcgcactcccattcccaatcccagccaaaaacgcccacttccagtaggcgaaacagcgagacgacgctcctgcgattctttagcattcagagaagtagcagtgtgccggcggaggaaacaacgacaacgaatgcggctccctcctcttctgatccccatcccccggcagtgactgcgcccgcagccacgcccctcagcatgcgcacgcccacgacggcggtgggcagcgattgacgcggagcctcgagccacagcaccattattgcacttgtagttttaagcggacattgtttaagttattttatgtagatagtaggttgcatctatcgcgggacgagttggtaaccaactccccgccctctgtacagagccaaaagatacgaaagactaacgtacccgaataaaagtaactccattttaaagctgccttgattgattctctaaaaactaactcgtttaatgtactgtttattcaattttttttttggcataatcaaaacggtttatatgtggcactcatggctaacaagtggcactcagaccattttactgcagctttttctgttgctcctgctgctccctcttggccgcattattaatccgcatggtctggacaagctgcttggccaccccagcgagcagtatgatgtgggtgaagtgaagggcagcgctggagaagttcgtactgggataggtgttccagcagtactcaatcagtccgaggatcaggcagcgcacgcccagcgagtacggcgtcgaccaggccaaatagggtagcgagtggaagtaccagacgtagaactgatagtgcaaggatcgggagcaggccacgcccaccaggttgcacaggaagaacggcagcagggccagctgggtgcagcgatcgaagtggatgccatagcgttccggttccgcctgtgcgggtgccggagtggcctttcctccagacgccttctgcaggctcttctcgaaggccttcaggaaggattgctgctcggttgtaaacttcttctggtccttgtccttgtccttttccactttctttggtcttttctgcgcgttcagctcgaggttctgctgggctatttgcggctgcagctgatcctcaatacggcgcaggcgcacgtagctctggaaaaaggtccaagtgggcttggcgaaggccagcaggagcagcagatgcaggcccaaaagcgaaacgtggaaggtgcggttctcgaacagatctctgctcaggaagcgatagttgaccgtccacttgtgctcgaagatgcgtcccaaatcaaagctgccccgcagatactccacaggatgggtgagcaggaaaggagcgcccagcagcagttgtatcactccgcagacagccagctgcaggatcgtccgcagaagtcccaggttggccaagtagaacagcaagagcgcaggcgcaaacagcaggatgttcatcttaacgcccaccgccaagctgaagaaggtgctacccagggtccaccttctgtccaggaacaaattgagtgcggcatagaggagcagcactgccaccggatcgttgaacagtcgcagcacgtatatcgagtggatccgatacgacgtgaaggcactgagcactagcacatacggcggcacctttctgctcttcgagtacagcctcagcaccagggccagctggagcaggtagatcccggcgaagatgtactgcgccaggcgaacgttcgttccgtgggacgtgacgtagtagagagccgagtagatgtacacgaaggcggctggatacacaagaggtcctgtgtcgcctaggaaatcgaaaatcgaagaatttcaattatcataaattagatagaaggaatgcaattagtcattgttttcattcactaagcagttatttcagtctgtttgggcctgggaaaactattatatccattgagttacacttcatatttattttaaaggcaaaactttagttaacttatttaatatacggcttttttaactttaacggtatataacgatatttcattcgctttcacgccggttggtattttcgctcgctacgcacgcggtcacattgagcaagtgcgagtgagagagagagagacagacattcgtaggacagcatggatgttacggcatgttgttgaaaagctgaaaatctgatacttttatggaaaaatgatgatttcgtgtaaaaaattattcgtgttccggcagctgccggcggtgcgccgttgcctagcggcagccgcgttctccacgccacgcgcgacctcctaccgaatcctctccagcgccgggagcggaagtacccgggcagacgcaccccaagtgcgccgcctgcacaccacgcgcgacctcctggccaaggactactacgccacgctgggcgttgccaagaacgccaacggcaaggacatcaagaaagcctactaccagctggccaagaagtaccatccggacacgaacaaggaggatccggatgcgggccgcaagttccaggaggtctccgaggcctacgaagtgctcagcgacgagcagaagcgccgtgagtacgacacctatggccagacggcggaaaacattggtcgccagggcggcggattccctggcggaggagccggtggctttggccccgagggtttctcgcagagctggcagttccgctcgagcatcgaccccgaggagctcttccgcaagatcttcggcgagggcaactttcgaacgaactcgttcgacgacttcgccgactccaagttcggattcggccaggcccaggagatggtcatggacctgacctttgcccaggcggcgcgcggcgttaacaaggatgtcaacgtcaacgtggtggaccagtgccccaagtgcgccggcaccaagtgcgagccgggcaccaagccaggtcgctgtcagtactgcaacggcaccggcttcgaaacggtgtccactgggcccttcgtaatgcgctccacttgccgctactgccagggcacgcggcagcacattaagtatccgtgcagcgagtgcgagggcaagggccgcacggtccagcgccgcaaggtcaccgtgccggtgccggctggcattgagaacgggcaaacggtgcgaatgcaggtgggcagcaaggagctgttcgtcacgttccgcgtggagcggagcgactacttccggcgcgagggcgccgatgtgcacacggacgcggccatatccctggcccaggcggtgctgggcggcactgtgcgtgtccagggcgtatacgaggatcagtggatcaacgtggagccgggcacctcgtcgcaccacaagatcatgctgcgcggcaagggtctgaaacgcgtgaatgcccacggacacggcgatcattacgtgcacgtcaagatcacggtgccatcggcaaagaagctggacaagaagcgactggctctgatcgaggcgtacgccgagctggaggaggacacccccgggcagatccacggaatcgcgaatcgcaaagacggcagtaagcaagcaacgtaaataatctcccgatctaccaatgcaatctctaaatgtaacttggagcttgaattcgtagttgaaatatacgtgcgttctatgtgcgagctttattaaatgatggcgtctttctctccccttccccatctctcgttgcagcgcaggagcgagtgaggagccaggagcgggagcagctgctaaagccagtgcagcagccgccggatcaggagcctccaagccaggaccaggagcagaaaaaagcgaaggcaaagaccagtggacggacaacgagaaaaccaaagcgaaagaaggcggcggatccggatccggacaaggcgacggcggaggcggaggcttcataagcaagatcaagtccatgttcaactgacaggcgttggcaacccgatggccgattctgtttttttagtgtctaagttaacgcacgttattgttgctaatctaagttcgggcgggaaccgggggagtgtattccaaatacgactcggttcgagatgaataaaccaaattgaccgtcagtcgggcaagttctgcgtttaagcgaggctaacttcacttgtcttaatctcacgctgctccgattttcagttgcctaaagttcgtgccgcatttgatgtcgtccaactccccaaatctctgtgtttaacctttgatggtaactgtgttcaaacatttgaaccatatgtcaaactactctcctcgattttgaaaatacttcaaactttaaagtaactgaaatatcaattttataagaattccaactaaaaaagagcataaactatatagctagttggaaataggctatccccttagtaaggtaacctaaaatatcgttataaccacatcatgcgaagaacaacaggtgcacgcatatgtttccgcaaccggaatggggtcacctgtggccaaaaataaaccaggagcggcgcagaaactcaccgcgcaacagactgtagttggtggtgccgttcaggaagccctcgcactcctgcatgtaagccacccagtcgatctctgtgtagggcacccgctggatgaccaccacgttgatgaccagctccgccaggagcacgaagaggccaactatgggcagagcggccggctccaggagcagatacttgaagaagcgcacgttgaggtacttgtccaggatggagtccaccagggtgcccgacttcttgcgccgcaccgccggacggtggctggcggcctttggcggggccatttctgtgataaccggcgaaaattaattaaaattcaacttgaaccgaaaaacaaccagggcggcactatcaaaatcagctgttgcgcctcccatcgatagcagtccaactggattttgcatgctatcgatattttcccaatttaaatttgtagttctaacagcgagcaccagtggcgtcttccgcttccggttgttgcttggttttcaagaaaagaaaatttaattttatcacgctgaaaatgcttttaaatatttgtaatttaatttttaaagtatatttgggttgctacctaaattattgtggccaaaacacgagttttccaaggagggctaccttcataacttggccaaaaaaagtcgcacattcaaaaaaattactgttttagactcctaatgatccaaactaactatcccaatcacaatcttgacgattttcaataattaaatttttggccattttttgcattttttgtaaggggttacatcgttaaaatttgcaaaaaattgacaaaaattaaaattttcaaatttgaatgggaatcgattaggaatgtgaatacaagttcaacaagctatgacactcaatatttgggccataaaatcgattgttttggccaaaatacgtattttttggttgatttaagggttcaccttcataatttggccaaaaagagttaatgattcaatacagtacaatagaaatatcattatttgaggatttgcttgaattttattgaatagcaatgagtttgacaattgcattttgaaacacatccactgcttttagttcctgctgagtatttacaatttgaatggctgcatttttcctagccagctggatgttgtaaggcctgcgggtggattaaaccataacatatatgtagtaattagcagaattcctacacggcgaacgcttctattcggtcaaaatgggtgggccccatttggggcgggggaccggaactgcaggtgggaatacgcaacaggtacaaaaccaatcagctcatggccaatttgctggccagattaacgtccatcgctggcgtcatcccaatagcaaacagtcggtcgtggtccgtgtgctttggctggttttgctggctttgggtggtttttggggtggctctggcggtttaacgcatcgctgagatgcatttgccagaggcaaacggggtaacataagccgggcgagggtgtgctcatgcaaacgcagctcgtttatcgggttacaactgatatggtggccatgccgcaaccacacttaacccaccatcgagcccacatccttttcaggacgcagaacgcagaacgcaggacacaggacccagggctcgggactctggacgggggaatggcccgcacccagacccaccgggcaattaaatgtcaacccacggatgcgaatggctgcccgattttccggcgctgccccgctcttgtgtgttttttccgcatttcgtgattcatttattgtgtccactgcagcgtgtttgctcggaaaaagaaaaacacgaaatagttggccctgttgtcgctttttcccgacatttacctgttcagtcagccagctgaaacactgatatgccaccaattatccaaaaagcgaaaaactgtagcgaaaaaaggtgcacggcgatttacaggaatttagccggaggatccgtgcgaactggaattcaataacccatttttgtcagctacattttttccaaaaaaaatctgtttaaaaacatttttgctacagatgagtggagttttaccgtaaaatttttctgtactctgataatcctttgtttccccttttttttagcaaaaatgttgaagtgtgtcccttgatagcaaaactaattatgtatgccagcattaattaagcttatatgcttgaatacatcatttcgctggagaaagaacatgctcgagagagtaattcaaattaaatataaaataatttaaaaggtttatacaattgtaaataataaaacatactgatagtcgtgcgtaatgtggcaagtcatgcatattgactaatttaagtgatctgtgcttttttcttggggcccgtaccaaaataagtttaagcatatgttttcatgtttgtcgccccatatttgtgggtcaatcgcgtccgaagagttggctatctccgcatgaactatagaactaaatcggtcactccttatcggtcgcgtcgccttagtcgacagatgtacccatgtgtgtagacaaaccaacatacgtacagcctcagctactttctgtgcgagtgagacaattgtttattaatcaataataacaataatctacgccacgcacaccgacacaacgtgtgtatttcggtatcggcgctgttatcactatcagcccgctgctgctgtggctcccattgctgataagcgacttcccccactccgccgctgtaatgcaaatcaacagcattcggcctatgatagtgatagtggcgagcggcgagcagtactttgcactcgagtgcttattaatttctcttgccagcagcgcactcattgcctttgcattttattgtctcacgatctggctataaaatgaaaatggggacgggtactttatttatcgccgccacttattgcagttcgtatgatactcgctctatgggcggaagaaacggaggcggggcagttcagaggctctcgagccggaaaaagtctctgtagggtaaacaaggcgggttccatggctctgcgaagtctttctgccgagcttcaggtacagtggaggttctactgtgtgaaagtgtagttaatacctaagttcgtaaagttgctagtgccatttttgcttgcaaagcatgctttgttgaaaaccatttgatatcttgctagaagctttcagtttagtg

SEQ ID NO: 7958 - DNA, 3502 bp, DROSOPHILA
aagcttaattaatgctggcatacataattagttttgctatcaagggacacacttcaacatttttgctaaaaaaaaggggaaacaaaggattatcagagtacagaaaaattttacggtaaaactccactcatctgtagcaaaaatgtttttaaacagattttttttggaaaaaatgtagctgacaaaaatgggttattgaattccagttcgcacggatcctccggctaaattcctgtaaatcgccgtgcaccttttttcgctacagtttttcgctttttggataattggtggcatatcagtgtttcagctggctgactgaacaggtaaatgtcgggaaaaagcgacaacagggccaactatttcgtgtttttctttttccgagcaaacacgctgcagtggacacaataaatgaatcacgaaatgcggaaaaaacacacaagagcggggcagcgccggaaaatcgggcagccattcgcatccgtgggttgacatttaattgcccggtgggtctgggtgcgggccattcccccgtccagagtcccgagccctgggtcctgtgtcctgcgttctgcgttctgcgtcctgaaaaggatgtgggctcgatggtgggttaagtgtggttgcggcatggccaccatatcagttgtaacccgataaacgagctgcgtttgcatgagcacaccctcgcccggcttatgttaccccgtttgcctctggcaaatgcatctcagcgatgcgttaaaccgccagagccaccccaaaaaccacccaaagccagcaaaaccagccaaagcacacggaccacgaccgactgtttgctattgggatgacgccagcgatggacgttaatctggccagcaaattggccatgagctgattggttttgtacctgttgcgtattcccacctgcagttccggtcccccgccccaaatggggcccacccattttgaccgaatagaagcgttcgccgtgtaggaattctgctaattactacatatatgttatggtttaatccacccgcaggccttacaacatccagctggctaggaaaaatgcagccattcaaattgtaaatactcagcaggaactaaaagcagtggatgtgtttcaaaatgcaattgtcaaactcattgctattcaataaaattcaagcaaatcctcaaataatgatatttctattgtactgtattgaatcattaactctttttggccaaattatgaaggtgaacccttaaatcaaccaaaaaatacgtattttggccaaaacaatcgattttatggcccaaatattgagtgtcatagcttgttgaacttgtattcacattcctaatcgattcccattcaaatttgaaaattttaatttttgtcaattttttgcaaattttaacgatgtaaccccttacaaaaaatgcaaaaaatggccaaaaatttaattattgaaaatcgtcaagattgtgattgggatagttagtttggatcattaggagtctaaaacagtaatttttttgaatgtgcgactttttttggccaagttatgaaggtagccctccttggaaaactcgtgttttggccacaataatttaggtagcaacccaaatatactttaaaaattaaattacaaatatttaaaagcattttcagcgtgataaaattaaattttcttttcttgaaaaccaagcaacaaccggaagcggaagacgccactggtgctcgctgttagaactacaaatttaaattgggaaaatatcgatagcatgcaaaatccagttggactgctatcgatgggaggcgcaacagctgattttgatagtgccgccctggttgtttttcggttcaagttgaattttaattaattttcgccggttatcacagaaatggccccgccaaaggccgccagccaccgtccggcggtgcggcgcaagaagtcgggcaccctggtggactccatcctggacaagtacctcaacgtgcgcttcttcaagtatctgctcctggagccggccgctctgcccatagttggcctcttcgtgctcctggcggagctggtcatcaacgtggtggtcatccagcgggtgccctacacagagatcgactgggtggcttacatgcaggagtgcgagggcttcctgaacggcaccaccaactacagtctgttgcgcggcgacacaggacctcttgtgtatccagccgccttcgtgtacatctactcggctctctactacgtcacgtcccacggaacgaacgttcgcctggcgcagtacatcttcgccgggatctacctgctccagctggccctggtgctgaggctgtactcgaagagcagaaaggtgccgccgtatgtgctagtgctcagtgccttcacgtcgtatcggatccactcgatatacgtgctgcgactgttcaacgatccggtggcagtgctgctcctctatgccgcactcaatttgttcctggacagaaggtggaccctgggtagcaccttcttcagcttggcggtgggcgttaagatgaacatcctgctgtttgcgcctgcgctcttgctgttctacttggccaacctgggacttctgcggacgatcctgcagctggctgtctgcggagtgatacaactgctgctgggcgctcctttcctgctcacccatcctgtggagtatctgcggggcagctttgatttgggacgcatcttcgagcacaagtggacggtcaactatcgcttcctgagcagagatctgttcgagaaccgcaccttccacgtttcgcttttgggcctgcatctgctgctcctgctggccttcgccaagcccacttggacctttttccagagctacgtgcgcctgcgccgtattgaggatcagctgcagccgcaaatagcccagcagaacctcgagctgaacgcgcagaaaagaccaaagaaagtggaaaaggacaaggacaaggaccagaagaagtttacaaccgagcagcaatccttcctgaaggccttcgagaagagcctgcagaaggcgtctggaggaaaggccactccggcacccgcacaggcggaaccggaacgctatggcatccacttcgatcgctgcacccagctggccctgctgccgttcttcctgtgcaacctggtgggcgtggcctgctcccgatccttgcactatcagttctacgtctggtacttccactcgctaccctatttggcctggtcgacgccgtactcgctgggcgtgcgctgcctgatcctcggactgattgagtactgctggaacacctatcccagtacgaacttctccagcgctgcccttcacttcacccacatcatactgctcgctggggtggccaagcagcttgtccagaccatgcggattaataatgcggccaagagggagcagcaggagcaacagaaaaagctgcagtaaaatggtctgagtgccacttgttagccatgagtgccacatataaaccgttttgattatgccaaaaaaaaaattgaataaacagtacattaaacga

SEQ ID NO: 7959 - protein, 510 aa, DROSOPHILA
MAPPKAASHRPAVRRKKSGTLVDSILDKYLNVRFFKYLLLEPAALPIVGLFVLLAELVINVVVIQRVPYTEIDWVAYMQECEGFLNGTTNYSLLRGDTGPLVYPAAFVYIYSALYYVTSHGTNVRLAQYIFAGIYLLQLALVLRLYSKSRKVPPYVLVLSAFTSYRIHSIYVLRLFNDPVAVLLLYAALNLFLDRRWTLGSTFFSLAVGVKMNILLFAPALLLFYLANLGLLRTILQLAVCGVIQLLLGAPFLLTHPVEYLRGSFDLGRIFEHKWTVNYRFLSRDLFENRTFHVSLLGLHLLLLLAFAKPTWTFFQSYVRLRRIEDQLQPQIAQQNLELNAQKRPKKVEKDKDKDQKKFTTEQQSFLKAFEKSLQKASGGKATPAPAQAEPERYGIHFDRCTQLALLPFFLCNLVGVACSRSLHYQFYVWYFHSLPYLAWSTPYSLGVRCLILGLIEYCWNTYPSTNFSSAALHFTHIILLAGVAKQLVQTMRINNAAKREQQEQQKKLQ

SEQ ID NO: 7960 - DNA, 2955 bp, DROSOPHILA
agtcccaagcagattacgcccaattcaatcctggttttcgacttgaaaacagatactttactgcgccgtttcaccattcccgctgatcagaccaaagaggactcgttctttgcgaatattgtgagtatgcataggcgtattatttaaattccaaactgatcgaattaatcaatatttaggttgtggatgcggaccgctcggagtgccaagatgcctttgcttacattccggatttgggtgcctacggtgtgattgtgtactccctgaggaacgacaaatcctaccgcgtcaagcacaacttcttccacttcgatcctctgcatggtgatttcaatgtgggcggcgtgaacttccagtggacggatggcgtttttgggctggccgtgggcccaatgaatccagatcactccaaggacatttatttccatgccctggccagtaccaaggagttcaaggtttcgaaccgcgtgctgcaaaacgaatcacacgtgaccgctggcgattcgtattacgattttaaatacgttggtgaccgtggcatgaatggccagtccaccgccgaggtctttgaccccgagaccggcgtcatcttctatacgcaggtgaacaaagacgccattgcttgttggaacatcaagcgtccatacactccggacacccaggggctaatcgattccgattcgcacactctggtctttccaaatgacatgaaaatcgacaatgaaggcactatttgggtgctgtccgacaagatgccgacatatttgtacaaggaactcgatccctcggccgtcaactatcgtattttgatgggccagaaccgcgatctcatcaagggtacaccatgcgaaatgtgatcacttggatatttaaatctacatgctgtgtttatgacgcggtgcatttttgtatttacattatgacattattgtttgttagtaagtcagcttaataaactatttgaaatgtgattgattgggtataccatggtgagcctaagttaaatgtcggatttcaggaggttgtcggccagttgcaccttctcaccgggcttaaaggcgggcatgcccaaataggggcaagtggagcagcggaaggcgtcgccgagataacactgtgcatataagaaatcagttataatcgaggttaatgctaactcacatcggggttaagagaactcacatttccacagcttgacttggcattctcggtggccttctggctctgtttttcagtctccaattcctcggccagcccgcaggagcagtttttgcacgccttgcgcttgcccgtggtgctacagacacgcagaccagccggatccggcttctgtttgtcttcctcgtccagcagctcctcctcatcgatcagttcctcatcgtcaccgcttatcttccacacattgactgcactggcgttcttctttgcgaatgacaacctggctgaggatcctgtctcgtagccaggcttctcggcggtcaaagcatctggagagtcctcgcgacagtttatgaatccggatagcttgatctcctgcagcaaactagccgccggaccgatgtaggacaccaaatgcagtttgccactcggtttcagcatgtgcagcagttttacgtaactgtcggtcagctgggcgcactcgatcacaatcaggtcgaaactggagttggcataggaagctgtaatgcataaacatcactgattttaatctgctgactcactggctagtcaaaaacagcacacacacaccgcaccgcacgcaacttacaaaacgaaaggcggtgcacattttccaaagccacatcgccgccagtggccgcctttagttgctccacgcgcttgtccaagtcggcgctgtccgtccatatgtatagggatttttgtagacccttaaagttctccattgtggatgtgtttctagaatatctcaaaagttcaagcaccgaacggaaccgatttttgatttcacaagttagatatggcaatgcaccgaaaatcgagcggtgatatcgattgtacctgcctatcggattgcaaatgatattcagtgattgtagatttttccactttacactgtgactgctaaaatatatgaataactaagtgtactccaccagattcgttttttaatgagttacagcttacattctgatacataattaacagcttttagttgcatattgtgtgtttctgccactaaacctatttaaacggttacatttaagcctaaagtcgcgaattatcttttaaattcacccatgtgtactttcccacggcccgttttaaaaatgcatggacagttagacaagaaggttggtagtttgtaccttgaattttaaatgtgggcgctcaaaatcgaagtgttcaatgaaaatcgatacctttcgcatcagttaaaagtatttatagatataagaaataatatctttaacagtgatgtgatgggaataaatatacaaatgtattcagaaactgcaaagttaaaacaaaatatattagctactccaaattggctataaaataaccaaatgcccactgccatccaaatccaaccaacagtgctgtgaagcgacaaacatatcgccggtaggcagcgactatcataaataagcgcctatcggactatcgatacaacatcaacatcctcagtcgcttttttagttgtagcatattataaatataactcgagcgctagttgcagccttaaacagaagccagccgccactaccgctagtcgctagtcaagatctgctcgaaacgctgaaatatgtgtgattagtcgtgaatcgcagctagccgcaaatccagcttgagctacaacaacaaagccaatccgcggttaagaggaagagagtgcgtgagagaaacgacagctgctctgcgtgtgtgtttgtgcagcaggataacaaaatagaaaacatacagcagcaacaacaacaacaaaaacagcaccag

SEQ ID NO: 7961 - DNA, 798 bp, DROSOPHILA
cggttccgttcggtgcttgaacttttgagatattctagaaacacatccacaatggagaactttaagggtctacaaaaatccctatacatatggacggacagcgccgacttggacaagcgcgtggagcaactaaaggcggccactggcggcgatgtggctttggaaaatgtgcaccgcctttcgttttcttcctatgccaactccagtttcgacctgattgtgatcgagtgcgcccagctgaccgacagttacgtaaaactgctgcacatgctgaaaccgagtggcaaactgcatttggtgtcctacatcggtccggcggctagtttgctgcaggagatcaagctatccggattcataaactgtcgcgaggactctccagatgctttgaccgccgagaagcctggctacgagacaggatcctcagccaggttgtcattcgcaaagaagaacgccagtgcagtcaatgtgtggaagataagcggtgacgatgaggaactgatcgatgaggaggagctgctggacgaggaagacaaacagaagccggatccggctggtctgcgtgtctgtagcaccacgggcaagcgcaaggcgtgcaaaaactgctcctgcgggctggccgaggaattggagactgaaaaacagagccagaaggccaccgagaatgccaagtcaagctgtggaaattgttatctcggcgacgccttccgctgctccacttgcccctatttgggcatgcccgcctttaagcccggtgagaaggtgcaactggccgacaacctcctgaaatccgacatttaa

SEQ ID NO: 7962 - protein, 248 aa, DROSOPHILA
MENFKGLQKSLYIWTDSADLDKRVEQLKAATGGDVALENVHRLSFSSYANSSFDLIVIECAQLTDSYVKLLHMLKPSGKLHLVSYIGPAASLLQEIKLSGFINCREDSPDALTAEKPGYETGSSARLSFAKKNASAVNVWKISGDDEELIDEEELLDEEDKQKPDPAGLRVCSTTGKRKACKNCSCGLAEELETEKQSQKATENAKSSCGNCYLGDAFRCSTCPYLGMPAFKPGEKVQLADNLLKSDI

SEQ ID NO: 7963 - DNA, 3229 bp, DROSOPHILA
tgcatatcatcgattatcattcgctgcagcttgcccgtcagctcctgatgatcctcacagctttctagaagcttaacaaagtagtccaattgggtaatattggccatgctgttgcggtagaccgcctccacgcgttccaatttgatgtcctgttccgagagcgtattctcggctaaattgcgttcgttgctggccagggcagcctctttcagcataatgtcaaagaagcacttgttaagtgcctcggaatccggatgtctctgcaagccacgcagcaggatgtccttgactcgatcgatgttgagccgattgaactcgtacagccataaggcggcgtccacccaaagatccggcgagtcgccatggtactgcaaaagaataacaacaatggataagtaatcaatggaagtgagcaggctggcaaatactaaccagcagcatcttctcgtatatgcccgccacctcgacaggatttgacttcctgctgaacttgatccagttgctccacagccgtctgtcgtggttaaacttagccaaggcctctctgtacaggcgcatgatccgcgtggctatggaggcctttagaccggtgagtttaacgtgcatcttcttttccttgtccacgatggtcatgtgcatgtgcttctcgtacagtatgaagtccaggtagtcggtgatgctctggtggctcttgttgatcttaaggaacaagcgttcccgcctgctaacgatttctctgcaagaatatggatgaaatgggggcacagactccaaattcgtttggatttctcacctgacctgatccgctgtgaatacgctgtagttcttcatctgctcgtattccggcagcaggcgctcctgcatctcagctatgaactcggccatatttgcttagttttctccttaatcgtacttagtaatattgtttatttctttaaaaactagcgcacgtgcaacgcaacggccgtttatcgattgtccaatttctggagagttatcgctgacagggatggtagaaagggtaatttaaaaaaaatatatatatatgtcaaaatttaaaaatggtcaagagataatgataaaattacaattgtaaagtttttaaagtttcagctttttaattaaaatgcgtttactggccaagagagcgatagttgccgatggcgagaccatggagttgccatcttgatttcttcttcttcttcaatctctttaatcgcacgtataaataagttttggacgccaagaaaataacaaaattcgcagttggaataacacaattagcgtaaaagcacaatggccgaattctcagtggaacgcgtcgaggacaagcgaacggtgaacggacgaacggaatactatctaaagtggaagggctatccgcgcagcgaaaacacctgggagccggtggagaatctcgactgtccagacctgatagccaacttcgaggagtcgctgaagaacaacaagaaggagacaaagaaacgcctgtccacctcctccacacccgaatccatacgcagcaagcgcaagagcttcctggaggacgataccgaggagcagaagaagctgatcggctttgagcgcggtctggaggcatcaaaaatactgggcgccaccgactcatccgggcacctaatgttcctcatgaagtggaagggcagcgatcacgccgaccttgtgcccgccaagctggccaacactcgatgcccccaggtggtcatacagttctatgaggagcgcctcacctggcacacgggcagcggcaatggtaatgggaatacgaattccgtcaatttgggatcatccggtggcctgggctccgtcggcggcagtggggccggcgatgatactgctcccggcagcgttggcaccaccggtggcggcagcaatatagatggcggtgacgaggaggatcccgaaccggccagccccattggcagcatcaatcaagacgagaatatcaagccggacgagagtagtgagctggacaacggacagccggatgcggatgactagttgagtggcagatacagatgactgtttcggattcactcgcttatgtggatacatacacaccggctttatacgatatatgtacatacatatttcgtagcgtagcccttaagataaaaaaattggacaaactgaagttctggcgtcagtcagcggtagtatatacatatacatatatacatatacatatatatacatacttaatctataagttcaattgtaaaattgtttttaacatctacctttatttttgacccacataaatgttttataagcatataacatcacagtgttaaatacaattggcctaaactacgcttaacctgatcaatgaggaacgactcagactgaaggaccacctttctatcttaacaactatccagctttctaacactttaagttaaaaaaaaacacattgaaattgccaatatttttgtgtggaaatcaaaagacgccaattgtgctgcccacctagcgcctttatagccagaatttgagattttttcctaacaggcagttattaagatcgattaatttagattttcccgattttttcattgtttcgcaaatcattatgtgttccaaacaaaagcttttaaaactatgtaggtttgtaagactaaagtaaagtacgaataaaacaaaattgtgctggcagataatttgccatgccgtgcataagtacaaatatctaagaagtttcaatcataaatacacattctttctcgctgtcccgaagttttaatacaaatattttgtttaaacatttgacaaaaatcaaataaaatgtcaaaaatgactgaagaattggagaaaccaatttgtaatagctactatttccgctcatctctgatcgatagcaggaatattattcgatagactgcaacaggagccggcaaagtgtaaactaaaattattatattgaaatatttgatgcacagtagagacgccgcgagccaattctagcgtggaaagatggcacaaacgagctccatgaagttgctgggcgcccgcaacatgtcctgcattgtggagcgtatggagtggaacaacaagatggatctaattgcctacggaacggaaaagggtgagcgtctgcctccgaaattgccaagaatcaccaaataaactgccagtgggcttatcccaatcatgtggataggtgaggtggtcatccagcgtctgaactggcaaaagattgtcacctttccca

SEQ ID NO: 7964 - DNA, 1143 bp, DROSOPHILA
ctgacagggatggtagaaaggtttcagctttttaattaaaatgcgtttactggccaagagagcgatagttgccgatggcgagaccatggagttgccatcttgatttcttcttcttcttcaatctctttaatcgcacgtataaataagttttggacgccaagaaaataacaaaattcgcagttggaataacacaattagcgtaaaagcacaatggccgaattctcagtggaacgcgtcgaggacaagcgaacggtgaacggacgaacggaatactatctaaagtggaagggctatccgcgcagcgaaaacacctgggagccggtggagaatctcgactgtccagacctgatagccaacttcgaggagtcgctgaagaacaacaagaaggagacaaagaaacgcctgtccacctcctccacacccgaatccatacgcagcaagcgcaagagcttcctggaggacgataccgaggagcagaagaagctgatcggctttgagcgcggtctggaggcatcaaaaatactgggcgccaccgactcatccgggcacctaatgttcctcatgaagtggaagggcagcgatcacgccgaccttgtgcccgccaagctggccaacactcgatgcccccaggtggtcatacagttctatgaggagcgcctcacctggcacacgggcagcggcaatggtaatgggaatacgaattccgtcaatttgggatcatccggtggcctgggctccgtcggcggcagtggggccggcgatgatactgctcccggcagcgttggcaccaccggtggcggcagcaatatagatggcggtgacgaggaggatcccgaaccggccagccccattggcagcatcaatcaagacgagaatatcaagccggacgagagtagtgagctggacaacggacagccggatgcggatgactagttgagtggcagatacagatgactgtttcggattcactcgcttatgtggatacatacacaccggctttatacgatatatgtacatacatatttcgtagcgtagcccttaagataaaaaaattggacaaactgaagttctggcgtcagtcagcggtagtatatacatatacatatatacatatacatatatatacatacttaatctataagt

SEQ ID NO: 7965 - protein, 240 aa, DROSOPHILA
MAEFSVERVEDKRTVNGRTEYYLKWKGYPRSENTWEPVENLDCPDLIANFEESLKNNKKETKKRLSTSSTPESIRSKRKSFLEDDTEEQKKLIGFERGLEASKILGATDSSGHLMFLMKWKGSDHADLVPAKLANTRCPQVVIQFYEERLTWHTGSGNGNGNTNSVNLGSSGGLGSVGGSGAGDDTAPGSVGTTGGGSNIDGGDEEDPEPASPIGSINQDENIKPDESSELDNGQPDADD

SEQ ID NO: 7966 - DNA, 4231 bp, DROSOPHILA
tagtggcaaagactatattgatttatgtttaatctatgttcgagaacgaagcgcatcgaaatgcttttaagacgtattacacaaccaactgtaattattatctgatattttcaaagattttaaacaacttttatacgtaaacaaaaatcacataaaaattaaaaaaaaacaacaaaaacgaaacgaaaaacatttatttcaaaataaacgaatcgagacagtgaggcgtggggcagtctgcgataatatgcagggcggtcaaacctacagatataattacaaatattgatgtgcatacaataaacttatgcctttccctacaacccgaaaagtcctcttccttggcccggaatcgaaaaaaatgtcaaaaaagaaacaaaaatgggccaacacagctggcgaggcgaaagcgaaaagttgccagcatatacacaaatatatttctgtaacttctataatacaccaagcgcctgataagcgctaaagaataatatctaaaacgaaaacggatcaaaaacaaagtacttcaatgagaaataaaacgatatttaaagaattcaaactaccatgttctaacgggatgaattgggcgttgggtatttatattttgaaacctataaacttatattcgtattaaataccaatgtattattatttgttatttcgcctttctagggcgaaataacaaagacaatgcttttttcccttttcagattacccttttatagaaaagcaacaaaaaattaatctgtaattaattttatataatattgattttacggctataaacaaaagtttgtcaacaagtttacaattttcgaatctttaatgtttatattaatattataaagccataaaaggattggtaattttttaatttaaaattcaattttagtgttgtgcttagctaacgagcctttacaacactgcccgccagcaatgcgatacttgtatcgagccgtcgtctatcgaaacgtcggccaatcgaaattgttcatccctggaagaagacaagaaaaaaataatatataataatagaatattccaccgtgataatattgccaagcattgttttccgcgtctttgccgtcggtaattgggcaacagtcagaacgaccaaaaagccgaagggccccgaacagcaggataatcggcagaaagtacgaggcatcatcgacaggccaactaaaccacaacgacaaccacatccgcagtcaaatcccaatccaaatccacgtccaaatcccatttcgagtgaaacagcgagtgagacagcgaaatgccactgttcgggaagtcacagaagtcgccagtggagctggtcaagtcgctgaaggaggcgatcaacgccctggaggcgggcgaccgcaaggtggagaaggcgcaggaggacgtcagcaagaacctggtctcgatcaagaacatgctgtacggtagcagcgatgccgagccgccggcggactacgtggtggcccagctgtcccaggagctgtacaacagcaacctgctgctgctgctcatccagaacctgcaccgcatcgatttcgagggcaagaagcatgtggcgctcattttcaataatgtgctgcgccgccagattggcacccgttcgcccaccgtcgagtatatatgcacgaagccggagatcctgttcaccctgatggccggctacgaagatgcgcatccggagatcgcactgaactccggtaccatgctgagggagtgcgcccggtacgaggcgctggccaagatcatgctgcactcggatgagttcttcaagttcttccgctacgtggaggtttccacctttgacattgccagcgatgccttttctacgttcaaggagctgctcacgcgccataagctgctgtgcgcggagtttctggacgccaactacgacaagttcttctcgcagcactaccagcgcctgctcaactcggagaactatgtgacgcggcgtcagagcttgaagctgcttggggaactgctgctggaccggcacaatttcaccgtgatgacgcgctacatatccgagccggagaacctcaagctaatgatgaacatgctcaaggaaaagtcgcgcaacattcagttcgaggcgtttcacgtcttcaaggtgttcgtggccaatcccaacaagccgaagcccattctggacatcctgctgcgcaaccagacgaagctggtcgactttctgaccaacttccatacggatcgctccgaggacgagcagttcaacgacgagaaggcctatctgatcaagcagataaaggagctgaagccgctgcccgaggcttagttggacctccacctcggctccaacttcagctccaactccagctccagcgtcccgggggcaaaaggaccgtagccagaagccagaagcgatcgatacggaagcagagagagcgatggtgggttagcaggatgtgaacatgttttgtgtgtgggttaaagcaaatatatattatatactatattttgtgacgctgatgactctacacttgtgagtaactaaacaataatttagacaacaacaaaaacaacactgatgatgataatgataaaaataacgataaagcgaattagaaaacaagaaaaagtacgagtaaatagcgtaacgccgaaaaataaaactgtaccgagagtttcgaatttaacatagccacatttagacattctgggcctagagatccgctatcctattatacagatatgtttaaccattcgtcgatcctccgcgaagtaatcccccttcctttccagaccctttttttcgatatccatttaactagttgttgtatttaaaatttgatcgtttttgaaacgagatatcccttcaccgccttgacctgccacgccccttttgcgccccaaaaaaaaaaaactgaagattcacaatgagttttgacttaaaaatgtaattccacgcaaaattcatgaaaagaacgaaaactaaatactgcataaaaataataataattcatagtgataattgtctgtgcatccttcggcatggactctactatatatacactgatatatatatatagaaagagcaagagaaagaaaaagagagagaaagcattcaacacacacacacactacacacatgcatacgtacatagttaaaagggaagtaaaacaagaaacaacaacattgcaagcaacataataactatacgattattataatttatattattcccaaattaaagataacagccaaacaaatcagcagtttttccactgtgggcggtggttttctcagggggcgtgcagctcccccctgagtcatgtgcaaaaaatcgtgccagggcggcaacctcacccaaaaaacgtcgatcaagggctggggagatgattcacacgctgggaatgccaccgaaaccaaaagagatttcaaatcacgtttcaaggtgtgcctaaatgagtaaatgagtccattccaggactcagcctgctgtaggaatcccatgaaggagttttcaaatgtgtgcaggcttctactttaatcgttgtcgactaggttttattacaattatcttaataaatgaattcgagagttcttaggctagctacatatgtatatattaaggatggctacatctatcgtcgcttcttcttctccagcttacgaatcttgtgcaggcgcgtccggaccggctcgccctcccgctccgtcacttcgccggactccggattactttggccatccgggttattctccatcaatactgcggccgaaatgcaaacgaactggaagagagcacccacataaagcccgtatcggattagcaagctgaagatgtcctcgtcgccgtacttgtccagggctgcggcggcgcccagactgtccgcggaagccgacatcgctgcgctggtattgtttataaacaaaacccgcgaggattagacaaaaaaaaataacaactacaaaaagtttgttttttgtattgggtagagatggtaccctgaaccaacagttcaggtggaaactatcgataacttttttaggtcaaagttttaaggttgttagctcattaacggcaagtatttaaaggcttgcacaaaatcttcgcttgattttatttaaattcaattacctggattattaaatacattttataaagtttaacactagtgaaataaatatcccatccccaacacattcttcagggttaccgtttaaggtatgttcaaaactttatggtatattccggagccctac

SEQ ID NO: 7967 - DNA, 2231 bp, DROSOPHILA
ctggaagaagacaagaaaaaaataatatataataatagaatattccaccgtgataatattgccaagcattgttttccgcgtctttgccgtcggtaattgggcaacagtcagaacgaccaaaaagccgaagggccccgaacagcaggataatcggcagaaagtacgaggcatcatcgacaggccaactaaaccacaacgacaaccacatccgcagtcaaatcccaatccaaatccacgtccaaatcccatttcgagtgaaacagcgagtgagacagcgaaatgccactgttcgggaagtcacagaagtcgccagtggagctggtcaagtcgctgaaggaggcgatcaacgccctggaggcgggcgaccgcaaggtggagaaggcgcaggaggacgtcagcaagaacctggtctcgatcaagaacatgctgtacggtagcagcgatgccgagccgccggcggactacgtggtggcccagctgtcccaggagctgtacaacagcaacctgctgctgctgctcatccagaacctgcaccgcatcgatttcgagggcaagaagcatgtggcgctcattttcaataatgtgctgcgccgccagattggcacccgttcgcccaccgtcgagtatatatgcacgaagccggagatcctgttcaccctgatggccggctacgaagatgcgcatccggagatcgcactgaactccggtaccatgctgagggagtgcgcccggtacgaggcgctggccaagatcatgctgcactcggatgagttcttcaagttcttccgctacgtggaggtttccacctttgacattgccagcgatgccttttctacgttcaaggagctgctcacgcgccataagctgctgtgcgcggagtttctggacgccaactacgacaagttcttctcgcagcactaccagcgcctgctcaactcggagaactatgtgacgcggcgtcagagcttgaagctgcttggggaactgctgctggaccggcacaatttcaccgtgatgacgcgctacatatccgagccggagaacctcaagctaatgatgaacatgctcaaggaaaagtcgcgcaacattcagttcgaggcgtttcacgtcttcaaggtgttcgtggccaatcccaacaagccgaagcccattctggacatcctgctgcgcaaccagacgaagctggtcgactttctgaccaacttccatacggatcgctccgaggacgagcagttcaacgacgagaaggcctatctgatcaagcagataaaggagctgaagccgctgcccgaggcttagttggacctccacctcggctccaacttcagctccaactccagctccagcgtcccgggggcaaaaggaccgtagccagaagccagaagcgatcgatacggaagcagagagagcgatggtgggttagcaggatgtgaacatgttttgtgtgtgggttaaagcaaatatatattatatactatattttgtgacgctgatgactctacacttgtgagtaactaaacaataatttagacaacaacaaaaacaacactgatgatgataatgataaaaataacgataaagcgaattagaaaacaagaaaaagtacgagtaaatagcgtaacgccgaaaaataaaactgtaccgagagtttcgaatttaacatagccacatttagacattctgggcctagagatccgctatcctattatacagatatgtttaaccattcgtcgatcctccgcgaagtaatcccccttcctttccagaccctttttttcgatatccatttaactagttgttgtatttaaaatttgatcgtttttgaaacgagatatcccttcaccgccttgacctgccacgccccttttgcgccccaaaaaaaaaaaactgaagattcacaatgagttttgacttaaaaatgtaattccacgcaaaattcatgaaaagaacgaaaactaaatactgcataaaaataataataattcatagtgataattgtctgtgcatccttcggcatggactctactatatatacactgatatatatatatagaaagagcaagagaaagaaaaagagagagaaagcattcaacacacacacacactacacacatgcatacgtacatagttaaaagggaagtaaaacaagaaacaacaacattgcaagcaacataataactatacgattattataatttatattattcccaaattaaagataacagccaaac

SEQ ID NO: 7968 - protein, 339 aa, DROSOPHILA
MPLFGKSQKSPVELVKSLKEAINALEAGDRKVEKAQEDVSKNLVSIKNMLYGSSDAEPPADYVVAQLSQELYNSNLLLLLIQNLHRIDFEGKKHVALIFNNVLRRQIGTRSPTVEYICTKPEILFTLMAGYEDAHPEIALNSGTMLRECARYEALAKIMLHSDEFFKFFRYVEVSTFDIASDAFSTFKELLTRHKLLCAEFLDANYDKFFSQHYQRLLNSENYVTRRQSLKLLGELLLDRHNFTVMTRYISEPENLKLMMNMLKEKSRNIQFEAFHVFKVFVANPNKPKPILDILLRNQTKLVDFLTNFHTDRSEDEQFNDEKAYLIKQIKELKPLPEA

SEQ ID NO: 7969 - DNA, 3682 bp, DROSOPHILA
aaaaaaaataacgatatttgtacaacaattcaaaaccaacaaagtggaaagttgtatctagaattcttaattgataaataattagtatatatgtatattagttccatatctttaatcttaacgctaaaatgtaagtatttcccataaaccgttacattattgtaggccgttttcttaaaaggacacaaaaataggccgagaattctgggacgccccttattttacgtttggagacagtctggcgttggatccagttttatagcctcccgggggccgttaacacaagtcttggaaaatggggaacgggaaaatggaatcaatattagagcgaggaaaccccttatctttgcgggttttctttgtcatgatgcatatgtacaccctcgtttcatatgtacgtattgaaatacacatttgatcagttttccgtttatttggcactttttaccttcaaaacgggcgtcagatattcggccacattgagcgctgtgcccttgacggtgttgagaacactctgcatttcgttggccgctgagtattcgcactaatctaaacgcttaaacttaataaatacaattaagatggctctctcaattgacttgcacttcgcagctaattgtttttgtcttgccagtcgcgataccaacaacagtgcggtgcggtcatactagtctatcgatgtgggtgggactatcgataagttgttgcaggaacaacggcactttttgcaatggattgcccaaatataaaaacaacctgtaatttacattgttaaatacggactaatctaataaattttgttaagaaaaaatgtctaaaataagttctaaatttattaaaaacccgaattttagcgaaggtattttaaaatagcacttattcatacttttaaatgattttaataaaaataaatcttaccttaagaaagacattccttttaaaatgtagtacgcatgttggtatattcgatagcttcggtcacactatgtccattcgcgcacattgtttctaacgtttgtacgcgacgaaatggaagaaaaggttctgccgaaattcgtattaccgtctccaaagttcggcaagcccaatggatccaccacatccaatcacctctacctgacccccagcgggatgaccctgctgccgcgctccaagcaaccgccgcccatgtacggtgcacgaggatcaacagtgccagctaaatatctgcaccaagaacaagtgagtgcaccaataatagttcgagcttgttctttaaacattccttaattcaaaacatagagcagcccagtgagcgtgcctgcatccccgccagtttaccattctcctccgcgaccggaattttgtcacacatgtgtaatggagctggccaactctcaggatatgaaactccacctggagcaacacgagttctgccctgccgatgactgcgactttgcggcgctccacaacatcctggaacgtcacatagaatccaatcacatcacaggaacctacgtaaaggtaaagaaagtttggtccgaggaagaattggccgcttggagggcagaacgaagaaaaaagtaagttaattagtagaaatttcttttgttctttaaaataagcagctcaaattgtagatttcccactgcggccaatgttgagctggctagattagccaaggaacagcgaattaaacgcggagagcgcctggaggcttcgaaatctcgcttcggaaaccgggaagatcgccaacggacgcgaggaggaccccagggagatcacaaagttcgtttcgatccgaaaaacaagaaaaagagatgtgccaaagggaaagccaatgaaaagaagaaaaaacgtgttggtactgataaagcaaacgaagctttgaagcagaaagaaactaatgaagataaaaaagaagaggaagttaatttgtgctccctgggaaatgctaaatttggaggaactggacaaatgccggagtaccagcactttaaggcaaaagttcaaaagaaggataatgctttgtctagctttcttggaatgtacgggtcagatagtgacgaagaaagtgaagctgagagtgatgatcagaatacagcagactgcagtaaacaaatcccagcacaagtagagagctcccaaagtatgccatctgaaatcacagaaatgggtccagcccttgaggcttcaaatacacctaactctgttgataatactcaaacttgtgaagactttacacctatgttggaaatgacatcatcagaccaagtgccgcgagaaataagcaacattagtcaaataactacatctaactcagagcctgccaaggaagatggctcctccgacgaaggaccggatgaagagcccttccagcgagtgaccgaaactataacagcgtcagatccagtcaaaccacctcctgaaccaatggaaccgaagccacaaactgcacccaaaagagcagctccaaagcgaatttatggcttgaactacaagagagcgcgcaagcaaaccccgaacactatgttgtcgaaactattagaatccgatatacgccatgaaagaaatgtcctgctgcagtgcgtgcgacatgtttgcgagagaaatttctttggcattggtcaagctaaaccaaatcaagaaacgttggttaccacttgtgataaaaccgttgattcaacaccggatgcattataactttagcttctaagttaggcaaataaagtacaaatagtagtatgcaaatgtatttcttaaaaagagtgtcacttatgtttcgattaacgcaattggttgacaaaatgtgccttttcggaatgcactctaaaaaatttaaaacccttacccttaaagatagcgcaagattagttggttgacattgaggagtctccgcccatgggatgatctccgctgccggcatttcctcctccggtttgttgttgctgctgttgtgccgcctgttgcatctgttgttgttgctgctgctgctgttgttgttgctgctgctgttgctgggcggcggcatgttcctgctgacgcttcaactgctgacgagctgcatgtgagtgtttggccttagtttcctcaagttcacgcactctggacctagcgtgctgaatgcgatgccaagccatttggagcactttggcggatgcatagccggaaccctcgtgtggctgacccgtggacacctgggtcaagtagttgatctgctcggacagcttcgattccacgctggacagactcttgagaaactgctgcgactgggtctccgcatttttctgggaagacttttccttgcccaactcctgcaaggcttgtcctggaaagatcacacatgttaaccactttttaatgataagcaagttccgtcccacctgcactttgcatgcacaggattatctccttttcgatctcatctagagcgtgtattttgtccagaggattcattgcttttcacgttctgcatataaacaaaacaaagtcgaccagataacagtgtgaccagaacacgagagggaggcctttaaaaatataaatataccaaaaagttgtagtgtctgcaaaatactatggatttcaagatatcattcgaaaatatttttagaaaaagaataatcatccaaaaagaatcacatttcaaagaacattttacgcatttgaattaatttattaagttctatctcgaattatgatc

SEQ ID NO: 7970 - DNA, 1565 bp, DROSOPHILA
cattgtttctaacgtttgtacgcgacgaaatggaagaaaaggttctgccgaaattcgtattaccgtctccaaagttcggcaagcccaatggatccaccacatccaatcacctctacctgacccccagcgggatgaccctgctgccgcgctccaagcaaccgccgcccatgtacggtgcacgaggatcaacagtgccagctaaatatctgcaccaagaacaaagcagcccagtgagcgtgcctgcatccccgccagtttaccattctcctccgcgaccggaattttgtcacacatgtgtaatggagctggccaactctcaggatatgaaactccacctggagcaacacgagttctgccctgccgatgactgcgactttgcggcgctccacaacatcctggaacgtcacatagaatccaatcacatcacaggaacctacgtaaaggtaaagaaagtttggtccgaggaagaattggccgcttggagggcagaacgaagaaaaaaatttcccactgcggccaatgttgagctggctagattagccaaggaacagcgaattaaacgcggagagcgcctggaggcttcgaaatctcgcttcggaaaccgggaagatcgccaacggacgcgaggaggaccccagggagatcacaaagttcgtttcgatccgaaaaacaagaaaaagagatgtgccaaagggaaagccaatgaaaagaagaaaaaacgtgttggtactgataaagcaaacgaagctttgaagcagaaagaaactaatgaagataaaaaagaagaggaagttaatttgtgctccctgggaaatgctaaatttggaggaactggacaaatgccggagtaccagcactttaaggcaaaagttcaaaagaaggataatgctttgtctagctttcttggaatgtacgggtcagatagtgacgaagaaagtgaagctgagagtgatgatcagaatacagcagactgcagtaaacaaatcccagcacaagtagagagctcccaaagtatgccatctgaaatcacagaaatgggtccagcccttgaggcttcaaatacacctaactctgttgataatactcaaacttgtgaagactttacacctatgttggaaatgacatcatcagaccaagtgccgcgagaaataagcaacattagtcaaataactacatctaactcagagcctgccaaggaagatggctcctccgacgaaggaccggatgaagagcccttccagcgagtgaccgaaactataacagcgtcagatccagtcaaaccacctcctgaaccaatggaaccgaagccacaaactgcacccaaaagagcagctccaaagcgaatttatggcttgaactacaagagagcgcgcaagcaaaccccgaacactatgttgtcgaaactattagaatccgatatacgccatgaaagaaatgtcctgctgcagtgcgtgcgacatgtttgcgagagaaatttctttggcattggtcaagctaaaccaaatcaagaaacgttggttaccacttgtgataaaaccgttgattcaacaccggatgcattataa

SEQ ID NO: 7971 - protein, 511 aa, DROSOPHILA
MEEKVLPKFVLPSPKFGKPNGSTTSNHLYLTPSGMTLLPRSKQPPPMYGARGSTVPAKYLHQEQSSPVSVPASPPVYHSPPRPEFCHTCVMELANSQDMKLHLEQHEFCPADDCDFAALHNILERHIESNHITGTYVKVKKVWSEEELAAWRAERRKKFPTAANVELARLAKEQRIKRGERLEASKSRFGNREDRQRTRGGPQGDHKVRFDPKNKKKRCAKGKANEKKKKRVGTDKANEALKQKETNEDKKEEEVNLCSLGNAKFGGTGQMPEYQHFKAKVQKKDNALSSFLGMYGSDSDEESEAESDDQNTADCSKQIPAQVESSQSMPSEITEMGPALEASNTPNSVDNTQTCEDFTPMLEMTSSDQVPREISNISQITTSNSEPAKEDGSSDEGPDEEPFQRVTETITASDPVKPPPEPMEPKPQTAPKRAAPKRIYGLNYKRARKQTPNTMLSKLLESDIRHERNVLLQCVRHVCERNFFGIGQAKPNQETLVTTCDKTVDSTPDAL

SEQ ID NO: 7972 - DNA, 8544 bp, DROSOPHILA
tcccgataccagggtgccgagtggagccctctacacctttgatggcaagtctgtggtggacagtagcctagtgctgccgcccaaattggatgccccggacaatgccaacgtccaccagcgacatgcccagtacggattgacccccttggagcagctggtccgtaccacacctcagtttggagtctacagaggagagctgccacaggaattccgaggcacagagccccaacccgtctccgagtattcccatccagcgcccttcagtcgtaccactcctgtgttctccagcagcagtggcagcaccatctatccgtattcctcgtcgacaggagcatctacatccaccgtatcatcatcggcctcatcgccattgtcctcatcatcgctgagacccatttccactaagctacagcttctgaagccggagggccgaagagcgtaggatctgcaatagcgaaattataagcaagaactagcatttaaccgttttggggtgtacgactctcataaccacgttacatttactcgtaaacctgtattagcccgtagtttttttttaacacttatgatgctcttaattttaaacgaacgcatgaattttattagctaagctaaccgattctgattaagccgcattttagtcgttgtgaaataaaaccaagaagtaatctgatttgtgtttgatttccggttcaaccggaaataaagatatgtttgatttaaatacaagtaaggtcagaggaaattggttattctttttaagtaactgtcattttaaacgtagtactcttagtacttagtttttactttcttaacactgacaatcataagtcgttcgatataataccacacaacgcacttgtatcgatagctatcacaatgtcaaaaattcaagcttatcgataaataaaatattaagttctgaaacatagatttaaaaagtagagtttggaaagaaaagctggcaaatagctgaccaatatttcgctacagcgtttcataccaaatgggaacacacccttgttaatagtatcgaataactatcgactgctgttccacctccagcaaaaacgtgtgtttttgttgcgctgctatttgtttaatttaatttttaagttgaaacaattatgtcggcgcaatatcaaagattcctgaaagtactagaaaagtggccagcggagaaatcaaaagtcggcaggtaagaataagcatcaaaacaccctggtatcaagaatgttcgttctggcggcgcaacaactttggattatctaacaaataattattgaacggatttaatattatttgtattaaatagttagttttgcacacattgatttgtgaattgcttattagatcactttggcaagtggaatatattatgggaatttacttaagaactatttcacctgccggcccgccaagatttttaggttccacgccaactgaccgtgtggattgtgggtttcatttagccgattctgagcggctgtggatcgccaatcttagttacttgttttacttggcttaaaaggcttacattgccttaccagttttcagaacatacagacatcaaattatcttaaattgtgtagtggcaaaaaaatggcctctaaattcgcatatcagttggagccggagaaatttattttgagccatggacttaagtaagtttggaaatatcttcttaagcttcgttataaaaactttgactattataaatttcactgtacaaaggttaaataaagcgtgctgataataatatttggataataattgaggaagaagaaaacatgttctattaatttctttaacgtctgttacttttatggccacatttgttagccttttgtcggtttccaattacacaaagtggttttccacctcaaacgcccacttccgcggaaagtgattaaatcttcttctcagctgccccgcatggaacgaacatccgccacagaaaatacacacatgtacactcatttagtgggaactaaactttttcgccttttctcaaacaaaagggatctcggcgagcagattcgcaaacaggtgaccaagcttacaagtctagagggcggagcgacggataaggagctggaccgtcagatcaattctctggagaggctatccaataacgtctacgcaaagaagtatccgcgcactttcgagtccacggccactggactaaccgccgcccagtgcagccaagtgttgagctccgagttcctgcaatatttgaacgaggactcaaaaaaaaagaagtagcacgatgaagcgactcctaaaccctactagactgagactggattggttgagacgaagctctatagatgtgacgactgctccccatgttcctgtgctctgcgacaccgccattgaatacctgcagcccgttccaggaggcacctacttcgacatgactttcggagctggtggccacacgcggcgtcttctggagaagtgtcccgaggcaaaggtatacgccctagatcgagatccattggcccaccaactggcccgcgatatgagcgaatccgaagagttcaagggtaggctgattcccctgcttggaaaattctccgatttaccaaagcttttcaaagaacatggcctggccaagaactcggtggacgggatgctttttgattttggttgcagttccatgcaattcgatgaggcggtcagaggcttctccatctcgagggacggtccactggacatgcgaatggatggtggccacagcggaggggttacagctgccgatgtgttggctaatgttgaagagggcgaccttgtgaagattttaaggatgtatggtgaagagaaagcagccaagaagatagccagaggactggtagacgcgcgcaacgccctctttaaaatcgagaccaccaagcagctggcagatataattgaaaacatcatggatggcgggaccaggaaggataagcttcgacgaccggcacactcagccaccaagaccttccaagccatccgcatatttgtgaacaacgaactaaacgagatcaactacggtatggttttggccaacgaaatcctccgtgtggatggacgcttggtgaccattaccttccactcgctggaggacactatcgtgaagcgtcacatcaacggaaacgtcctggcaggcgccgccaatgctcttcccctcaagtactccagccattatgcaatagacgagccagatatactagaatcactgaccaagaagagctggaaacaactacatcgccatgtcattgtgccagacgccgacgaggtggcgaggaacacacgcagtcgatccgccaagctgagagcagccgtcaaaacaaactaaacgcatgtcaataaattccctcggtctagttcaaaattctctttctcagtctttaattctcccaaactctcgtcatggtatgcatgtttggactgttttggttatctgccaaaccaattggcacctgctgataacgactggtttatctatttaccacagttatttgcggttctcgtgcagagtttttgtttagttggattaggaaattgttgttaattgcccaggtagaatagtagtttagtacagtggtaccgattctccttttcttttgattgaatatttttcagaacataatataaatagggatagaaaatcattggttagtgatgctttccacagtgcacgtatttgatgaactcgttgaactttcgagtacctcttcaagtggttgataacggaggcgggcgaatttgatatggaaattgcgtatgccagcaatttctcggttaaagccatcgtataagcttaccattcgcacttctgcggttgttttgctcccagagattggagcatgttgtggtacttaggtgccttggcatacgtcagccggtgttgttcccggctaccaatcgcaagatgtgacccgcgagaaacccgaaaccgataatctcgaaggcgtctgataagggagcgggattacaaaaaatagagagaggcaccgggcggagcacctatgtgggctatagataggggtgtccgttgagtgctcagctcagttgcatagcgcgagccgagttggcgtggctagtgaggcggtactttcggtcatctggactaaaaaactttacgggcttgcgttttttcagcggagagtggacagcagagccggctatcaagatgagtggggccaagatcatatcgggcacggcggtggccaagtaagtgggcaaaactcttgcatcgtaggattcctatttatcatatccccgcctcccgttagatccattcgcgaagagctgcgtaacgaggtgacggctatgagcaagcaattggcggattttgtgcccggcttaaggattgtccaggttggtggacgtgaggactccaacgtttacatccgcatgaagatcaaggcggctacggagatcggtatcgatgccgcccacgtccagctgccccgatccatcaccgaggtggaattgctcgataaggtgagtttgcgacggaagcggattatgcaatatgggcaatacaatgttatatcaactgaaaaacgaaatattctctacttgaataaagttataaataataactaatcgactttaccatttcagataaacgatctgaacgaggacccccgggtgcacggcatcatagtgcaaatgcccctggattgtgacacacccatcgattcgcaccgaattacggacgccgtttccccggagaaggatgttgacggcttgcacacggttaacgaaggtcgcctggccatcggtgaccttggtggtttcctgccctgcactccttggggttgcctggagttaattcgccgttctggagtagagatcgccggagccagggctgtggttctgggacgcagcaagatcgtgggcactcccgccgccgaactgctcaagtgggccaatgccacggtcacagtgtgccactcaaagacccgcaacctggaggagatcacccgaagtgcagacattctggtggtcggaattggagtggccgagatggttaagggatcgtggataaagcccggagcagtggtcatcgattgcggcatcaatgtgaagccaggtgagtgatggtaatcccttatcagttcagttgactggcaaccccagtggaaatccaatagataatttaaagacttgctttaacaaattccctaatctgtggaaacatacgtttccacttgtttactgattacgccgtcaatcgcttatcaacgcattcgaccccctagtggaactcctaaccccgacgataagaaatgattttgttttcaaacatcatgctctcgagaattagttagggaacagctcccgatcggggcgaaccgatcccaatcacgattccaccaaattccaatttttgatcctttccagacgccagcaaggccagtggcagcaagctggtcggggacgtggactacgcggaagctctccaagtggcaggacatttgacgccagtgcccggcggcgtgggacccatgacggtggccatgcttatgaaaaacaccgtgcgatctgcggcccgattccttgagcgtcttgctaagagccagtgggcccttcaaacgctgcccctcaagccccagcgtcccgtgcccagcgatattgtgattgcccgtgcccaaaaaccgaaggacattgccgtgctggccaaggagattggtctggaagctcgtgaggtttccttgtacggaaataagaaggccaagatttcactgtcagtgttggagcgtctgaaggacaaggaggtgggtcactatgtggttgtagccggtatgacaccaacgcctttgggtgagggtaagaccaccacactaatgggcttggtccaggctctcggcgcgcacaagctgagaaacaccatggctgctctgcgacagccctcccaaggtccaacctttggcatcaaaggaggagctgctggcggcggatacgcccaggtgattcccatggaggagttcaatctccatctgacaggagacattcatgcggtatcggcagccaataacttgctggccgcccagctggacacccgcatcttccacgagaatacccaaaaggacaaggccttgtatgacagattggtgcccgcgatcaagggtcagcggaaattcagccccattcagctacgccggctccagaaattgggaatcaccaaaaccgatcccgatacccttaccgctgacgaatacggaccttttgcccggctggacatcgatccggacacgattatgtgggagcgtgtggtggacatcaacgatcggtacctacgcaccattaccgttgggcaatcgcccactgaaaagggtatttcgagggagacccggttctccatctcggtggccagcgagatcatggctgtgctagcactatcccgaagtctggaggacatgaagcagcggctggctgacatggtggtggcattcgacaaacgaggcaagcccgtaaccgctgacgatttgggtgtcaccggtgccctggcagttcttttgaaggacgctctcgagccgaacctgatgcagtcgctcgagggaactccagtgctggtgcacgctggtccctttgccaacatcgcccacggttgcaactcgatcatcgctgatgaagtcggcctaaagctggttggtaaaaatggatttgtctgcacggaggccgggttcggatcagatattggcatggaaaagttttgcaacattaagtgtcggacatccggtcgcaagccgaacgccatggtgctggtagccactgtgagggccatcaagatgcacggcggcggagctcccgtcactcccggagcccccttgaacaagcagtacaccgaggagaacttggagctcgtccagaagggtctgcccaatctgctgcagcacatcgagaacggaaaggccttcggcatgccagtggtggtgagccttaatgctcattcagcagacaccccggcggagcatgagttggtcaaaaaggctgctctggaggcaggtgcattcgccgccgtagtctccactcactgggcggacggaggagccggagccgttcagctggccgatgccgtgatcaaggcctgcgaacagggcaatcaattccgattgctctacgatctggagctgccgctggtggataagatgaacaagatcgctacgacgatgtacggcgctggaaaggtggtgctctcgccggcggctgaggagaaggtcaaacgcctgacggatgcggtaagtcgagaacattttcttcgagaaactgaaagtatttatagaaatgcattgttcaattcgcagggttttggcaatctacctatctgcatgtccaaagtctccggctccttcaccggcgatgccaaaatcaaaggcgcccccaagggcttcaccctggacgttgaggacgtatatgtttcagccggagccggctttgtggtcgccatgtgcggtgaggtcaccaaaatgccgggtcttcccacccgcccggcgatctacgatatcgatctgaatacggaaaccggagaaattgagggcctattttagacggcaacctggacaagggagaagattcctaataactttcaacgccttttcacatctaattccagagtagtaacaaatttatcgttttaacttgtatataaatgatatagagataagatttaaaagtcggtaaactaatatacatttctgacgatttgagttttctttaaaactatcgagtttttacttttcagaagctaaagaatggaaacgaaatatttttagtttttatatattttcatgatattataaatgaatttttttttatatgtagacaggttggaaatatataaattacacgaatacctatttttggccctcaaaagtaaggtagtattcttgcacaaaatcgcaaccaacaatgcatgatttttgctgactactttcaagccgactttttaggtactttgtctttttccaaagttccccttcttcactgtgctaacgtcactcacacgaggcgactcaaagtagtccacctttcgtatgttagacactatcttgaagtaattggcaatgatcttgtccacttcttgtccctcatatgcggtggccaattccttttcacatcgtgagactacgttcgtgagcagacctccggaccgaaagaacgctatgttgatctcccgtttgacccacttgcagatatgtgaatgggtgactggctcgaaaaagtgaaagatctcgtaaaagtgctcgtaactctcgccaaattttcgcatttcaagttcacccaacttgggaatgtccaggtggtttcgtctgatgatatgatatgggtcgtattgctccgaaaagtttgagaaccgaactgctggccagtcgaggttcagaagggtgttgtagagattcttcgggtggccaaggattccatgggacagatcaatcaagcggagctgcgatccgggcacaacgtactccaactcgatctgagcgatgtgaggatcagtgcccctatacttacgctttcctatccacagaatgggcaaatcctccgtca

SEQ ID NO: 7973 - DNA, 3003 bp, DROSOPHILA
taccaaatgggaacacacccttgttaatagtatcgaataactatcgactgctgttccacctccagcaaaaacgtgtgtttttgttgcgctgctatttgtttaatttaatttttaagttgaaacaattatgtcggcgcaatatcaaagattcctgaaagtactagaaaagtggccagcggagaaatcaaaagtcggcagatgagtggggccaagatcatatcgggcacggcggtggccaaatccattcgcgaagagctgcgtaacgaggtgacggctatgagcaagcaattggcggattttgtgcccggcttaaggattgtccaggttggtggacgtgaggactccaacgtttacatccgcatgaagatcaaggcggctacggagatcggtatcgatgccgcccacgtccagctgccccgatccatcaccgaggtggaattgctcgataagataaacgatctgaacgaggacccccgggtgcacggcatcatagtgcaaatgcccctggattgtgacacacccatcgattcgcaccgaattacggacgccgtttccccggagaaggatgttgacggcttgcacacggttaacgaaggtcgcctggccatcggtgaccttggtggtttcctgccctgcactccttggggttgcctggagttaattcgccgttctggagtagagatcgccggagccagggctgtggttctgggacgcagcaagatcgtgggcactcccgccgccgaactgctcaagtgggccaatgccacggtcacagtgtgccactcaaagacccgcaacctggaggagatcacccgaagtgcagacattctggtggtcggaattggagtggccgagatggttaagggatcgtggataaagcccggagcagtggtcatcgattgcggcatcaatgtgaagccagacgccagcaaggccagtggcagcaagctggtcggggacgtggactacgcggaagctctccaagtggcaggacatttgacgccagtgcccggcggcgtgggacccatgacggtggccatgcttatgaaaaacaccgtgcgatctgcggcccgattccttgagcgtcttgctaagagccagtgggcccttcaaacgctgcccctcaagccccagcgtcccgtgcccagcgatattgtgattgcccgtgcccaaaaaccgaaggacattgccgtgctggccaaggagattggtctggaagctcgtgaggtttccttgtacggaaataagaaggccaagatttcactgtcagtgttggagcgtctgaaggacaaggaggtgggtcactatgtggttgtagccggtatgacaccaacgcctttgggtgagggtaagaccaccacactaatgggcttggtccaggctctcggcgcgcacaagctgagaaacaccatggctgctctgcgacagccctcccaaggtccaacctttggcatcaaaggaggagctgctggcggcggatacgcccaggtgattcccatggaggagttcaatctccatctgacaggagacattcatgcggtatcggcagccaataacttgctggccgcccagctggacacccgcatcttccacgagaatacccaaaaggacaaggccttgtatgacagattggtgcccgcgatcaagggtcagcggaaattcagccccattcagctacgccggctccagaaattgggaatcaccaaaaccgatcccgatacccttaccgctgacgaatacggaccttttgcccggctggacatcgatccggacacgattatgtgggagcgtgtggtggacatcaacgatcggtacctacgcaccattaccgttgggcaatcgcccactgaaaagggtatttcgagggagacccggttctccatctcggtggccagcgagatcatggctgtgctagcactatcccgaagtctggaggacatgaagcagcggctggctgacatggtggtggcattcgacaaacgaggcaagcccgtaaccgctgacgatttgggtgtcaccggtgccctggcagttcttttgaaggacgctctcgagccgaacctgatgcagtcgctcgagggaactccagtgctggtgcacgctggtccctttgccaacatcgcccacggttgcaactcgatcatcgctgatgaagtcggcctaaagctggttggtaaaaatggatttgtctgcacggaggccgggttcggatcagatattggcatggaaaagttttgcaacattaagtgtcggacatccggtcgcaagccgaacgccatggtgctggtagccactgtgagggccatcaagatgcacggcggcggagctcccgtcactcccggagcccccttgaacaagcagtacaccgaggagaacttggagctcgtccagaagggtctgcccaatctgctgcagcacatcgagaacggaaaggccttcggcatgccagtggtggtgagccttaatgctcattcagcagacaccccggcggagcatgagttggtcaaaaaggctgctctggaggcaggtgcattcgccgccgtagtctccactcactgggcggacggaggagccggagccgttcagctggccgatgccgtgatcaaggcctgcgaacagggcaatcaattccgattgctctacgatctggagctgccgctggtggataagatgaacaagatcgctacgacgatgtacggcgctggaaaggtggtgctctcgccggcggctgaggagaaggtcaaacgcctgacggatgcgggttttggcaatctacctatctgcatgtccaaagtctccggctccttcaccggcgatgccaaaatcaaaggcgcccccaagggcttcaccctggacgttgaggacgtatatgtttcagccggagccggctttgtggtcgccatgtgcggtgaggtcaccaaaatgccgggtcttcccacccgcccggcgatctacgatatcgatctgaatacggaaaccggagaaattgagggcctattttag

SEQ ID NO: 7974 - protein, 934 aa, DROSOPHILA
MSGAKIISGTAVAKSIREELRNEVTAMSKQLADFVPGLRIVQVGGREDSNVYIRMKIKAATEIGIDAAHVQLPRSITEVELLDKINDLNEDPRVHGIIVQMPLDCDTPIDSHRITDAVSPEKDVDGLHTVNEGRLAIGDLGGFLPCTPWGCLELIRRSGVEIAGARAVVLGRSKIVGTPAAELLKWANATVTVCHSKTRNLEEITRSADILVVGIGVAEMVKGSWIKPGAVVIDCGINVKPDASKASGSKLVGDVDYAEALQVAGHLTPVPGGVGPMTVAMLMKNTVRSAARFLERLAKSQWALQTLPLKPQRPVPSDIVIARAQKPKDIAVLAKEIGLEAREVSLYGNKKAKISLSVLERLKDKEVGHYVVVAGMTPTPLGEGKTTTLMGLVQALGAHKLRNTMAALRQPSQGPTFGIKGGAAGGGYAQVIPMEEFNLHLTGDIHAVSAANNLLAAQLDTRIFHENTQKDKALYDRLVPAIKGQRKFSPIQLRRLQKLGITKTDPDTLTADEYGPFARLDIDPDTIMWERVVDINDRYLRTITVGQSPTEKGISRETRFSISVASEIMAVLALSRSLEDMKQRLADMVVAFDKRGKPVTADDLGVTGALAVLLKDALEPNLMQSLEGTPVLVHAGPFANIAHGCNSIIADEVGLKLVGKNGFVCTEAGFGSDIGMEKFCNIKCRTSGRKPNAMVLVATVRAIKMHGGGAPVTPGAPLNKQYTEENLELVQKGLPNLLQHIENGKAFGMPVVVSLNAHSADTPAEHELVKKAALEAGAFAAVVSTHWADGGAGAVQLADAVIKACEQGNQFRLLYDLELPLVDKMNKIATTMYGAGKVVLSPAAEEKVKRLTDAGFGNLPICMSKVSGSFTGDAKIKGAPKGFTLDVEDVYVSAGAGFVVAMCGEVTKMPGLPTRPAIYDIDLNTETGEIEGLF

SEQ ID NO: 7975 - DNA, 6236 bp, DROSOPHILA
attaacctccatggtttttatcttcttgccaagtgccttattctcaacctttagcgcttcaatttcggccagtgccttttcgtatttggcttcccatgcctgtagctccttggtattctgtgagatggtaaatgggtaactctgctgaaaggacgtattcctgcacaacttacacgatcttcggccttctgaaagtcgtccaaatcatcgtagatgtccagttcaagggatctgtccatttggtcaggcttctttgaacctgcaggctctatatcgtacaaatcgtgatagatatccaaatccatggatttatccttaacgttggacttcatcccgcccgcgtcctggtcttccaaatccatcaagtcctccagagcttcgggcagcaccagttctccgccagatttcgtggcatatgcaggcgtttccataccaatcgcttacgtttcttcttggctgccctttaaacaaggatacataaaatgaattgttagagttactgttttttaatggagctactttattgattacctgttcagtcataaattgatcaaaattcgaaacacaaaagaatttcaatgttcttgatttttgtttcagggaataaaagttccactaaagctcaatggtcactgtcctgagcatttcctccaaactggcgtgcaatttgtttccctgccgtgtatttgtataaatgtaattattattattattctatttaatattgttagaaaatcccgtgttgccgccaatcgataacagaagatgcagttgattatcggaagcaacagctgaccggctgaaaatgtggcaaccctgatagtggatatcgatatccagcagcaacatttggcgccaaaacgaatattttaaaaattttattatgcacttacgtgttttcccaagaatataattttaaaatcaatctagttcccatttcgtattactgtacacttaaattcgttaaaaaaaaacatcacaatacaaacaataatactcgagaaacactacacaatggcagacattccggaaaaaagttcttactacaagaaggaaagaagaaagttcgctctgatcacttacctactaaccgcgatattcctgatccttgcgctgttgcaatgggccactttccgctttgtgtacgtatgtattttcacattacttcatcctcactgcactttttcttaattttcagaaattttctaagggaattttttacttcgtaccattggttgagctgccttttttttggaataggcctgatactcctcgtacttttcatatttttcgaggtactgcgctttaataaaatggtaaactggttgtttgcctttctaattgtaagtctacaatgtgaaacataacctgggtggcagtatgaacttattctttccagtttgaatgcattgtactggggattgcaccgctggttgcccgccactacaagtatcagtttctcttcagcttccttatatggaccgtagcattggcgctttttattgtctgtggttcctttcttccggtaagaagagtccacatgaaagccatttgattcaaatctgaagcttcacatttttattgttatccccttaagctggatcttactttggatgttgtggtgctatttgtgcttgcagtggtttccattatcggcgccatatacttcgtgatgctctacatcgtggctaatgtcgcatactcgtttataatcgcccgttgctttatagtgatcagcatcttgatggttagtactgagtcatacatttttgaattagtttctgtcatttagtttcctccttacagtttgtcatgtatcacgcgcagattataaacggtggaaggttcgccgagatgcgcacgaaggactacttcctggcagccatcatactgttcctcgatttcctgctcctctatcttttctcattccaagtggccccaaaatggtcggatcgttgcgatggcgaacgttcaaaaaacttggtgctgttcacagaaactacgacgaattcgtatccaccaaaatggtggcgtacgagcacgaagggtatgatttcttattattagttcatgttagatgaaatattcaattaatttatacttttcacacttgttttcaaagataccccctaaagtcgttagccaacactgccgcccgtttggcgccaaacacaacagccagctgatttcatttcgcgttcctaccggtgaagaaactttaattggcacagagctgacctaaacaaataaataaataaacgcaacccggcgacttaaagactccacgacatcgggccgcagtgcaaagccagcgatggatcccaccatttcagtgtccaaggtgagtggcttcggcttccaaactggacatagatgtttaactacttatttttgttgtctgcagggctgttttgtctacaaaaatggcgctacgagagcagggaaaaaggcggccagcaaacggaagcgtcctgccgcagaatccagtagtcttcttggcaaagaggtagtgcagcagcccttctatgaggaatatcgcaaggcctggaatcagataaacgatcacattgccgacctgcagcaccgcagctatgcccgcactctggagcaactggtggactttgtggtggggcaggcagagcgcgacaccccggacgaggtgctgcccaccgccgccttgctaacgggcattaatcagccggatcatctcagccagttcacggcacttacccagcgactccatgcccaacgtgctgcaatggtatgtgtgctgcagtccagggattgcgccactctcaaggcggccgttgagacattggttttcgggctcgtagaagataatgcagaagtggagcaaatggaagacgaggacgaggacgaggatggtgccgaacgggatcgcaagcggctacgtcgctcgcagtgcaccatgaagcagttgaagtcttggtacacgaacaattttgactcggaacagaagcgccgccagctggtcgtcatccttcccgactttgagtgctttaacgcaagcgtgctgcaggatcttattctaattttgagcgctcactgcggctcgcttccattcgtcctggtcctgggagtggccacggccatgacagctgtccatgggacactaccataccacgtcagcagcaagattcgtctaagggtgttccagactcaagctgctcccacgggccttaatgaggtaatattccttaactctgtgctagtttatgtactaatcggttttctaacaacctttaggtgctggataaagttctgctgtcgcccaagtacgctttccacctgtcgggaaagacattcaagttcctgacgcacatcttcctatactacgacttctccatccacggctttattcagggcttcaagtactgcctgatggaacacttctttggtgggaatgcctttgctctttgcacagactacagcaaagcattgggacgcataaagcagctgacccacgaggatatggaaaccatcagaaggctcccatcgtttcgtccgtacgtcgagcagatcaatgattgcaaacgcatcatagccgtgctcacggacgatgactacctaaagaagaaactgccgcagttgctgcgcgactgcctgctccacttcctgcttttccgctgctctctggagttccttacagagctggttggtgatttgccgcgctgtccgctgggaaagctacgccgggaactgtacgtcaactgtcttaatcgtgcgatcatttcgacgccggagtacaaggagtgcctgcagatgctaagctttctgtccaaggacgaatttgttgctaaagtgaatcgagccctggaaagaaccgaacagttcctggttgaagaaattgctccgctggaattgggcgaggcctgcactgctgtgctgagacctaagttagaagctatacgccttgcagtggacgaagtggtcaaggccaccatggcgacaattacaacgacatcgcccaatgaaacccgccaggcgactgaccatttgactccggtggcctcgcgtcaagaattgaaagatcagctcctacagcgtagcaaggaggacaagatgcggcatcagctgaacacgcccaccacccaattcggacgagctctacaaaagactctgcagcttatcgaaacgcagattgtacaggatcatctccgtgcgctgcaggatgcaccacctattcacgaactttttgtgttcagcgacattgctaccgtgcggcgaaacataattggtgctccgcgggctgcactgcacactgccctgaataatccacatttttacatgcagtgcaagtgctgcgagctacaagatcaatcactgctggttggcacactgcccgatctctccgtggtttacaagctgcacctggagtgcggtcgcatgatcaaccttttcgactggctgcaggcctttcgatctgttgtgagcgacagcgaccacgaggaagtggcccaggaacaaatcgatccccagatccagtgagtaaaaaaatggatttctctctgtaatatcatcaatttcatttggttttcctttcaaccagggcccgattcacgcgtgccgtagccgagttgcagtttctggggtacattaagatgtcgaagcgcaagacggatcatgccactcgattaacctggtagctcgctcgggctatgaataaccaaaatcccttaggtatttttatcttttctatttatttatattggggcaaatttcatgtgtgggacgttatgaataaataaaacatcaatcgatttgtctactctgtacgaaatgcattaactttgtttgcgagtgaagcgcgttcttgtattttttaagtaaagcccagcagctggcaaggcaagcgtactaaatatcaattaccagtcttcccgactagcggttaccacgttccctgttcacattagtttcagagtctcgatggcggcagcgatgcgttcgatctctgcccgcgactcgcagagttttgtctcgttggcctcctgcacctcggcgggaaccttagttgcgtagtcggcggcctggatggcctgagttagcttgcccaccgtctgcaccagctggtcgctcttcttctgcagcttggctatctccttgtccgcctccacgagtcccttgagcagcaggtgcacctcgcactggcccgtcacggtgaggatcgcacagccctgcggtgcgggactgtcaaagaccacattggagcagtaggagattgtggccagatcgctggcgtagcgtttgagtatttcactgggcaccgaatccgtgcatactatatacacctcggttttaaccttgttgggcagattatagtcggaacgggcagatcggatgattcgcgccgccttctgcacaaattcaacgtccgattctatctttgtgctgcgccaggatgtattgcctagttatgaggaagttaaatttatttgaattctatcatcatgaagaaatcaaatgcgacttactgggatagctagccacgcaaatgctaggagcgggatttgccctcggaagccgctggtaaagttcctccgtgatgaaaggcatgaacggggagagtaagcgcagtccataatctagacatacgtagagcgtgcgccttgcggcggtctgctgctcctcgctgccgctctggaagatcggcttcagacactccaaatacacgtcgcacagatcgtagagccagaatgcgtagcaggcgctggtcgctgcagcaaagtcgtacgactcaaagccggtgttgcaagcttctatggcagctgccaagcgtgacaggatccaggcgtccatctggttgatcgctgcagacgcacttagctccgtgtcaaacttctcagagccggtgaagtacagcagggcgaacttggtggcgttccacagcttgttgcagaagaaacgatatcccagaacgcgattgatgtccaggttgatgtcgcgcgcttgcgtgatataggcgcacagcgcgaatcgaagtgcatccgagccgcactcgggaattccctgcggataatcctgtttctgtccagccttagccttttcgatctcccgaggatccaggttggagcccacaagttgagcatgcagtccctcgagcgtaatgccacgaataacatccataggatcgataacatttcccagggacttggacattttgcgtccgtgcgcatccctcaccatggggtgaagatagacctccttaaacggca

SEQ ID NO: 7976 - DNA, 3731 bp, DROSOPHILA
agaaacactacacaatggcagacattccggaaaaaagttcttactacaagaaggaaagaagaaagttcgctctgatcacttacctactaaccgcgatattcctgatccttgcgctgttgcaatgggccactttccgctttgtaaattttctaagggaattttttacttcgtaccattggttgagctgccttttttttggaataggcctgatactcctcgtacttttcatatttttcgaggtactgcgctttaataaaatggtaaactggttgtttgcctttctaatttttgaatgcattgtactggggattgcaccgctggttgcccgccactacaagtatcagtttctcttcagcttccttatatggaccgtagcattggcgctttttattgtctgtggttcctttcttccgctggatcttactttggatgttgtggtgctatttgtgcttgcagtggtttccattatcggcgccatatacttcgtgatgctctacatcgtggctaatgtcgcatactcgtttataatcgcccgttgctttatagtgatcagcatcttgatgtttgtcatgtatcacgcgcagattataaacggtggaaggttcgccgagatgcgcacgaaggactacttcctggcagccatcatactgttcctcgatttcctgctcctctatcttttctcattccaagtggccccaaaatggtcggatcgttgcgatggcgaacgttcaaaaaacttggtgctgttcacagaaactacgacgaattcgtatccaccaaaatggtggcgtacgagcacgaaggataccccctaaagtcgttagccaacactgccgcccgtttggcgccaaacacaacagccagctgatttcatttcgcgttcctaccggtgaagaaactttaattggcacagagctgacctaaacaaataaataaataaacgcaacccggcgacttaaagactccacgacatcgggccgcagtgcaaagccagcgatggatcccaccatttcagtgtccaagggctgttttgtctacaaaaatggcgctacgagagcagggaaaaaggcggccagcaaacggaagcgtcctgccgcagaatccagtagtcttcttggcaaagaggtagtgcagcagcccttctatgaggaatatcgcaaggcctggaatcagataaacgatcacattgccgacctgcagcaccgcagctatgcccgcactctggagcaactggtggactttgtggtggggcaggcagagcgcgacaccccggacgaggtgctgcccaccgccgccttgctaacgggcattaatcagccggatcatctcagccagttcacggcacttacccagcgactccatgcccaacgtgctgcaatggtatgtgtgctgcagtccagggattgcgccactctcaaggcggccgttgagacattggttttcgggctcgtagaagataatgcagaagtggagcaaatggaagacgaggacgaggacgaggatggtgccgaacgggatcgcaagcggctacgtcgctcgcagtgcaccatgaagcagttgaagtcttggtacacgaacaattttgactcggaacagaagcgccgccagctggtcgtcatccttcccgactttgagtgctttaacgcaagcgtgctgcaggatcttattctaattttgagcgctcactgcggctcgcttccattcgtcctggtcctgggagtggccacggccatgacagctgtccatgggacactaccataccacgtcagcagcaagattcgtctaagggtgttccagactcaagctgctcccacgggccttaatgaggtgctggataaagttctgctgtcgcccaagtacgctttccacctgtcgggaaagacattcaagttcctgacgcacatcttcctatactacgacttctccatccacggctttattcagggcttcaagtactgcctgatggaacacttctttggtgggaatgcctttgctctttgcacagactacagcaaagcattgggacgcataaagcagctgacccacgaggatatggaaaccatcagaaggctcccatcgtttcgtccgtacgtcgagcagatcaatgattgcaaacgcatcatagccgtgctcacggacgatgactacctaaagaagaaactgccgcagttgctgcgcgactgcctgctccacttcctgcttttccgctgctctctggagttccttacagagctggttggtgatttgccgcgctgtccgctgggaaagctacgccgggaactgtacgtcaactgtcttaatcgtgcgatcatttcgacgccggagtacaaggagtgcctgcagatgctaagctttctgtccaaggacgaatttgttgctaaagtgaatcgagccctggaaagaaccgaacagttcctggttgaagaaattgctccgctggaattgggcgaggcctgcactgctgtgctgagacctaagttagaagctatacgccttgcagtggacgaagtggtcaaggccaccatggcgacaattacaacgacatcgcccaatgaaacccgccaggcgactgaccatttgactccggtggcctcgcgtcaagaattgaaagatcagctcctacagcgtagcaaggaggacaagatgcggcatcagctgaacacgcccaccacccaattcggacgagctctacaaaagactctgcagcttatcgaaacgcagattgtacaggatcatctccgtgcgctgcaggatgcaccacctattcacgaactttttgtgttcagcgacattgctaccgtgcggcgaaacataattggtgctccgcgggctgcactgcacactgccctgaataatccacatttttacatgcagtgcaagtgctgcgagctacaagatcaatcactgctggttggcacactgcccgatctctccgtggtttacaagctgcacctggagtgcggtcgcatgatcaaccttttcgactggctgcaggcctttcgatctgttgtgagcgacagcgaccacgaggaagtggcccaggaacaaatcgatccccagatccaggcccgattcacgcgtgccgtagccgagttgcagtttctggggtacattaagatgtcgaagcgcaagacggatcatgccactcgattaacctggtagctcgctcgggctatgaataaccaaaatcccttaggtatttttatcttttctatttatttatattggggcaaatttcatgtgtgggacgttatgaataaataaaacatcaatcgatttgtctactctgtacgaaatgcattaactttgtttgcgagtgaagcgcgttcttgtattttttaagtaaagcccagcagctggcaaggcaagcgtactaaatatcaattaccagtcttcccgactagcggttaccacgttccctgttcacattagtttcagagtctcgatggcggcagcgatgcgttcgatctctgcccgcgactcgcagagttttgtctcgttggcctcctgcacctcggcgggaaccttagttgcgtagtcggcggcctggatggcctgagttagcttgcccaccgtctgcaccagctggtcgctcttcttctgcagcttggctatctccttgtccgcctccacgagtcccttgagcagcaggtgcacctcgcactggcccgtcacggtgaggatcgcacagccctgcggtgcgggactgtcaaagaccacattggagcagt

SEQ ID NO: 7977 - protein, 721 aa, DROSOPHILA
MDPTISVSKGCFVYKNGATRAGKKAASKRKRPAAESSSLLGKEVVQQPFYEEYRKAWNQINDHIADLQHRSYARTLEQLVDFVVGQAERDTPDEVLPTAALLTGINQPDHLSQFTALTQRLHAQRAAMVCVLQSRDCATLKAAVETLVFGLVEDNAEVEQMEDEDEDEDGAERDRKRLRRSQCTMKQLKSWYTNNFDSEQKRRQLVVILPDFECFNASVLQDLILILSAHCGSLPFVLVLGVATAMTAVHGTLPYHVSSKIRLRVFQTQAAPTGLNEVLDKVLLSPKYAFHLSGKTFKFLTHIFLYYDFSIHGFIQGFKYCLMEHFFGGNAFALCTDYSKALGRIKQLTHEDMETIRRLPSFRPYVEQINDCKRIIAVLTDDDYLKKKLPQLLRDCLLHFLLFRCSLEFLTELVGDLPRCPLGKLRRELYVNCLNRAIISTPEYKECLQMLSFLSKDEFVAKVNRALERTEQFLVEEIAPLELGEACTAVLRPKLEAIRLAVDEVVKATMATITTTSPNETRQATDHLTPVASRQELKDQLLQRSKEDKMRHQLNTPTTQFGRALQKTLQLIETQIVQDHLRALQDAPPIHELFVFSDIATVRRNIIGAPRAALHTALNNPHFYMQCKCCELQDQSLLVGTLPDLSVVYKLHLECGRMINLFDWLQAFRSVVSDSDHEEVAQEQIDPQIQARFTRAVAELQFLGYIKMSKRKTDHATRLTW

SEQ ID NO: 7978 - DNA, 5813 bp, DROSOPHILA
taaactcagtgattaggctgtatagggctttggccaggtcagcaggatgcggatgcagattgaatccctccgcgttctcgctcatgtacgagtagatgtggggtatatccatggcgtcgcatatggacatcaggtggacggctgtatgccgcgacgagggtccaaacactccagcgatgccagtctggaaagtgatacaagaacgtactttgaaaatgtttatgagctaataaaatcaaaatatataaataaataaatagctaactataaaagacttctctagacaggttaatacccagtaaaagtcgaaattatttatatttcatggtgaaggatacttaatagtcgttctctatgattgcttataaaatcaataataaattgtgaaaatttaaacatttagtttatacttacctctagcatcctgcacagcttgccgtagctctggtaggcatcaccgtagttgacctcctccttgagcgacgtcaaggatgtgcccacctcctggttggcgacatcgatggcatggtcgaagactatgttcatctgctcggtgttctggtcggtgagcagacctgaaaccgagaaaagtctctctcatccacttttggccatttctcttttgccggtttgtttataaacaacaacttgacctaatcatcccattcagtcggaaaacccaaacaaacaaacaaatactaaaaccgtttttacgagctttcagcgttgatggaacgaacagcgtgttctctttatgagaaattaaaaataaatcgcgcgttgaaaacagtttgtttggaactgcacgaaaaaaaaagaaactcacgcgacacacttttttcaaatgagttattttggggcttcttctcgaaattacttacctatggggacactttccaaactttggtagttatcgtatccgccaaagttctcatactgagcccagttaactgaaatgtgaatgctaaaaaggctccacaaaattacaaaatggttgaaaaacattttatatggcttttatttaagacatatatatttatatatatatatatatttgttattcagtaaaataaattcttgagtttcccgaacagaacacttcgagtgaaaatcgaaaactgactgttgcttccaaaatgtcaatttggaaaacgttttgagtgaaattatggagagctttttcgaaactttggagagaatatctcatatttaatcctcaaccggcatattttcctcagaatcagttttcagggactctatggactgagatgaattccgactgcgagagtatatggactgggcgctctttagaggtctttcattttccgaaaagcggatgacgattcggaattcctcagccaaggcatcgcaaaagggtacctgaataaatcggataataataatgaataatgaataaataatattttttaagctcctactgcacctcatagttcttagctttcttgtagacaaagtagcaccaacatagaatggagataataatggaaatgatggatccgatgaccaagacaacgtagatgccactcagattgtctacgcccaactcagaagggccatcatcatcgctttttgcctgcaacaacagatttattatggggcttatcaaaagtccacatcccacaaatcacatacactgcaaacaccggctccaacttcgttccaccatttgttcttcaacctggccaggactccctgttcctgtagctccagcagggccttgttaaacttatcgcgatagggccaatctgtgggaggtagttagtacgccggatctgacggatcattgtttatgttacccacttttcaccatcgctatgccgtagcccttctcgtccaacggatcccccactttggtcagattgcactccctaaccgtgttaaattcaatcgaggtggactccatgaggaaggcgtacttggtacccgacttcaccttgtctacgccttgctgattgttttccattagcatctccggatgggcattcaaatactcgttcattttgatgtagataggttcctccgacgtctttgtatttagtaaacaatgtttaatctcggtctcaactttttcaccttgcttaccgaaaagaaatttcgtgtagatcctgtacgtttagctccatactgaacgtcgtccttgttgtcggccaaatctttaacgctgttgatgggacttgtgggattctcgatggtcaagaaggcagccaagttggcggtgtaggaagacaccatgatcaaagtgaaaaaccaccaaatagcagatattgtccgcgtgctgagagctctataaaaatatatattatgcttataaagttaaagttcaataatagtttctcgtacttgggtgcaatttcagaaccttgctgcagtaacgctcccgttgtgaaccaaagggagttattgatagtaaattggttttccagctcttcgggctcttcaatacatggatagggattatcccactcgatcggcgaaagtcgacctataataaagaagcagagcgatactcccagataggcaatgcccaagtagagccacacctccgaagaaaatgggtccatgaaggagaaaagagcgggtggagccttctgtggtttcacatacaaaatggctatgcctggtaatcgaatcatttagtcagaatcactctatcactctaatctgaaggccttacccaaattcatgaatggtatggaaaaatcgatgacttcctctcgctccgatgttatggtaagatctgtgatggccaagtcagctctctgtaattaaatttcattattaatccatagttttttgattctatttgatacttaccccttcgacgatttccttgagcattcctgacgtcgagttcgtggtcttattgaaggagccatagtcattgccaccgtcgcggaaggtaaagttaaagcccagcttgtcggccaactctttgattaaatctactccataaccctggaactgattgttgcctattagtgtgtcaatactctccaccagactggcgtacggtttggtctgtaatttaaatttcccacgttaaagtctttaacaagctgttcaaataattatagtataccgccacagatattagaacgatgaaggttttgttgaccagggaaccatcgtcaatgtcattgaagttgacagcttggggaggtcgctggaactcgaagtccttgccctcctcccaagtgcccaccttcaccaatccactggtttgcagttcgatgacgtcgaaggtgaaacccttgcgcacatttccctcgaagtatatgcgacctgtgatggttttctctttgatctccagctgttcgagttttctacgtttagtataattattaatgattgctgaggcttactaaccgatctcatgtagtttctgaaagtggaaccatcgggttgaacattgtcgtggcgctcagaacagttaagcatctgaggttggtagggaagatgctttgttgtctccgcaatgacacgtaccgcatcataggtaagagccatttccatggtgataaatgtagaacctcaaagagaatttcacagaaattaactaaaattatttatataatattgggttataataccactatttacgggttcactctcccccagttcttggtgcagcttttccatcagatctcgcacttcttcctgatcgggcgagaacattcgtatacctgtgatgttagcctcactgtacttgtactcctccaggtcgaaggtatgcaggttaaggtttcctatgatgtatgtgtagtcctcgttcatgattcccacctgttgggcttgacgcagtagctccgccacgcccgttgttgagcccacgaccacgatgcgactgtcctccgattttctaatgcgtctcagcaccgatttgtaattgccattcaggttaagatcgtagcgcatcactttgataacaggtcctttgatgccgtatcgggtcattaggtgatccaaaatttttaggtactcagctttagtacagaaccgatagttagttatgagtgaataggaattctttggaacaccaaccagattcatagcagaatataaagcgggaccactcgaattgatttacaatgtcgtagagcgcattggctatgtcctccggactgggatgcagattgaaaccatccggattggatccccacgagagatgcgggtatatgaagggtatgtccttcgagtcgcaggcattcaaaagatgggaggctgtgtgcctggcagctggcccaaatacggcgcccactccactctggaactcaacaaatgttaatcattccttttgtttccagcactgcaaacactttacctgcattagcctacataattgggcaaaggcctggacggagttgccgtaggccacctgctcggtttcgccgaccaaaggaacacccagttcattgtttaccaccgatatggcgtgctcgaaagtttgccggattctatcggtggcgtcgtcggtgatgaggcctatatatatatgaattttttttgagtcaaaacgaaaatcgggagaacaatctgcttaagctctttcatatgtttcactcacccaggcgaatggattgaccactagatgcttcgtatgcattacccccataaaactgtgcctgcactctgctcaggctgagaataatcagagatatccaacagaaatgcatcgccttcaattattgaagtttggtttgggagtttttcatttccgtcctctggtattcgagtatctaacaatgggtatatctaaatatatacgtatatttttggatcacccactagcgcgatgtctttgatgttccttagtcgccgagcgcacgtttccaactgaatggccactcataattgctttaaaaattccactcaaaagttttccaaaatattctttttgaacttgaaagcttccagtgttgaacaatcaccattaaattaaaagtcaccatttgttgataatataaatacatttaattagaattatcacaaacataaattgcatcataaactaaactattgcaagttacaagtataaatagttaagggctaagaaaaatatatagattgcaagttaatttttggcacataatctttgttgtgatgggggagccataaacccaaggcgaatcttcggcaatgaccagatgggtgttccgtccgttgtgatccctgtaatggaggggaaaatcttagcggagcgtattaatagctgtatatatagagtagtggtactccaaccccattggcattccaagtgacttccatcaattgtagtttgattggaaagacaatcggagaagttgttccccggcaagaaactgagccaactgctgggcataaatcaccattaattaagtgcatgcgccccaattgaagtgtgatgccgttgttggcacaacagttaggggcaaatgggtaacgagccacaaggaagctgcgccgccagacactaccactttctccgttaagtggcgcccaaagtggagcgcaattagagccccgacatggaggttccactaccacccgggtactcaccaaatgacatgccttcggtctttggtctaggaatgtgtggcatatgtcatgcttaatactcttaggctattgatttggttccctccgactaccaaacgctgcactttttctgagggttcatcggtgagccgaggggacaattgaactcccgcgcaaagtcaacggagttcgagagcgtcccaatcacccggaaacgacctggactgtggatggccgtgttcagcttgttccggatggcctccggtcgcatcgctccg

SEQ ID NO: 7979 - DNA, 3037 bp, DROSOPHILA
cgcgctagtgggtgatccaaaaatatacgtatatatttagatatacccattgttagatactcgaataccagaggacggaaatgaaaaactcccaaaccaaacttcaataattgaaggcgatgcatttctgttggatatctctgattattctcagcctgagcagagtgcaggcacagttttatgggggtaatgcatacgaagcatctagtggtcaatccattcgcctgggcctcatcaccgacgacgccaccgatagaatccggcaaactttcgagcacgccatatcggtggtaaacaatgaactgggtgttcctttggtcggcgaaaccgagcaggtggcctacggcaactccgtccaggcctttgcccaattatgtaggctaatgcagagtggagtgggcgccgtatttgggccagctgccaggcacacagcctcccatcttttgaatgcctgcgactcgaaggacatacccttcatatacccgcatctctcgtggggatccaatccggatggtttcaatctgcatcccagtccggaggacatagccaatgcgctctacgacattgtaaatcaattcgagtggtcccgctttatattctgctatgaatctgctgagtacctaaaaattttggatcacctaatgacccgatacggcatcaaaggacctgttatcaaagtgatgcgctacgatcttaacctgaatggcaattacaaatcggtgctgagacgcattagaaaatcggaggacagtcgcatcgtggtcgtgggctcaacaacgggcgtggcggagctactgcgtcaagcccaacaggtgggaatcatgaacgaggactacacatacatcataggaaaccttaacctgcataccttcgacctggaggagtacaagtacagtgaggctaacatcacaggtatacgaatgttctcgcccgatcaggaagaagtgcgagatctgatggaaaagctgcaccaagaactgggggagagtgaacccgtaaatagtggttctacatttatcaccatggaaatggctcttacctatgatgcggtacgtgtcattgcggagacaacaaagcatcttccctaccaacctcagatgcttaactgttctgagcgccacgacaatgttcaacccgatggttccactttcagaaactacatgagatcgctggagatcaaagagaaaaccatcacaggtcgcatatacttcgagggaaatgtgcgcaagggtttcaccttcgacgtcatcgaactgcaaaccagtggattggtgaaggtgggcacttgggaggagggcaaggacttcgagttccagcgacctccccaagctgtcaacttcaatgacattgacgatggttccctggtcaacaaaaccttcatcgttctaatatctgtggcgaccaaaccgtacgccagtctggtggagagtattgacacactaataggcaacaatcagttccagggttatggagtagatttaatcaaagagttggccgacaagctgggctttaactttaccttccgcgacggtggcaatgactatggctccttcaataagaccacgaactcgacgtcaggaatgctcaaggaaatcgtcgaagggagagctgacttggccatcacagatcttaccataacatcggagcgagaggaagtcatcgatttttccataccattcatgaatttgggcatagccattttgtatgtgaaaccacagaaggctccacccgctcttttctccttcatggacccattttcttcggaggtgtggctctacttgggcattgcctatctgggagtatcgctctgcttctttattataggtcgactttcgccgatcgagtgggataatccctatccatgtattgaagagcccgaagagctggaaaaccaatttactatcaataactccctttggttcacaacgggagcgttactgcagcaaggttctgaaattgcacccaaagctctcagcacgcggacaatatctgctatttggtggtttttcactttgatcatggtgtcttcctacaccgccaacttggctgccttcttgaccatcgagaatcccacaagtcccatcaacagcgttaaagatttggccgacaacaaggacgacgttcagtatggagctaaacgtacaggatctacacgaaatttcttttcgacgtcggaggaacctatctacatcaaaatgaacgagtatttgaatgcccatccggagatgctaatggaaaacaatcagcaaggcgtagacaaggtgaagtcgggtaccaagtacgccttcctcatggagtccacctcgattgaatttaacacggttagggagtgcaatctgaccaaagtgggggatccgttggacgagaagggctacggcatagcgatggtgaaaaattggccctatcgcgataagtttaacaaggccctgctggagctacaggaacagggagtcctggccaggttgaagaacaaatggtggaacgaagttggagccggtgtttgcagtgcaaaaagcgatgatgatggcccttctgagttgggcgtagacaatctgagtggcatctacgttgtcttggtcatcggatccatcatttccattattatctccattctatgttggtgctactttgtctacaagaaagctaagaactatgaggtacccttttgcgatgccttggctgaggaattccgaatcgtcatccgcttttcggaaaatgaaagacctctaaagagcgcccagtccatatactctcgcagtcggaattcatctcagtccatagagtccctgaaaactgattctgaggaaaatatgccggttgaggattaaatatgagatattctctccaaagtttcgaaaaagctctccataatttcactcaaaacgttttccaaattgacattttggaagcaacagtcagttttcgattttcactcgaagtgttctgttcgggaaactcaagaatttattttactgaataacaaatatatatatatatataaatatatatgtcttaaataaaagccatataaaatgtt

SEQ ID NO: 7980 - protein, 814 aa, DROSOPHILA
MQSGVGAVFGPAARHTASHLLNACDSKDIPFIYPHLSWGSNPDGFNLHPSPEDIANALYDIVNQFEWSRFIFCYESAEYLKILDHLMTRYGIKGPVIKVMRYDLNLNGNYKSVLRRIRKSEDSRIVVVGSTTGVAELLRQAQQVGIMNEDYTYIIGNLNLHTFDLEEYKYSEANITGIRMFSPDQEEVRDLMEKLHQELGESEPVNSGSTFITMEMALTYDAVRVIAETTKHLPYQPQMLNCSERHDNVQPDGSTFRNYMRSLEIKEKTITGRIYFEGNVRKGFTFDVIELQTSGLVKVGTWEEGKDFEFQRPPQAVNFNDIDDGSLVNKTFIVLISVATKPYASLVESIDTLIGNNQFQGYGVDLIKELADKLGFNFTFRDGGNDYGSFNKTTNSTSGMLKEIVEGRADLAITDLTITSEREEVIDFSIPFMNLGIAILYVKPQKAPPALFSFMDPFSSEVWLYLGIAYLGVSLCFFIIGRLSPIEWDNPYPCIEEPEELENQFTINNSLWFTTGALLQQGSEIAPKALSTRTISAIWWFFTLIMVSSYTANLAAFLTIENPTSPINSVKDLADNKDDVQYGAKRTGSTRNFFSTSEEPIYIKMNEYLNAHPEMLMENNQQGVDKVKSGTKYAFLMESTSIEFNTVRECNLTKVGDPLDEKGYGIAMVKNWPYRDKFNKALLELQEQGVLARLKNKWWNEVGAGVCSAKSDDDGPSELGVDNLSGIYVVLVIGSIISIIISILCWCYFVYKKAKNYEVPFCDALAEEFRIVIRFSENERPLKSAQSIYSRSRNSSQSIESLKTDSEENMPVED

SEQ ID NO: 7981 - DNA, 13632 bp, DROSOPHILA
aatagtgagcttatatcataaatatttttcgcatatgagtaactacaactgttttgccttccagctgctctgcctgattggtgaggccttcgatcactctgatcagatctgcggcgctgttataaacattcgcggcaagagcaacaagatatgtaagttttcacgcacacccaacttcagcggaattcctttgtttaacgattaatgctttccagccatctggactgccgacggaaacaacgaggaagctgcccttgagattggtcacaagctgcgcgatgccctgcgtctgggacgcaacaactcgctgcagtatcagttgcacaaggacacgatggtcaagcagggctccaacgtgaaatcgatctacactttgtaggcggctaataactggccgctccttattcggtccgatcccacactgattattttgtctttcatttatttatcgttataagcaacagtagcgattaatcgtgactattgtctaagacccgcgtaacgaaaccgaaacggaaccccctttgttatcaaaaatcggcataatataaaatctatccgctttttgtagtcactgtcaataatggattagacggaaaagtatattaataaaaacctacattaaaaccggatacttttgatctttgattttggagatattttaaaatagaaaaaagttaacctatattgtttttgggataattacttgttgtattactaaaacgagcttgtatcctaatatgggcacctaaagcaaaacttccaaatttggaattcaatttgttgctaaaaatacgttagcaatttctagggtggccaaaaaaaaatgtgtatcgatatatcgataggtttcctaaatagacattaaaataattttagctttttacttatattgttagagtaaatacgtttgtatttaaaaaataagtcagtattttttttttattaacctattattgaattttatatgagtgagagcttttccattcagccaagaacggtcacactgcatgtgacatgtttcaattgtgtaggcgcagtcacactggtcgcgtcgctcgtagatatcgtgtaaggatatgtctccgtgtttagctaaataaaatacataaaatatatgtgcaattctaacaagcatagccatttagcgtagagtagtggaacgaacagctcgtaccgggccagtaacaacaaattaacaagcaaacgcactaaagtttgtcgcggaataaagatataataatagaccagctaaccaacacaaacaaacacacacacggccagaagttcgttggcgttgaaagggaaaaatgaaacgaaatgaaaggagaataacagtgcaatagattcggtttacattgtgcaaaaaatcgaagtagcccctgccaacagggtcgctaaaaataaagaaggcgacagcctctgtttatcgttgggaataaacaaatatatggccagcggaggagaatcataacaaaggcgcaagactagccagcataaaagacaaaggagctctcctcccccgcgtccgccacccccctccctttttggggttgaaaaccccccacgcgttgcggtgcagcatcgccccgactatgcgataccctgcaatcgagtttatagtgctatagagagagagagagagagcgagttacgaacaaaatgccttgcgacaacgccaaaacctcttcggatatcgagcatgtggattggaattccggccagcactatgcgaatgtcaggtgagttttgaatgcccttgatatggccaaaaaaaaaggaatcctataagttattcaagtacaccaaagaacaaaaaaaaaagtaaaataaagaaaaacgagaaataaaataaaatcaagtgcaagcacgcaattgaaaaatcgtgggatggttgacattcttcttggcattgtccattgtttatttatagccaggaaacggacatgatttaaatgtttgattgttcgtcgtttgggaaatcacaataattaagttctcaacgcaggctgcaagtgctaaaaatcaatgtgtgttctttgcgccacaataaacaaatccagctgtccataccgacacgcagataagatataccttaatcgaaatgaaaacgaaaataacccaatttcaagcagcgattgattcattcccttaatttgttgctctgcaccaacatcaactgttgagatctcaatcgtcgtaatccccatctaacgcctgctaatgacaatcattaggcaatagttaacaacattgacttgtacttacttacttaccatactagttccatgccgatcggcaacttcgattgaaatgcaaatatggacactacgatgctgggaaggtgacaagatcttgacgcgaggcgccagctgttatctgtttatacaattataggtttataaattacgcgcgatttatttatattgcaatctgacgtgacagcggggcattgaccatacccaatactcttacgacttttaatgaagccaatgaggtctaaaatgaagataaatcataaatataattatatatcagtcattgaagacgttctccataactaaagcagtttaatggtactggcttttcgattcacttaattcgtattgtttggtattagtatttgtggctaccaacttttatttgcctcatagatgttgtatctttatctttagttattcatcaaattttcaatggaacgctcttaaataaacatatttactcaattgtatttgaatgttgagaaatgcggctcttgcgtagctataatttatatatgtatgctcgtattttgtgaaatacagaccgttcaacacccccgatgtcagtgtgatgagccttatcacctggccatcgcaaatctaatctgtcgccggagtgagtaaatgtgtctcactttgctgttatttcaggtgtcgttgttgaataaacattggctattgtatcggcttgggccatcacgatcaaatatttgtcgactatcgtgaaaatgtaaaatggagcgtagcgaaaaacaaaccattgataagaagcgaattttctcaagcttgcatttcgcatgggttttcccaaaacaatagcaatgtgtatacacacacaaacattcatacattgcatatgtatgcaaatgtatatttttggtggcgccagttgggggggtataacttttgcattaattgcctcgaacttaaaccagttgggttttggactttaaaataagttttacacgcagagagcgctaaaaaaaaaaaaaaaataatgcgcaaattatcaaaaagcattcgaacaaagcaaacgaacaggcagcgaaaacaaagcgcaaaacagttgaattggaccccgcctgactccgatttcccccttcccccctccaccacccatccatcccttggaatcatccggttccttgcgccatgcgaagattacttgtttcatctggtccggcggagctggtgagggcgtggcccgttccgttgtgttcgggcgtggaatttaataaaatgcgctaatttagtcgtaattacaagtgggcacgggtggtaatgaagcgctcaaaagacccaaatcttacgcaaataacacgaaatgcccccgtaatgtgaatttaccaaacgaccctcgcataattaggcgatttaagggtaatatgctatataaacttagttatcagatccagagaaatcaacaattatattcttactcattttcagtaagtgttgagccaaagtataattttgtaatattaatcttggctttcagtttgaaaacagttccgctttcatagtacatacattcatattcgactctctgttgataaacaaattttcccctcttttatcagctaattataaacaacattcataacgatagttgagccgtttatttctcaagaaaaaaaaacggcgataagaaacgaatataagttcaaattagattaacgaacgtaaatatttggttaccgaaaagtacacgattccggggaattcgcaaatttccatcggaagcactttcgcagtggcagcaacaaaaagtgccgttaaacaaacaaaaagcgcgatgatgcagcttgcacttgaaacccaaaacccgagggcgaaaaggtttttatttttagtttcgctgaaataaagcacctgcccgtcgctctctcattcacctggtaatgcgatagcgataccgttgtgtgtgttatatatatacatacttatacccttgtatatacccttttgatatcgcctaatcaaattgtggagggcaaaaaagcaaaacggaatgaaaatgtgccgatccgatcaataaaagtgtgagaaatcttaacgagagctagctgctcttttgcttttgtgatcgacaggaatttacatgttgcttatttatgcactcaaaagtgacatttccgttctaattgagttcaaaatttgttattttcaatgtcgaacaggcaatttgcgttaccaaaaagcccataaacgccaagtcatgaggctgtttcggttgagtggttccaagatgcaagaggtgtggaaatggccagccggcgactgtctgccgtctaatgaagtcgtaaaacttgcgacttacgcatgtccttaacttgccagagcagccgagaaaggataatggtcggccatcctttttttttttttttggatagacaaacatgtgtacttgcggccgtgtattttatgaaccgctctctgcggtgtagcccacaaacgtgccctgtgcttcatcgatccaaggccagtcgtcaattggccccaaaaaaaaaaaaaagaaaaaaagcaaaataagcggggcaagagcaaagaggacgtgtccagtgcctacatgtccatgaccatgccgacagccacaacaaatgtgctggcagagccttcgactgtccgcttatgtcctgtcccgttctgtcctgtcctttcctgtcctgcgcctcaatcacgcactgactgcctgaacttttttttttttttttttttttaatttttattatttattgaatcttccctttgtgttaagagactaacaataagtgttcaaatcttaatctaacttaattaactttcacttagtgatagtttttttttttcattaatgccctaataagtttattgctgggctgggaggtcgttgcggtgcagccggctttgactgcatactcggattagttttcttgcgaggggatttgtatgggtggtcagcttttcgttatacttcgtttttttctcagctattacttcgattactaatttgatttttaggtctctgtgtatgttttcgttccgaaggtaccacggcgctccagtgataattctcagaattcttgactgtgctcgctgaataatgtctatgttacttctggatgcgttgccccacagctcggagccataagtccagataggttttaagacggagttgtatagaagagctttgaactccagactaagtggagagcgagcatttatgagccaggggaggttccttgctttaagtttaagatgtttcgatttggcttctatatgtttgcgccaagtgagccgcctgtccagatgaactcccagatatgttacctcgtcggcttgtggaatgcatatgttattcaagaccagtggtgggcatgtttgtttgtttaagggaaaggtaacctgcttgcatttttgaacatttattgaaattctccagtcggcaagccatcgttctacagatgttaagtgtcgggataggagtgccgtggcttttattgggcatttcgagcgactgagtattcgcggtatcatcagcgaacgtggaggttgttagattgtagtctatggggaaatcccccgtatacagggtgtataagattggacccagtacactgccttgcggcactccagcttcgattgcgcaatcgcgtgaagtgcttgtatcgcatcttattgcaaacactctgttatataggtatgacttcagtagcttatgtgtgttttggggcaacagcttgattattttaaacaaaagtccatcgagccacacctctgtcaaatgcctgcgcgacgtctaagaaaaatggctgtgcagtattctcgatgttaaaagcagtaccgaatttctacgtagattcggttgcctgttcgatggttccatgtttttctctaaagccaaattgatgtgttggaagtgtgttgttattctaagatgagggctaatccgaggagtagcattttttcaaacagctttgaaagacatgttagtaagcttatcgggtctatatgatgatggctgcgttttatcttttcctggctttggaatcattactatgggtcgactttttccatttttgagggaagtatccaagcttggcgattgcgttgaacaacaggcagatgtgaagaaagcacactttgggagttcaatgagcattcttggagttattaggtcgtagccaggcgattttcttgggttcagttgctctttgataacctttgctagttacatggtcggaattcaaagggttcttgaggatctagattggctgctattaaaggagggagaataaatgtgttggtagagggatttggtcggaatacattttgtaaatgggcagcgaaagcacaggctctttcttcatcacttcgaagccaggtgccagagggacttcgtagtggcataattggcgctattggagtctttaggtttctggagctctccaaagagggtacttagtgctggtgggagagagttgctcgatatattgaacgttggctgtttttttcctcttgtttgagagcattggtaagcctgcgtgtggctatcttaagcatgtgctttgtaattggtgatctattagactgccaatcccttcgtaggcgtcgtttatctaataccagccgctcgatttcgcgattagttttgatgtagtttggttttgcatacgtcactggcggggttgaagcctttgcagcccgaaactaaaaatgttttcaagagtttccgttgacttgtctatatcctcctttgtagataatgcccgtcgttagttctatgtgtgaacagacaatacttttgataccttggccagtttgttctaaaatttgtgagtctatacggggggtcgaccaatgtgggggcgagttagcatatttagaaaaacaggtgagtgatctgatgataaatctgctagtgcttcggcggtgaccatgttgcgggggacatgtttagtaattgcaaaatcgatcaggtctgggatttttcttgggtctgctggccagtatgtaggcttacccggggatacatagtctagcttgttttctggcttcgtaagcgcattgtacaattgcttaccctttggcgacacaagtcgagatccccaatgggtgtgcttggcgttatagtcacccgctgcgatgaacctgtcacctagtgtgttaaagaattccatgaattgatcctcagagattggaaagcgcggtgggcagtagactgcggctagagtcgttgaaccattgttgagttgtaaggctatggacgtagattgtaagtagtttttgtcaaaattgtttaagtggtggtgttttatgcgatttctgatgagtattccagtgcctccatgagctttaccatctggatgatttgtaccatagaacaagtatcctggtatatgaaaattgtttttgtttgtgaggtgcgtttctgatagtagcattacgtcgatgtttttttcgtaaatgaactgtgtgagctctgcctgaactgaactctaaaaactacagatacagacggacgaacagggaagaaaagtacttgggatagtgcagattggcagggggcagcggcgaagggtgttttgatgatgggaagccatcccacactgtggcgaaataagtggaaattagtcattgggttgatgctcttttcaaacgaaaaatctgatacatttaaagttataaaattatcaggaaaaatgtgtgtttcatctgtgcttataattgcttaacagtaatacgaatcattttttgaaaatattttagaaatggcgatttcagataatgtacttcatcatcacaggaacataagagttcaacttctgtgtatacaatatataatatacaatatataatattgatatacatccggtgcaaagttgttactcttgatatacaaaagatatttcaattatgatattaaaatatccctatacatccttgtttttctccgtgcaactcatgtggttgaaagtaaaagttgttcgctccattcactcacagcgttagttagattagatactcctctccgaccgtccagatcccttttggaaactacacgcaggtgccgccgagtgggcgtttggcagccataatgatagggcggcccacggaactaattgccttggccataaaccagcaacagcaacagcaccagattgccgcagtccaaagggaaccacatcagaacttaattgatatgtgtgaacgtaaatgcatgtgtaccttttgcggggaaagcacaatgttcccactttatatttacttctatcaactttttaaaactggaaaaatgcagtgatagctttaattatcttggatctataaaggcaatgtctgtcagttaattaccacgaaatttaataaatcttaagcaaaatacaataatatatgcacaccatgagaacgtgagattaattgataccacatttaatgataacccctgccgtagtgattcattgaatatactcattttcacccacgtttcacatcccatcccattcatgctaaaaaaagtcaatgacttcttttcaatttcacttgcaacaaactgcatcggtgcctcactcatcacttatttaaattcacgcttaataatgaatggaaattgagggatgggatcatgcgatatgatttcataaatgcacacggaaagttttccatcaaaaaacagcaaaaatgtcgttaagataagtgccattctgacacatttatgcgattagcacacacttaatgacttacctaattcgattatatttttaattgatgttttgattatagcaggaatagttagaatgattgcattgctcataagagaacttataaatattcattggctgcgtttgccagtttagttacattcgatttctataagttatgatataatattttaattacacgccattatccgcttcgataagaattgattaatgatttagagcatgcatgactacttgctctgttaggtaattataaaaaatttggatgaacccattggataactcatacgatttattgcttctaatgttaatgataaacaaaactagactttgaagcaacaattatatttaaacgcacatgaaatagccttatacttcagttaaagtgatatgacctacattttgccatacagactaaaaaaagcaagacccgtatgatgccatattgctcatttcttagatcttcttctaatcctgctctaatcccttccagattcggttcgggcagcagccaggcatcgcagaacagcggcgacatctgccgcatctgccactgcgagagtgatccgcagaatccgctgctcacgccgtgctattgctccggcagtctgaagtacgtgcaccaagcgtgcttgcagcaatggctcaccgcctccgagacgaactcctgcgagttgtgcaagttccccttcatcatgcacaccaagatcaaacccttcaacgaggtgggttcatcacacatgtgacattttcttattgaatgccaactaatttatttcactttgtctttgcattgtttggcttcggaatcgattggattggattggattggattggactggacttggttgtgttggcaattacagtggcgcagccttgacatctccggcattgaaaggcggcggctgtgctactccgtgctgttccattgcgccgcagccctgtgcgtcatctggtccctgtgtgtgctcatcgagcgggccgccgacgatgtccagcgtggcctaataggtatacttaatacttggggttcggtcgtcaggtcgattaaccgctcggcacaatccgtaattatataattacctgacctgcccgaactcgtgctcataatgtgccgactgtttgttattctttacggattctaattacctattttctcgccatttcagactggcccttctggacaaagctggccgttgtcaccgtgggccttaccggcggaatagtttttatgtatatccagtgcaaggcatatcttcacctctgtcaccgttggaaagcacgcaacaggtcatgatcattagttgtggggattatgaatcatttagctgattcggattccaattattaactactgatatactacaccagaaataatatgtcaagctggcaagggtttaattagttaattagttccatataacaaagtcgaaatattttactacaactaaaaaaaggttccagtggtaattgtaattataaatatacttggattagatttcactgcaattatattcaaaggaatctttagcgcaatttgcaactttataatgtgaaaaaattcatacaaatggggagatgccaatctcgttatttaatttctatttgacggagaatcacacaaccgtattctaatcggaattttctattcagcattccattgtttgaggtcttgttagtagtagtctgccatttaattgtactcgtatgcgttttcggattaataagccagttttatttgcttatttgcttattaccctgtgctaaaggcattctcataaaaaaaaaattagatataaccctatttaaattaaggtttttccacaattgcgatttatctattctcacagtatgtgtaaatcaatcttgtctaaatcaataagagagtattgtgtaaacaatgcaatgcaaaggctatagtttatttaggcgaaagattcgattcaattggtttaagtaacttgaatattatttactagcttggctaaccaatgctagctgtttgtattattttacataaacatgttcactattttaatgcaaaaggcgtgattttacagtcatttgagagcttttctgaatacacaaacttcgggtcaataacaatgttactataaactcaattatgcgaaacaattcactttgtgctgatgatgtaacaattgtcttacagaattctactgattcagaatgctccagaaaagatacatccagtggcacctccatccccagtggccgcccatcatcagcacttcagtgagccactggctcatgccggatcgacgagcggagcagtggagatcaatgccagcggtgcagccggaggatactgtgcccacgaggcaaactgtgcatcaatggataatggtggcggcggtgccgaaatgggtctacatcagcaaatgcagcgcctactaaatgcctcgccacatcatatgcttcaaatggccgctgaactagaggtgccgcacagcagcagcagtgcctgcacgcagacggaggacggacatggccaccagcggcaccagcagatgcagcagagcggccagcaattgggccaagtggcggtggccgccaatatcgagtgctcgcagtcacagcacaattacgatcgcgactgggccctcgatgatgtggtctcgcagatctcatcattccgaccctgtcctcagggatcgggcagcatgacgcccttccacgactccatacacaacgtgctggagcattcggagggctctagtcgcggctctgctacggatctgtgcgccggatcacggcaggatctcagtgccagcggcatttccacggatacaggccgcgagcacgctctgcaattaagcagctttagtggtgaatgccttttattgctatataattatacatatcgctaatccatatttgcttgcaggtagtggcgagcacaaggcaccctcgatcagttccggagtatcgcatgcagtagccaacgggctaggcggatttgtttacaagccgcaccagacaaagcgctactccaactcgtccatctttctcgagaaccgcgatgtgctgagcgatcagaccagcgtgggtcccgatactgccgtacatccttacgattacagcacgccgccaaagatcgactaccgtcactctgggataatgggcgttgatttgcccattggttgctgcaccactgattgtttaggtggtcagccgacgaaggaggaactacgtcgctactcggatcccaagctgaaggccggcgaagcggataccgtgctggatatcgacctgcccacatcgccactatcaccacctgccgcctatgccagcagccagcagaagcagcggaattcccatcagcttgtgatctcctcatcctttgaccgcggagtgaatggggtcagcagcagcaagagcagcaggggctacggtccctcggacgcccaggtggatcgctcgcggctcagtttcaagtcgttgccaaatctcagcagcagctgtgaaagtctactccagaagtgaaatggagtatcctgcccaactgatctgatgtgatccactatgatctgcgcgctctttctccccccaataagctctgctctctcaagtattcaccgctggtcgacggagaccccgagatccacatagaaagtaaaatcgaaatactattttttataccgcacaccaaggggcttcaaaagccatatcgtggccagcggcccaacaatccctatgttctcctctttatatagcaaagcccataaacaatttgagactgcaatgattaacacaaaacacaaaaaaaaaagttaagttaagttatcttaacatttagaaccagtatattgatttagtggctaaatcgatgtataatttatcctctattcgtgtactgcttttattatccagcctctccgatcccataccatatacatatatgtatgtccactaagttgtccatgccaaaaagcccaaaaaccaaccagagacggtaattatttagtccatgtgtaggatgtgttttgtttcttaacttctaagtcaaatgaaattttaaaaaattgatctgtgattaagcgtcattgaatatacatacataacgtgcataaatgcaagcaaaaacatattgacagcagccgcagccgtagaaaatgcagaaaaatacataaaatacatttttacttaacatcaactaagataaaaccaacaacagcaacatgacaaccactaaaagctttttcgcggttaacagcgaaagctccacggagccgagaaaactgagatatatccgtatctcaacacccagctgagaaatatgaatgaaagccggtttagatatagatatagaattaacagtaaatacttatggatcgctacaagttacgagcataaaacaaccaatatgaaatcagaacgggcaactaaattttttattatgtattaaatatttaaataaatatgtgcaaacaattgattaaattatttaaatgtcgttcttatcttggattttctttcagtgtgcgcggaactggaaatatttgcatgacgtttgtcaaaatgtaattgaaaaacaaaaatcatttcccatttttttttatatcgatttctgaattgtgcaaaatcattacaaatcatcataacaatcgtcgacaaaggttaagcaattggctgaccatttaattttc

SEQ ID NO: 7982 - DNA, 2679 bp, DROSOPHILA
gtcacactgcatgtgacatgtttcaattgtgtaggcgcagtcacactggtcgcgtcgctcgtagatatcgtgtaaggatatgtctccgtgtttagctaaataaaatacataaaatatatgtgcaattctaacaagcatagccatttagcgtagagtagtggaacgaacagctcgtaccgggccagtaacaacaaattaacaagcaaacgcactaaagtttgtcgcggaataaagatataataatagaccagctaaccaacacaaacaaacacacacacggccagaagttcgttggcgttgaaagggaaaaatgaaacgaaatgaaaggagaataacagtgcaatagattcggtttacattgtgcaaaaaatcgaagtagcccctgccaacagggtcgctaaaaataaagaaggcgacagcctctgtttatcgttgggaataaacaaatatatggccagcggaggagaatcataacaaaggcgcaagactagccagcataaaagacaaaggagctctcctcccccgcgtccgccacccccctccctttttggggttgaaaaccccccacgcgttgcggtgcagcatcgccccgactatgcgataccctgcaatcgagtttatagtgctatagagagagagagagagagcgagttacgaacaaaatgccttgcgacaacgccaaaacctcttcggatatcgagcatgtggattggaattccggccagcactatgcgaatgtcagattcggttcgggcagcagccaggcatcgcagaacagcggcgacatctgccgcatctgccactgcgagagtgatccgcagaatccgctgctcacgccgtgctattgctccggcagtctgaagtacgtgcaccaagcgtgcttgcagcaatggctcaccgcctccgagacgaactcctgcgagttgtgcaagttccccttcatcatgcacaccaagatcaaacccttcaacgagtggcgcagccttgacatctccggcattgaaaggcggcggctgtgctactccgtgctgttccattgcgccgcagccctgtgcgtcatctggtccctgtgtgtgctcatcgagcgggccgccgacgatgtccagcgtggcctaatagactggcccttctggacaaagctggccgttgtcaccgtgggccttaccggcggaatagtttttatgtatatccagtgcaaggcatatcttcacctctgtcaccgttggaaagcacgcaacagaattctactgattcagaatgctccagaaaagatacatccagtggcacctccatccccagtggccgcccatcatcagcacttcagtgagccactggctcatgccggatcgacgagcggagcagtggagatcaatgccagcggtgcagccggaggatactgtgcccacgaggcaaactgtgcatcaatggataatggtggcggcggtgccgaaatgggtctacatcagcaaatgcagcgcctactaaatgcctcgccacatcatatgcttcaaatggccgctgaactagaggtgccgcacagcagcagcagtgcctgcacgcagacggaggacggacatggccaccagcggcaccagcagatgcagcagagcggccagcaattgggccaagtggcggtggccgccaatatcgagtgctcgcagtcacagcacaattacgatcgcgactgggccctcgatgatgtggtctcgcagatctcatcattccgaccctgtcctcagggatcgggcagcatgacgcccttccacgactccatacacaacgtgctggagcattcggagggctctagtcgcggctctgctacggatctgtgcgccggatcacggcaggatctcagtgccagcggcatttccacggatacaggccgcgagcacgctctgcaattaagcagctttagtggtagtggcgagcacaaggcaccctcgatcagttccggagtatcgcatgcagtagccaacgggctaggcggatttgtttacaagccgcaccagacaaagcgctactccaactcgtccatctttctcgagaaccgcgatgtgctgagcgatcagaccagcgtgggtcccgatactgccgtacatccttacgattacagcacgccgccaaagatcgactaccgtcactctgggataatgggcgttgatttgcccattggttgctgcaccactgattgtttaggtggtcagccgacgaaggaggaactacgtcgctactcggatcccaagctgaaggccggcgaagcggataccgtgctggatatcgacctgcccacatcgccactatcaccacctgccgcctatgccagcagccagcagaagcagcggaattcccatcagcttgtgatctcctcatcctttgaccgcggagtgaatggggtcagcagcagcaagagcagcaggggctacggtccctcggacgcccaggtggatcgctcgcggctcagtttcaagtcgttgccaaatctcagcagcagctgtgaaagtctactccagaagtgaaatggagtatcctgcccaactgatctgatgtgatccactatgatctgcgcgctctttctccccccaataagctctgctctctcaagtattcaccgctggtcgacggagaccccgagatccacatagaaagtaaaatcgaaatactattttttataccgcacac

SEQ ID NO: 7983 - protein, 617 aa, DROSOPHILA
MPCDNAKTSSDIEHVDWNSGQHYANVRFGSGSSQASQNSGDICRICHCESDPQNPLLTPCYCSGSLKYVHQACLQQWLTASETNSCELCKFPFIMHTKIKPFNEWRSLDISGIERRRLCYSVLFHCAAALCVIWSLCVLIERAADDVQRGLIDWPFWTKLAVVTVGLTGGIVFMYIQCKAYLHLCHRWKARNRILLIQNAPEKIHPVAPPSPVAAHHQHFSEPLAHAGSTSGAVEINASGAAGGYCAHEANCASMDNGGGGAEMGLHQQMQRLLNASPHHMLQMAAELEVPHSSSSACTQTEDGHGHQRHQQMQQSGQQLGQVAVAANIECSQSQHNYDRDWALDDVVSQISSFRPCPQGSGSMTPFHDSIHNVLEHSEGSSRGSATDLCAGSRQDLSASGISTDTGREHALQLSSFSGSGEHKAPSISSGVSHAVANGLGGFVYKPHQTKRYSNSSIFLENRDVLSDQTSVGPDTAVHPYDYSTPPKIDYRHSGIMGVDLPIGCCTTDCLGGQPTKEELRRYSDPKLKAGEADTVLDIDLPTSPLSPPAAYASSQQKQRNSHQLVISSSFDRGVNGVSSSKSSRGYGPSDAQVDRSRLSFKSLPNLSSSCESLLQK

SEQ ID NO: 7984 - DNA, 2882 bp, DROSOPHILA
tcaataaaatccgattgtccttctaattggatttactatgacttccttacggcactttgccgtaatttgccatttgttcgtgttgtggttttcctggctattggcactgtcagtttaaatctcttaaaagttattgttgctctgagtggcaggccgattgataggcatttgtaggatttttaatgccaaagcttattatgacagcaaactggggtaataatatcgagaatgcccaaatttcctgatgctgacatttgtgtaagcacggttttagataaatacgcatattgtcatcgattattgaggattagagagcaggcgaacaaagcgcgataatctctgactcaataacatattctaaagaaagctaggtaataagacaccacttggtttcctctcctccaggcaagttttttgcccgactcatgtttatttaattcctgactttgttgtttggctttaggctgtgtttgccaatgtttctgcacgtgctggcttttcagcggcagagtctaattaaaattcagtaaaagcctcagccacaaaatggcccaaaaagttggccctcagcgcacacagttcgccagagctgaatacatatgtaaacacatcatcaggtgcaaggtgggccatcttaatgagtctagtgacaacgcagcacgtgtcattgattagcacttcagttctggccagcataattcccatttaatatgcatgagtatgcatatactgcgcagtggtttcattaacagaattatacatccaatcgattcgttattccatcacatatcaacactaaaaagtatcaatcatttaactgtattagtttcagtagaaaaattccaatcgtttatttcagtagatctaaattgtaacataacactttttgcccacagtacacccaccgccttgttaatcaaatatattcatatttaatatacatgttcatagcacccagcaggttcccacaacgggggtggtggtatcaacgcgcagaaagatgagcaggccaaatcccacgccacgttcatcgacgggtctacgcaaaccgactggtcaaagatcaacacctccacccaggccaccacctcatgttcccgctcctgctccaccaccgcatgagcctgcgaaaccatatggagaatccccgggcctgctgagcccggtcgcatcgtcgggtcctttgcgccaacgctcttctgtgcacctgaggaagaaacacctcggttgggtctacttgatccacgcggttctatcggcaagtgcagtaattcagcttgtggtcctgcggctctgcaataaggacttcggggagctaattagcccatcggtgcccagcttcgtgtggctgctcctggccgtgggatgtgtgctgatcatggcctacgtgtacctggccaaccagtgtccgtgcaatggtctgctggccattgtcatcgtggaggtgatagtgatatttgtgaattgccaccggtgggctcgtctatcgatgctctggatgactggtgtcctgtcactcgtgctggccctgaacgtcatgctctacttgatgggcgtctatctgccgctgaaaatactgcccggtagcatcttcatgatcgtcctcacattctgttgcatagcgattgtcgtttcgatctacttgattgtgtatctaaacggcaatcgctatataatgcgatacgtctcgatggtcagtctgatctacgtggctagtctcatcctcttcaccatcaccgttatccaccagcgaagattcgagcatacggatcgcaccgaatatgtcctgcaggccaccgttctggccatgctgttcgtctatatgattcacccactctcaactatggtgcgatttgggcagtttttggtggaccatgtataatataaaattgttggaagtgtatcatcatctctaatatagtcttaagaaatgtaatattgcccaaattcctatatatacatatatattgtagcttattaggtggctttattattgttagttttaactggttaactaatagcagcaggcttatacagttccgtcatgcttttatagttccgtaattttttacaaatttattcttatttgctgacgtgtgcagttgttttgaccaacattggcaagcctttaggccgccgggttcagttcggaatccggttatcgaactctcatccagaaggatgtttgcatgtgtattcatgaagtgtgtatgggtgtagttgctcttagcgacaagatcctttttgtggccatttcgtgttttatctaagtccttctagccgattacacagacagccggacaaagggaaacggaaaggacccgcggcagaaatgaaaataaataatacccgggcccagccatatttttatgaatttttccatcttagccctttgcagtgcaaggatatttttggatttgccttcgtttgttcacttcaataattctgaaatcatccatatcctctcctagggccactcaaagttgtattttcagtttgggttcaacttatgttaattttataaattccatttccgttgaatcgcttttaactctttaaaaatagttttccaccagcagtggcagcagcagcaggataatggcctccagaggggctattttcacagacgagagttttagttgtttactgaaccacaagttggacattaaaatgcagtccaagggcaatgtttttttttgccggttgtggatgtaaaacagtgcgggcttctgtgagtccaaaacatgcatagtatttgtataaaaggtctcgaaattgttttgaaataaaatgctgtttgtctgcgactggtttttcattgccagtgtttaaatttaatgcataaagttagttaaatttaaaatgtggtttaagtgtataat

SEQ ID NO: 7985 - DNA, 882 bp, DROSOPHILA
atgagcaggccaaatcccacgccacgttcatcgacgggtctacgcaaaccgactggtcaaagatcaacacctccacccaggccaccacctcatgttcccgctcctgctccaccaccgcatgagcctgcgaaaccatatggagaatccccgggcctgctgagcccggtcgcatcgtcgggtcctttgcgccaacgctcttctgtgcacctgaggaagaaacacctcggttgggtctacttgatccacgcggttctatcggcaagtgcagtaattcagcttgtggtcctgcggctctgcaataaggacttcggggagctaattagcccatcggtgcccagcttcgtgtggctgctcctggccgtgggatgtgtgctgatcatggcctacgtgtacctggccaaccagtgtccgtgcaatggtctgctggccattgtcatcgtggaggtgatagtgatatttgtgaattgccaccggtgggctcgtctatcgatgctctggatgactggtgtcctgtcactcgtgctggccctgaacgtcatgctctacttgatgggcgtctatctgccgctgaaaatactgcccggtagcatcttcatgatcgtcctcacattctgttgcatagcgattgtcgtttcgatctacttgattgtgtatctaaacggcaatcgctatataatgcgatacgtctcgatggtcagtctgatctacgtggctagtctcatcctcttcaccatcaccgttatccaccagcgaagattcgagcatacggatcgcaccgaatatgtcctgcaggccaccgttctggccatgctgttcgtctatatgattcacccactctcaactatggtgcgatttgggcagtttttggtggaccatgtataa

SEQ ID NO: 7986 - protein, 293 aa, DROSOPHILA
MSRPNPTPRSSTGLRKPTGQRSTPPPRPPPHVPAPAPPPHEPAKPYGESPGLLSPVASSGPLRQRSSVHLRKKHLGWVYLIHAVLSASAVIQLVVLRLCNKDFGELISPSVPSFVWLLLAVGCVLIMAYVYLANQCPCNGLLAIVIVEVIVIFVNCHRWARLSMLWMTGVLSLVLALNVMLYLMGVYLPLKILPGSIFMIVLTFCCIAIVVSIYLIVYLNGNRYIMRYVSMVSLIYVASLILFTITVIHQRRFEHTDRTEYVLQATVLAMLFVYMIHPLSTMVRFGQFLVDHV

SEQ ID NO: 7987 - DNA, 5974 bp, DROSOPHILA
ataattttcgattagcttctatatgccgcgccacgattttttattctgttatatttttactttgtgccaacagaaatttatcaccaccgcgcgagagagcgagaacacacacgcacacacacagccagagtgcgctctctttcgctctgccgccgaggtgcataggcgagaacgaccgacagacgcgactagcggtcggaccgaccgaccgaacgaccgtcgctatcgccgtccccctctcgctcgtaggtttgtatcggggagttgttgcttacacgcactcgcacacatacttttgcacactggcgcctcgtcactgttgttgcattgctgtcgtccactcctgcgcttcttcttctcttgttcgactcgcttctcttcggattttactttgctgccgagcaataacaacacaacactaccgttctcaaagttcgaatgatttgatgccgttctgtgtttttttggtgtggccgagaagcgccaaatcagtggggccgtatcgcggcgattcggaaaagccgagcgaaggggtcacgataaatggatttgtggttgaattaactgagtttgtaataattgatgtcaaatatttacttaccttgttaggggatttatatgtatgctgcacatttaatcttgaatgccattagttcattagtttggtataatccataacattcacttaaaatgttatatcgttaatctttgatccaaataaacagaatcacaactacagtattccctccaatgctaataagtttataagtttcagttactattatccataaggtaccataaacacgattgcagcactttgggtggtgattagtactactattacgtttaaaataaactacgcagggtttgacatgcaagttgtaaacatttgactcggagttcaagataacgctataaaattacttaatcagggtccactgtactctatcgatagcgataactgaccacctacacagacatttattgttatcgaccaacgaacacatgttcactccgatttggcgcgtaaacaagtaaataaatagtattattaagaataatgccggagagcctgatcgccggcattccggtgcactttccgttcgagccgtacccggttcaacgggcgtacatggagaaggtgatccattgtctccgcgatggcacgaatggagtcctggaatcgccaaccggcacgggcaagaccctaagcttgctgtgctcatccttggcctggatccgcaccaggcaatcggagcaccaaaagcagatggttaagatggagaaggcagatttttcgggtcttggaggcggagcacctgggggagacctgtccgagctggccaagaccatgggtcgtgcgaataactggggcgtgcccaaggtcatctacgcctcgcgcacccactcccaattgacgcaggcgatgcgggaactcaagaggacagcgtacgctaacatgagatccgtggttctgggctcccgcgatcagctatgcattcatccggaggtcatgcgggagcagggcaactccaacaagaccaacatgtgcaagctacgggtgcactccaagacctgttcatttcaaatgcgcgttgagtcgcgaaaggatcatcccgatttgcgcggacccaccatcatggacattgaggacctggtcaaggtgggccagcgactcaagatctgtccctacttcgcgtctcgggagttggttccccaggcggatatcaccttcatgccctacaattatctactcgatcccaaggctcgcaaggccaacaaaatcgaactgggcaacactattgtgatcctggatgaggcccacaacatcgagaagatctgcgaggagtccgcttcggtgcagattaagtcctctgatgtggccatggccatcgaggacgtcacgcatatcatgcaagtctttgcgagcggcgagtcgcaggatatggctggagatgagccaaaggacttcacactggacgaccttacactgctcaaggagatgctgctcgagctcgaaaaggccatcgatgccatcgttgtggacaacgccgtcgatggaactacctttcccgcctccatgatgtacgaactgcttggcaaggcgaatgtaagatgcactaaatcttatcggaaatgtttttaaaagaatgcctatttaaaaatgtaacttcctttattgtagttcacctacggcaacgttgcaacgatagtatccctgctggacaaactggtgcaatacctcctagtggcctcccagcagatgagcatccgcaagggcggcaccttcacgttgcttagcgatctactgaccattgtgtttgccaacaaggaggatgtgatgagcaaggtgtacgcaagcttcaaagtgcatgtcctggtggaggagtccaagcagggacacggtaagcagcagggtgctaaacagcagggcggttggcttggcaagggaacgattgcagcagcgactggcttaagcaaggtcgcaaaaatcattaacttctggtgcttcaatcctggcttcggaatggagcaactgctcaacacccaagtgcgcagcgtaatcctgaccagcggcacactagctcccctcaagccgctaatcgccgagcttgccattccggtggcccagcatctggagaatccgcacatcgtcgaccagtcgcaggtttatgtcaagatcatcggcaccggacccgatcggcagcaactgatatcgaactatgcgaaccggtaagcatttttcacaccacaagcttatttgtttatggccaataccatgagtaaataaacaagttgggccaaacataactcagttctgtggcaggtgaactatctcataacattacgaaatgccaacgtatcaatttcttaatgttatacaaactaaacaaacatgttttatctgccacctttgttcttctgcagtgataatccaaagtacatcagctccctgggacagacgattctgaatgtagcgcgtatagtgcccgacggcctccttgtctttttcccatcgtatcccatgttgaacaagtgcgtggacgcgtggcaggccagtggtttgtgggcggacatatcgtgcaagaaaccgatttttctggagccgcgcagcaaggaccagttcaccagcacgatggaagagttctaccaggcgatacgcgactccaagggtgccgtattcatggctgtttgtcgcggcaaagtctccgaaggtctggactttgctgatcgcaatggccgcgcggtgattattactggtctgccattcccaccgctaaaggatcccaaggtgatactgaaacgtcgctacctggaggcgaatcggactcgtgagaatcagctgttaagtgggcaggaatggtacaatctagatgccacgagggcagtcaatcaagccatcggtcgtgtgattcggcatcgcaacgattatggtgccattctgctttgcgactcgcgatttaaggacgcctcacaggtccagcagctatccaaatggattcggggtcacctgggcgaccggccacagtgctcaccctttggtcctatcgtccgggaactgcgtcagttctttaagaacgccgaagcgaatgtaagctcatgatgtttatgcgtttttcagcaattgtaatacaattctttcaaaacttcagatgaaactaccggatgaaagggaaaccgattcgcctttggaaaccgtctgcaagacagaggatgaaccactagccgccattccaaaagtgaaacgggagcctggctccaatgccaccttcaaatcagccaatgaatccgcaatgtacgtaacctgcgatctaagatcaaccttatcagctgtatagattgtattacaattattaatagcaaatccttaatcggatttaagtagtcttgagtacaatttttgagatttgtcatagctaaagtgaaatgctgtaagccatttccagtggccttttgtcatcactgccagggtaaataaactttcgtttgcctttctcctggtattgacactttgaaatatttattatttttctttgtagcaaagtggagatggccaattccatcaagacatggacacccgccgattatgcgagtgccgctggacataaattgggtggtgcggcgccgaatgccatggactttatgagtcgactggactcaaatgtctcggtaaacacgagattcccatgaatctattattacactgtgtttatttagttctttaggacttgttcttgttttgcccctttcccagagtatcgatttcaactgctgcacagatagtaaaagtggctcctctggtctggtgaagattcacaagcgggagcgaagctcaccaacggcgccggaatcctccagccaggtgaccaaaaagcgatacaagttggtggagaacatcaaggtggagccaagtagttcgcaggctaaggaggcacccgaggaaagggccgcgtttctccgggaggtgagataccttcgagacttcttccatactactactactactactaattaatttaccttgaattgcagctacgcagcctggtcacccaagatcaattccgccgctttggcaaggcgctgctggagtacaagaatggcacctatgagagctttcaggccctgatggccatactcctggatgtcctgtccgcacccaaagtgcgctacatgctcgtcgggatgcggaagtatctaaagaacgagcacaaggacgagtttgatcgtagggtgggcaatctttaacaaagggttaggtgactatgtaaaagagttttcaagtttagtcgtcccaaggatatgttattttttttttttcaaatttattgacattggctgtaattttctgattgtatttagtggggcgcgtctaattctcctaagaatatatattattaacaatgctatgcattgttgtacatgcattttgaatttctctgtacggatgtttattactattaaaaattatacgttaatcatgatattgtttatagctttgtgggaaaatgtggggtcatattaaatgcaaatgcagttactcaaaaccgtttgcattatgtgcattatgttttcccaatctgtttatttatttaccgctcaaggttgacttaaatcaacagtctacctttattggaaatttaataccacttttatgtgcatcaaacttcgatttcgtttgctgataagctgatgagctttaataagctttcaatcaaatcaaaggcgaatagaacagggtgctcgaaaactcttcaaatcttacatatcgtatttaaatatgaactcaatttgtataataatatatatatatgtacaatatatgtttattttatatatttttaagcatgataaatagataagatatcataggaaattgactaatgctaagacttttaagttcttgtcttaaaaacataaaattacttttttgtagactgcttacatatatgtttttcacatttattttttaatctaccgcttggggggcatacattttagagttggcagcccgcttggtaacaaatctgcgaaccgcagccagcgcagaacgcatccaataagttcattgccaaacgggccgagtccctatatgcacatccacacatgcccatcggctggcgcgaccgagtcaccgagaaaactgagcccgagtgcaacgagaatgcgggtccgagtggctccgacttcggacttgggaaggcactcgcgtggcaacaatcgtccagggcgcacggcaaacacgcagagctgccggaggagataggccgctgcttcttgggggccacattcgtaccccgatccaaatccagacccgctgatccatccgcctcataaatacacacataatttctgccgctttgattggggcacgcagtaagttgattgcaattgcaattgccatagcctttgacttgctgcacgttcgctcttcgctgctcgctatttgcaacaagtaataatgagggcgggcagg

SEQ ID NO: 7988 - DNA, 3246 bp, DROSOPHILA
aacacatgttcactccgatttggcgcgtaaacaagtaaataaatagtattattaagaataatgccggagagcctgatcgccggcattccggtgcactttccgttcgagccgtacccggttcaacgggcgtacatggagaaggtgatccattgtctccgcgatggcacgaatggagtcctggaatcgccaaccggcacgggcaagaccctaagcttgctgtgctcatccttggcctggatccgcaccaggcaatcggagcaccaaaagcagatggttaagatggagaaggcagatttttcgggtcttggaggcggagcacctgggggagacctgtccgagctggccaagaccatgggtcgtgcgaataactggggcgtgcccaaggtcatctacgcctcgcgcacccactcccaattgacgcaggcgatgcgggaactcaagaggacagcgtacgctaacatgagatccgtggttctgggctcccgcgatcagctatgcattcatccggaggtcatgcgggagcagggcaactccaacaagaccaacatgtgcaagctacgggtgcactccaagacctgttcatttcaaatgcgcgttgagtcgcgaaaggatcatcccgatttgcgcggacccaccatcatggacattgaggacctggtcaaggtgggccagcgactcaagatctgtccctacttcgcgtctcgggagttggttccccaggcggatatcaccttcatgccctacaattatctactcgatcccaaggctcgcaaggccaacaaaatcgaactgggcaacactattgtgatcctggatgaggcccacaacatcgagaagatctgcgaggagtccgcttcggtgcagattaagtcctctgatgtggccatggccatcgaggacgtcacgcatatcatgcaagtctttgcgagcggcgagtcgcaggatatggctggagatgagccaaaggacttcacactggacgaccttacactgctcaaggagatgctgctcgagctcgaaaaggccatcgatgccatcgttgtggacaacgccgtcgatggaactacctttcccgcctccatgatgtacgaactgcttggcaaggcgaatttcacctacggcaacgttgcaacgatagtatccctgctggacaaactggtgcaatacctcctagtggcctcccagcagatgagcatccgcaagggcggcaccttcacgttgcttagcgatctactgaccattgtgtttgccaacaaggaggatgtgatgagcaaggtgtacgcaagcttcaaagtgcatgtcctggtggaggagtccaagcagggacacggtaagcagcagggtgctaaacagcagggcggttggcttggcaagggaacgattgcagcagcgactggcttaagcaaggtcgcaaaaatcattaacttctggtgcttcaatcctggcttcggaatggagcaactgctcaacacccaagtgcgcagcgtaatcctgaccagcggcacactagctcccctcaagccgctaatcgccgagcttgccattccggtggcccagcatctggagaatccgcacatcgtcgaccagtcgcaggtttatgtcaagatcatcggcaccggacccgatcggcagcaactgatatcgaactatgcgaaccgtgataatccaaagtacatcagctccctgggacagacgattctgaatgtagcgcgtatagtgcccgacggcctccttgtctttttcccatcgtatcccatgttgaacaagtgcgtggacgcgtggcaggccagtggtttgtgggcggacatatcgtgcaagaaaccgatttttctggagccgcgcagcaaggaccagttcaccagcacgatggaagagttctaccaggcgatacgcgactccaagggtgccgtattcatggctgtttgtcgcggcaaagtctccgaaggtctggactttgctgatcgcaatggccgcgcggtgattattactggtctgccattcccaccgctaaaggatcccaaggtgatactgaaacgtcgctacctggaggcgaatcggactcgtgagaatcagctgttaagtgggcaggaatggtacaatctagatgccacgagggcagtcaatcaagccatcggtcgtgtgattcggcatcgcaacgattatggtgccattctgctttgcgactcgcgatttaaggacgcctcacaggtccagcagctatccaaatggattcggggtcacctgggcgaccggccacagtgctcaccctttggtcctatcgtccgggaactgcgtcagttctttaagaacgccgaagcgaatatgaaactaccggatgaaagggaaaccgattcgcctttggaaaccgtctgcaagacagaggatgaaccactagccgccattccaaaagtgaaacgggagcctggctccaatgccaccttcaaatcagccaatgaatccgcaatcaaagtggagatggccaattccatcaagacatggacacccgccgattatgcgagtgccgctggacataaattgggtggtgcggcgccgaatgccatggactttatgagtcgactggactcaaatgtctcgagtatcgatttcaactgctgcacagatagtaaaagtggctcctctggtctggtgaagattcacaagcgggagcgaagctcaccaacggcgccggaatcctccagccaggtgaccaaaaagcgatacaagttggtggagaacatcaaggtggagccaagtagttcgcaggctaaggaggcacccgaggaaagggccgcgtttctccgggagctacgcagcctggtcacccaagatcaattccgccgctttggcaaggcgctgctggagtacaagaatggcacctatgagagctttcaggccctgatggccatactcctggatgtcctgtccgcacccaaagtgcgctacatgctcgtcgggatgcggaagtatctaaagaacgagcacaaggacgagtttgatcgtagggtgggcaatctttaacaaagggttaggtgactatgtaaaagagttttcaagtttagtcgtcccaaggatatgttattttttttttttcaaatttattgacattggctgtaattttctgattgtatttagtggggcgcgtctaattctcctaagaatatatattattaacaatgctatgcattgttgtacatgcattttgaatttctctgtacggatgtttattactattaaaaattatacgtt

SEQ ID NO: 7989 - protein, 985 aa, DROSOPHILA
MPESLIAGIPVHFPFEPYPVQRAYMEKVIHCLRDGTNGVLESPTGTGKTLSLLCSSLAWIRTRQSEHQKQMVKMEKADFSGLGGGAPGGDLSELAKTMGRANNWGVPKVIYASRTHSQLTQAMRELKRTAYANMRSVVLGSRDQLCIHPEVMREQGNSNKTNMCKLRVHSKTCSFQMRVESRKDHPDLRGPTIMDIEDLVKVGQRLKICPYFASRELVPQADITFMPYNYLLDPKARKANKIELGNTIVILDEAHNIEKICEESASVQIKSSDVAMAIEDVTHIMQVFASGESQDMAGDEPKDFTLDDLTLLKEMLLELEKAIDAIVVDNAVDGTTFPASMMYELLGKANFTYGNVATIVSLLDKLVQYLLVASQQMSIRKGGTFTLLSDLLTIVFANKEDVMSKVYASFKVHVLVEESKQGHGKQQGAKQQGGWLGKGTIAAATGLSKVAKIINFWCFNPGFGMEQLLNTQVRSVILTSGTLAPLKPLIAELAIPVAQHLENPHIVDQSQVYVKIIGTGPDRQQLISNYANRDNPKYISSLGQTILNVARIVPDGLLVFFPSYPMLNKCVDAWQASGLWADISCKKPIFLEPRSKDQFTSTMEEFYQAIRDSKGAVFMAVCRGKVSEGLDFADRNGRAVIITGLPFPPLKDPKVILKRRYLEANRTRENQLLSGQEWYNLDATRAVNQAIGRVIRHRNDYGAILLCDSRFKDASQVQQLSKWIRGHLGDRPQCSPFGPIVRELRQFFKNAEANMKLPDERETDSPLETVCKTEDEPLAAIPKVKREPGSNATFKSANESAIKVEMANSIKTWTPADYASAAGHKLGGAAPNAMDFMSRLDSNVSSIDFNCCTDSKSGSSGLVKIHKRERSSPTAPESSSQVTKKRYKLVENIKVEPSSSQAKEAPEERAAFLRELRSLVTQDQFRRFGKALLEYKNGTYESFQALMAILLDVLSAPKVRYMLVGMRKYLKNEHKDEFDRRVGNL

SEQ ID NO: 7990 - DNA, 2886 bp, DROSOPHILA
agcagcgcaacctcatctgcgacaagtgcggcaagaagttcaccggacgcacatcgctctctgaccacgttcgttctgactgcggccgtctaccgctctacggctgcagcgtttgcggcaaacatttgtccaccgctgggtaataactatttgtgtttgaatgtttattctaagactgttagtaacgcatcttcctttccgcagtattctcaagacgcacatgctccttcacaaggcagacactccgtaccagtgcgataagtgcggcaaaacattcaaggtgaaggcgcaatacaagtcgcacttgaagacgcgccacacggactacaagccgtacaagtgccacctgtgtcccaaggagtatccgtacagggagagtctgctcacccacatgaccgtgcacacgggcattaagcgtttcctgtgcaataactgcggcaagcgcttcacttgcatctccaacttgcaggcacatcgcaaggtgcatgccgatacctgcggccagttgcctttgaatgccaaggccacccagtacatgggcgtgcagcgcggaaaactcttgatgggcgctaagccggaggcgggcatggagtacgaggagaccaagaccttgatcgcccaggatgtcatcgacagggacatgcccatggcacaggagctcaacttcccatctgacggctcagcgccattggccacggtgcccctgaactacgcctccacacacctggtgccacacatcgtactgcagaccatgcaagccgaggcccggcgaatggagtaacttcggaacacattcatttagcgatcccactcaataaagattcttttgtaaacggatgcgtattctactgtacaacaaatgggatgacaactacataataatatctacttaatgactggattaattaaataacattgaacgtaaataagctacataaaattgatgtagatgaaggtttaacgccatacggacctgtcaaaaacatttaagaaaaataaatttccttataaaaacacgtttcggaatttattcgtaatagagaaaattaattatatgggatttgttaaaaaaatctttatatttatttactttttacttgtttatgtatttttatattgactaacagccttacaaactatatttcttaatgtctcgactcgctagttcagtctgaaatagggctgctggtatctgcctatgggcatccgatccttggtcctcagtcgtcgcactgcctctcgtatgaatttgggctgcagggcaccggattcaccttgggcctccatcacgtcgagggcttcctccacaacctcgccgacgaagaccttcgcaatgccggacatggctatcacaacattctgggacacggaacagccggtgatagtttgcattagacgcttgacggcggccttgggaaaggcagagcgacgatacatttcgtagcgatccagctgttcttccgtaaagttggaaacgagaaccctggagtggaataaaatagtttttataggattaccccttcgaatcgctttaagctaacttactgcattcgttcgcgctcctcctcctccagttccttcttcgtcttgagctttttgtgcgccggctcgccagagtcaccatctccgtccgtgttcttgttgtcgttgtccccatccgcatccttgccatcacgatccgcatcgtttcccggatccgaggtgtcgctgtccttccgctcgccggaggccgactggaagaatttcaggtcgacatcgtcgccgtcgcttagggagttgcttttttgctgcgtgggaaagaggatttcgtccatttaaatgaaatttgaaaagcaccagcgaataataaacaaaatcaaccagggatggagttgcaccatattcgctttttgcaacactcaaaagttccgcaccacataatagatgaatataattcaaaatatcggattaaatatattaaaggtatatcatagttgtttataaggtggctttgagattttaataaataataaatatataaatatacaatattcgataaacttttatttttgtagtgttttttttttcttcaaattagtgctcaaagtcaaattatgtaaatttcaaattgaacattcactggttccgatagtccacagcacgttttacagcactggcctctgacacctcgtgtttttgttcttttctccgcatcgccatcgccaggcaagagtgcgcgctacattttcgtttatttcatcgttcagccagcaaccaaggcactgcgaaatgtctgcaaccgagactctgaatgtggaggcggcaacgcccgagatcggcgaggaggtcaagaaacaaaagaagcccaagccgaacaacaagaagctccgccaaggtgagtgacctcatgcgagcagtgcactgtggtaattgcatttgcacgaccctctccgcctcaaccacccaccacccactgaactaaccacttgcccacagaagcggcagccaaaatagcctccggagaaggcggcgacgaggagctgaccacaaacggagatgccaaaccggcaacaccggccgctcagccggcaaagaagaaggggaacaagggcaagaaaagcggtcagactgatccgcccaccatacccattgctaagctttatccggacggcaacttccccgagggcgagatcgtggagcaccccacgcccaaggatatgcccgacgatcgtacggccaaggaccgattcacatcggaggagaagcgtgctctggaccgtatcaacacggacatctaccaggaattgcgccaggcggctgaggcccatcgtcagacgcgtcagtatatgcagcgctacattaagccgggcatgaccatgatccaaatctgcgaggagctggagaaca

SEQ ID NO: 7991 - DNA, 824 bp, DROSOPHILA
gcgaatatggtgcaactccatccctggttgattttgtttattattcgctggtgcttttcaaatttcatttaaatggacgaaatcctctttcccacgcagcaaaaaagcaactccctaagcgacggcgacgatgtcgacctgaaattcttccagtcggcctccggcgagcggaaggacagcgacacctcggatccgggaaacgatgcggatcgtgatggcaaggatgcggatggggacaacgacaacaagaacacggacggagatggtgactctggcgagccggcgcacaaaaagctcaagacgaagaaggaactggaggaggaggagcgcgaacgaatgcaggttctcgtttccaactttacggaagaacagctggatcgctacgaaatgtatcgtcgctctgcctttcccaaggccgccgtcaagcgtctaatgcaaactatcaccggctgttccgtgtcccagaatgttgtgatagccatgtccggcattgcgaaggtcttcgtcggcgaggttgtggaggaagccctcgacgtgatggaggcccaaggtgaatccggtgccctgcagcccaaattcatacgagaggcagtgcgacgactgaggaccaaggatcggatgcccataggcagataccagcagccctatttcagactgaactagcgagtcgagacattaagaaatatagtttgtaaggctgttagtcaatataaaaatacataaacaagtaaaaagtaaataaatataaagatttttttaacaaatcccatataattaattttctctattacgaataaattccgaaacgtgtttttataaggaaa

SEQ ID NO: 7992 - protein, 196 aa, DROSOPHILA
MDEILFPTQQKSNSLSDGDDVDLKFFQSASGERKDSDTSDPGNDADRDGKDADGDNDNKNTDGDGDSGEPAHKKLKTKKELEEEERERMQVLVSNFTEEQLDRYEMYRRSAFPKAAVKRLMQTITGCSVSQNVVIAMSGIAKVFVGEVVEEALDVMEAQGESGALQPKFIREAVRRLRTKDRMPIGRYQQPYFRLN

SEQ ID NO: 7993 - DNA, 4606 bp, DROSOPHILA
agattgttgtcaatgaccacttggcgggcaaactcaatgatgttggagcagtcgacggcaatcacctgagcagcaccggctttggcagcgaacatggagagaatgccggtaccgcaacccacgtccagtacggtctgcaaagaggagataccccggtgagaagggctacgaaaaatggggaaaccccggaagttaaccctaccttgccctgaaacagatgcttgttgtggtacatggcgttgcggtatgtgacggtgcgcacttcgtccttgagcatctcctcgtggatcccgaaatgggcataggagtcaaagtaatagtcgcgggacgtcatctcgtcggcgttggcattgggattatcaccggtggagccctccgcgggcagcttcttcgccacattgtttgagttcgcatttgaattgggcgtgatgccggtcgccgattccacagctgcctccatgggaatgtctgtgctggcctgcgaatcgggttcgtcagctactggcctgtcgattgccgtcacattttgaccaaaacttaccattttctaatttcttcggcgtctctttggtttttcacgtcgaaaaattggcgactaaatgatgggactgtttctacagcacgctagtttaaaaggtcgcttatcaacactgcccccgcacaaaagctggaaacaaatatcgccagctcgatattattggatttttctgaaattttagtatttttgagctgggaagaattggagtcagttgtctaaggcatgttccatataatcgagtaaaataatctttgtcataacatcaataagatataataaatacgttcatggtttattaactgctgcaatgcttgttgtattggtcctatttcactgctaacaaaaatacataaactgggaaacacgtttcatcgatagttgtaaataagatccgatagttttactggtaagtgctcatctctagctaccgcttgcccggtaattttggcggcaaaatattcgcacatcgcatttactaaaaaacgaaatataaagcgaagcagaagtagcgtctattacctcagttcttctttttaactttgtttaccctatcaaaatggaaggcttcgacgatgcgggtgtgttcttttcggacaatttcggcggagataaccagcaggatgcgcaaatcaacttgcaggcggtaaagaagaagtacaaggagttcatccggacatttaacgaggagaactttttctacaaataccggtaagtgaactgcatctcctcatctgaaccccatttaaggtaatccccctgcagtgacaccctgaagaggaactatcttaatggtcgctacttcttggagattgagatggaggatttggtgggcttcgatgagaccttggctgacaagctgaacaagcagccgacggagcatttggaaatcttcgaggaggctgcccgggaggtagccgacgagatcacagctccccggccggagcacgaggaacatatgcacgacatccagattcttctgagctccaatgcgaatcccaccaacatacgacagttgaagtcggactgcgtatccaagctggttaagatcgccggaatcattgtcgcagcctcaggaataagtgccaaggctacgcggatgtctatccaatgcctgtcctgcagcacggtcataccgaatctcaaagtgaatccaggtttggagggctacgccctacccaggaagtgcaacacggagcaggcgggcagacccaagtgcccgctggaccccttcttcatcatgccggacaagtgcaagtgcgtcgatttccagacccttaagttgcaagagctccccgactttgtgccacagggtgagattccccgccacttgcagctcttctgcgatcgctcgctctgtgaacgcgtggtgcccggcaatcgcgtgcttatccagggcatatactccattcgcaaggtgggcaaaccctcgcgtcgggatggtcgcgagaaagccgtcgttggagtccgtgctccttacatgagggtggtgggcatcaccgtcgactcagagggtgcgggtgccatctcccgatacagcaacatcacatccgatgaggaggagcacttccggcgaatggccgcctctggggacatctacgaacgtctctcacagtcactggcgcccagcatcttcggctctcgggatatcaagaaagctataacttgtatgctttttggcgggtctcgtaagcgtttaccggatggtctgtgccgtcgaggcgacattaacgtcttactgctgggagatcctggtactgccaagtcacagttgttaaagtttgtggagaaggtggcacccatagcagtctacacttcgggcaaaggctccagtgcggctggtctcacggcttcggttatgaaggatcctcaaacggtgagaaaaaacattgcacacctaatccttacaaattaaatgatacattaatctttagcgtaactttgtcatggagggtggagccatggtgctggccgatggaggcgtggtttgtattgatgagttcgacaaaatgcgagaggatgatcgtgtggccattcacgaggccatggaacagcagacaatatccattgccaaagccggcatcacgaccaccttgaactcacgctgttcggtcttggcagctgccaactccattttcggtcgatgggacgacaccaagggcgaggagaacattgactttatgcccacaattctctcccgtttcgacatgattttcattgtaaaggatattcacgatgagtcgcgggacattacgctggccaagcacatcatcaacgtgcatctgagctctaacaagtcagcgccttcagagccggctgagggtgagatatcgctgtcgacgttcaagaagtatattcactactgccgaactcattgcggtccgcgcctgagcgaagctgccggcgagaagctaaagagccgctacgtgcttatgcgcagtggagccggccagcaggagaaggcatctgacaagcggctaagcattcccatcactgtgcgtcagttggaggctgtcatccgcatttcggagtcgctggcaaagattcgtttgcaaccgttcgccacagatgagcacgtgaacgaagcacttcgacttttccaagtgtctacccttgatgctgcgatgactggcagcttggctggagccgaaggattcacgaccgaggaggaccaggaaacactcaaccgcatcgaaaagcaattgaaacgtcgctttgcaattggatctcaagtatcggagcagaatatcttacaggtaagcacagaagtcttatgaatcgaatgaacaatttttatttataatgcttgcttttcataggactttttgcgtcagaaatacgaagaacgcacggtaatgaaggtaattcataccatgatccgacgtggagagctgcagcaccggatgcaacggaagatgctctatcgaatttgctaaacactgttaatcacttcatttcttgtccatcgttgaatatgtcttcaatcatttcgtcacattatttgtatttccatttatagtattaagataaactacattctttcccaataaaccaaattgaatcattattttatttattcaaattctgttaaatatttgaacaataattcagtgatgtatttaatagctagaagtttacagaatagatactctgatacttgtagtgggaaatcctaggtatttcaagtgcataagtcagtcgagccggcagactatatgtttggtaaatatttatgattgtttacatttaaaaaatgagattataagcaatgtctaaattctgtttgttgataatgcttggtcgaaacacatagaccctttggtcggcctccaaattttcgcgcaaaccgacaatttcgctctacattcgactgtgtttgcctacgtcattcggacaaatcacaaaaaccaatcatattgccttggccacttgccaatttcttaaaaatattttttcctctgtttgagaacgtttattacttccttttatacaaaactcaattagtatatttgcgcatgcacatctatgtacttacatacatttgaaaactgaaatgtactcaaaatgtgcacgaattttcaaaaatacgtaagcgtgttacgtatgctcgcttttggccatttaaaaacaatggcaaatgtatatatatgtatatgtatatgtaggcattccaaatttatgaatttccggaaggaaatctttacaatcttgtttatcacggaacatttgcggaatgactgtattatttaaaaagtcctaacaataatatttatttctcgtacatttttcccaactgacgccactttgctgcgttttaaggtccgaatgacgtcaagttggtctaaaatttattgagggcgaattagaaacatgtttctctagacgttttagaaaaattccagaagatcatgggcccaatatcaataaaaaaaagaacacccaggctatgaaaatagatataatttatttgtgacgataatttccatttaagtcagctacacatttaaacacatagtacatgtatgtatgatgttttctcaatttaataacatagtggtactttgaactttg

SEQ ID NO: 7994 - DNA, 2431 bp, DROSOPHILA
cacatcgcatttactaaaaaacgaaatataaagcgaagcagaagtagcgtctattacctcagttcttctttttaactttgtttaccctatcaaaatggaaggcttcgacgatgcgggtgtgttcttttcggacaatttcggcggagataaccagcaggatgcgcaaatcaacttgcaggcggtaaagaagaagtacaaggagttcatccggacatttaacgaggagaactttttctacaaataccgtgacaccctgaagaggaactatcttaatggtcgctacttcttggagattgagatggaggatttggtgggcttcgatgagaccttggctgacaagctgaacaagcagccgacggagcatttggaaatcttcgaggaggctgcccgggaggtagccgacgagatcacagctccccggccggagcacgaggaacatatgcacgacatccagattcttctgagctccaatgcgaatcccaccaacatacgacagttgaagtcggactgcgtatccaagctggttaagatcgccggaatcattgtcgcagcctcaggaataagtgccaaggctacgcggatgtctatccaatgcctgtcctgcagcacggtcataccgaatctcaaagtgaatccaggtttggagggctacgccctacccaggaagtgcaacacggagcaggcgggcagacccaagtgcccgctggaccccttcttcatcatgccggacaagtgcaagtgcgtcgatttccagacccttaagttgcaagagctccccgactttgtgccacagggtgagattccccgccacttgcagctcttctgcgatcgctcgctctgtgaacgcgtggtgcccggcaatcgcgtgcttatccagggcatatactccattcgcaaggtgggcaaaccctcgcgtcgggatggtcgcgagaaagccgtcgttggagtccgtgctccttacatgagggtggtgggcatcaccgtcgactcagagggtgcgggtgccatctcccgatacagcaacatcacatccgatgaggaggagcacttccggcgaatggccgcctctggggacatctacgaacgtctctcacagtcactggcgcccagcatcttcggctctcgggatatcaagaaagctataacttgtatgctttttggcgggtctcgtaagcgtttaccggatggtctgtgccgtcgaggcgacattaacgtcttactgctgggagatcctggtactgccaagtcacagttgttaaagtttgtggagaaggtggcacccatagcagtctacacttcgggcaaaggctccagtgcggctggtctcacggcttcggttatgaaggatcctcaaacgcgtaactttgtcatggagggtggagccatggtgctggccgatggaggcgtggtttgtattgatgagttcgacaaaatgcgagaggatgatcgtgtggccattcacgaggccatggaacagcagacaatatccattgccaaagccggcatcacgaccaccttgaactcacgctgttcggtcttggcagctgccaactccattttcggtcgatgggacgacaccaagggcgaggagaacattgactttatgcccacaattctctcccgtttcgacatgattttcattgtaaaggatattcacgatgagtcgcgggacattacgctggccaagcacatcatcaacgtgcatctgagctctaacaagtcagcgccttcagagccggctgagggtgagatatcgctgtcgacgttcaagaagtatattcactactgccgaactcattgcggtccgcgcctgagcgaagctgccggcgagaagctaaagagccgctacgtgcttatgcgcagtggagccggccagcaggagaaggcatctgacaagcggctaagcattcccatcactgtgcgtcagttggaggctgtcatccgcatttcggagtcgctggcaaagattcgtttgcaaccgttcgccacagatgagcacgtgaacgaagcacttcgacttttccaagtgtctacccttgatgctgcgatgactggcagcttggctggagccgaaggattcacgaccgaggaggaccaggaaacactcaaccgcatcgaaaagcaattgaaacgtcgctttgcaattggatctcaagtatcggagcagaatatcttacaggactttttgcgtcagaaatacgaagaacgcacggtaatgaaggtaattcataccatgatccgacgtggagagctgcagcaccggatgcaacggaagatgctctatcgaatttgctaaacactgttaatcacttcatttcttgtccatcgttgaatatgtcttcaatcatttcgtcacattatttgtatttccatttatagtattaagataaactacattctttcccaataaaccaaattgaatcattatttt

SEQ ID NO: 7995 - protein, 733 aa, DROSOPHILA
MEGFDDAGVFFSDNFGGDNQQDAQINLQAVKKKYKEFIRTFNEENFFYKYRDTLKRNYLNGRYFLEIEMEDLVGFDETLADKLNKQPTEHLEIFEEAAREVADEITAPRPEHEEHMHDIQILLSSNANPTNIRQLKSDCVSKLVKIAGIIVAASGISAKATRMSIQCLSCSTVIPNLKVNPGLEGYALPRKCNTEQAGRPKCPLDPFFIMPDKCKCVDFQTLKLQELPDFVPQGEIPRHLQLFCDRSLCERVVPGNRVLIQGIYSIRKVGKPSRRDGREKAVVGVRAPYMRVVGITVDSEGAGAISRYSNITSDEEEHFRRMAASGDIYERLSQSLAPSIFGSRDIKKAITCMLFGGSRKRLPDGLCRRGDINVLLLGDPGTAKSQLLKFVEKVAPIAVYTSGKGSSAAGLTASVMKDPQTRNFVMEGGAMVLADGGVVCIDEFDKMREDDRVAIHEAMEQQTISIAKAGITTTLNSRCSVLAAANSIFGRWDDTKGEENIDFMPTILSRFDMIFIVKDIHDESRDITLAKHIINVHLSSNKSAPSEPAEGEISLSTFKKYIHYCRTHCGPRLSEAAGEKLKSRYVLMRSGAGQQEKASDKRLSIPITVRQLEAVIRISESLAKIRLQPFATDEHVNEALRLFQVSTLDAAMTGSLAGAEGFTTEEDQETLNRIEKQLKRRFAIGSQVSEQNILQDFLRQKYEERTVMKVIHTMIRRGELQHRMQRKMLYRIC

SEQ ID NO: 7996 - DNA, 2773 bp, DROSOPHILA
tagttcagtaagcacgtacatgttgttatttctggcttattttatatataaaatatttacaaatggttgaacatttaatatcaatcgcgtaatcgaaatcttgtgtcagtagttcaattattttctgcatgatggcgctctcaggaaatcagtgcaaacgtttgaactgcgtgcttcgggagtcacgaaactcggaaccattcggccacacttcatattagcacatcaatgcataatgactatcgataaaacatcgatgtatttttcatcgttttttcatgctgtctcatcgtaaacaatatcaacattgttaaacgcttttaaattctctcaaaaaatgaaccacacagcaaacaaacctcgacaaatcggattcgacaggcagttctcagcggacgtgaacggcgttcccacggagatagtgttccactgctttgccaagaagtggttcttagtcataacgcagctcggcaagattcccggcatctacaacgtgcacttcgatgtcaaaaaggacgaaagagtggttccctatttgcacggacccgtggacaatccggagttccacgtatcggtgccaatcacgatgaactgctgcttgggcttggacaccgacgagactcgcagcgccatacagtttctggtcaacagaaccggactccacaagtgcccgacggagttcgtggtgggcttgggtctcaagaaaatcgacggacccaatcttcgtgccctagctaaggtcctcgaggagacgttattctagtctgcgttcgttatatccaataaatattagctgtgacagtttttgtaaaaaaaaccttgaacattttaatcgtagccttcaacccggctgaccaaattattggccattctactgcaacctctttcatgtgcttaaaaacccaaaatagaatctactcacaaaaaggcagtggaatgaccaataacatagtaaaccataataattctgcaccgttgtgaaaggaatgagtctcgataattttttagcaaacgtcttctatatttcctcacatttgtacattaaaaacgtgtacgcaggtcgggaaacgggtacacgtccacctctcgaggattacagcacaaacacaacggatgtccggttgtcgagaagttctctagaggatttagtcgaacagaccgaagcccatgtcgtcgtcagactggtcggactcctcctccttcttcttctcctccttcttggactcggcggctggagcagcggcggcggcagcaggggcagcaccaccggcgggagcggcaccaactccggatccgatgttggtgatcaggtccttgacgttgatgccctccagggccttggcgaagagaccgggccagtagggctccacctcgacgttggcggccttcaggatggtgttgatcttctcaccctggtgaatccaaaaaataagatcagcacaagttgcagcagtgcgaaagaaaccataggacccgcaaattgtccaatacttccggccgatggccgcggctttggaggatttgcttcgtccccgattgcaatatcgaaaaacttacggtgacggcgacatcgtcatcgacgaggatgagggaggcgtagacgcaggcgagctcggctttggtggacatgtcgaagtgctgtggctaatcactgattgtgcaagttgccaaaaattaattgtttataacaaatggccttagctcgggacgagaacaagcacgctggtcaaaatcctaaaccggaaagagcagttgatatgcagtgtgaccgcgccgatgacgaagaaaaataccaaccgtctatgaaaatttgcatattattgtcaggaaatactaggtagaggaaaactcgttcaaactgccgagattatctcttatttaaactagtttatttttaagcatcttggacagaagccttagcataattctctggttatatgtttatctctctattttaataaaagacctttccgtacggttattgagaatattaaaaaaaagatattttggtataatgacgaatgagtcacactgcaactttatgtatacaattagtgtgcccatagcgtcgtttaaacgtaaacaaaaaaaaagcgcgcgaaaatgtcggaccaagaagacgtagttgtaaaaaaagaaaaaaaatgtatagaaaatattgatgagaacgacgaagagcccgatgatgtagattttaaggacagcggaaaaataagctccttgaaggccctgggtccatttatagccggcaaggagaatagccgcaacacggtttacctcagcgatgttccggatatttgcaaggataagccgtgcatgctgggcgtggacgaagcagggcgtggtcccgtcctgggacctatggtatatgggatctcctactgtccactggaaagtaacaaggctttagaggacctgggatgcgccgattccaaacaactaaccgaggggaaacgtgatatcatatttaacgatatcaacaccaaggaatatgcgaccagttgcgttggctgggccgtggagatcatatcgccgaacacgatcagcaccagcatgtaccggcggtcgaagtgctccctgaacgaagtttccatggactcggccatgggccttatccaacaggcgatcgatgcgggcgtcaatatagccgaggtttatgtggatacggtgggtccgccggagaagtaccaggagaagttgctcaaacgtttccccagctttaaaatcaccgtggcgaaaaaagctgactccacctatccaatagtctctgctg

SEQ ID NO: 7997 - DNA, 628 bp, DROSOPHILA
cgcggtcacactgcatatcaactgctctttccggtttaggattttgaccagcgtgcttgttctcgtcccgagctaaggccatttgttataaacaattaatttttggcaacttgcacaatcagtgattagccacagcacttcgacatgtccaccaaagccgagctcgcctgcgtctacgcctccctcatcctcgtcgatgacgatgtcgccgtcaccggtgagaagatcaacaccatcctgaaggccgccaacgtcgaggtggagccctactggcccggtctcttcgccaaggccctggagggcatcaacgtcaaggacctgatcaccaacatcggatccggagttggtgccgctcccgccggtggtgctgcccctgctgccgccgccgctgctccagccgccgagtccaagaaggaggagaagaagaaggaggaggagtccgaccagtctgacgacgacatgggcttcggtctgttcgactaaatcctctagagaacttctcgacaaccggacatccgttgtgtttgtgctgtaatcctcgagaggtggacgtgtacccgtttcccgacctgcgtacacgtttttaatgtacaaatgtgaggaaatatagaagacgtttgctaaaaaa

SEQ ID NO: 7998 - protein, 112 aa, DROSOPHILA
MSTKAELACVYASLILVDDDVAVTGEKINTILKAANVEVEPYWPGLFAKALEGINVKDLITNIGSGVGAAPAGGAAPAAAAAAPAAESKKEEKKKEEESDQSDDDMGFGLFD

SEQ ID NO: 7999 - DNA, 8429 bp, DROSOPHILA
tggctgggggaggcaggaaaaaagaaatcaaatatattaggcactgactgatgtgaatttatgcctagaaacgctctaattttaagccgcgcatttaccatgttcacagcccgctggccttctttattaccacaacactttggaaaaaagagcaggaaaaatctgtagagctggatacaaaaaaaaacagcatgcagaaggaaaaacacatactcacaattcattttgaaaatgaatttgttccgctgtaacggccataaatgcatttaaatttattggaaggcaaagtctgcgtatgccaccaccaaacaacaacaacaacagcaacaagaaaaccaggacaaaaaaaattgaaaaagaggactctcgcacattgaatgacaataaattatcaattttattttgacagcgcgaaaaatcccgcaacgaaaaacgaaagacgagcgcggaaaatgtcaaacgaaattgagcaaaatatatgtagatagctgtgtccgacatccaagtactatatactcatatatgtaatatatatgtaatatatgcagccgacaaaatttgtgacaggaagtttcagttcaatggtttgttccagcgggcgatttcaaattgcctggccatatatttaaaaaaaaaaaagaagtatgctaatttgcagattgatactcttcgtttcgaaaacaaattagggaaaggaccagaagtgcatttttcactatttcattgaaagaatatgaaggtttattcaatttattgtatcatcgaaggtgtcaaatcgattcgtttaatgtttcaatttgcaatccaatcaagcttttgtaagtgcaccataaaattgatatctttatggtttgcaataacaaacatactatttttatattctttgaattgaattagaccattttagaaactttttcctgtttttaaaacatgacaatttggtggcaccatgttttaaaatcccaaatattaaggacgtttcacttccttttaattgcagacatacgatcgccgatggaccagacagacgtggccttctattgccctggagagggtctgtttgcggacgactacgattgccggatttattaccgctgcgagcggcgttcggggcagtacatccaaccctatctgctggcctgtccggaggacgcggtcttttcccgcaccctgcgcatgtgtttgccaccagcgatgtctgggcgggatgagtgcgttgaccaggtgaacgaggtggatggcgacagcatggagaaatgggagcaggacgactacggacaggatgaccataatgcgatgcttaacctggccgtcacacctgcggccaatgagctgcgaacctatgcgtcgacccaccgtctgcccacaaattacggtctggctggtctcaacggtgtctctgtcatatccttctccagctcctcatccctgcgagctgttggatcagcggaggaggatggcataatatgccgggatgatggcttcatgaccgatcccagcgactgcaccgtgttttatcgctgcatctcgaacggccgaggctataacaaaatcggcttccggtgctcagatggcacggcgtgggacgagtcccttcagtcctgtaaccatatgtttgacgtacgtgccaacggaggatgccgcaatcaagctgttccacagaacgacggttattacgccggccaaacgtcaacacagtcctcgcagaccagttaccagaactcaaccacaagcagtcaacagagctcgtccaccagttcctccaactcctctcaaagttccagttcaacatccagttctacatccaactccagctcaagtcaggagtcctctacatccagcagcagtaatcagtcgagctccacgtctagcaaccatcaggagtccagctcggaatccagcaacaaccaggagtccaattcgggatctagcagtaatcaggaatctagcacgagttctagcagcaatcaaggctcaagctctcaaaatgctggcagcagcaaccaaaaccaaagctctggcagcaatcaaagttcgggaagtagccaatcttcaaacagtaaccagaactccagcaacaatcagaaccaaagctctcaaaattctggtagcaaccaaagctctagcagcagtcaaaactcgggcagcaaccaatcctctggcagcaaccaatcctctggcaacaatcaaagctccagcagcaatcagagctctggaagtaatcaatcctccaacaacaatcaatcctccagctcaaacagcaatcagacttcttcaagcagccaaaacaacagtggatctaataaacccgtgcccaccgagtgcgaggatgaaaatacttatattccggataaagaggactgtgctaagttctacagatgccgccaagataaagacggaaaattagagcaagtgcctttcacctgtggtcccggtaccgtttggaaccaagtggacaaggtctgcgatctgcccactgaggatcaaaagaagaagtgcaacattcaatcgggttcctcgagtggtagtaacaactctggacagcaatctagtggtagctcctcgaacaaccagggctcttccaacaatcaatcctcaagcaaccagagctcatctaacaatcaaggatcgtctaacaatcaaggatcgtctagcaatcaaggatcgtccagcaatcaaggatcgtctagcaatcaaggctcatctagcaatcaaggctcatcaagcaatcaatcttccagcaatcagagctcatccagcaatcaaggatcgtctagcaatcaaggatcttctagcaatcaaggctcatccagcaatcagagctcatccagcaatcaaggatcgtctagcaatcaaggctcatccagcaatcaaagctcatccagcaatcaaggatcgtctagcaatcaaggctcgtccagcaatcaaggctcatccagcaatcaaggatcttccagcaatcaaggctcatccagtaatcaaggatcctcaagcaatcagtcctccaatcaaggctcgacttcatcttctagcaaccaaagctcctcaagctcaaataataactccacgagcactcaaacaaagccatctaatcccgatggtgaatgccaagatacggaaacatatttggctgataagaaggactgtgcccgattctatcgatgcgtagagaatggtagcggtggcttcaataaagttcctttcgattgctcccctggaacggtttgggatccagatacgaagggatgtaaccatccaacagatgtgcaaaaggagcaatgcaaggctatggccaatggaagtggatcatcatccagccaaggctcctcttccaaccagggatcatcctcaagccagggatcttcttccaatcagggatcatcctccaaccagggctcttcttctaaccagggatcatcttcaaatcagggttcctcttctaaccagggatcatcttcaaatcagggttcctcttctaaccagggatcgtcctccaaccaaggatcgtcatctaaccagggatcatcttccagccagggttcttcatccaaccagggatcatcttccaatcagggttcctcttccaaccaaggatcatcttccaatcagggatcgtcatctaaccaaggatcatcatctagccagggatcttcctccaacgaaggatcatcttccaatcagggatcatcttcgagccaaggatcatcctctaaccagggttcatcttcgaaccaaggatcgtcctctaatcagggttcctcttctaaccagggatcatcatcgaatcaaggatcttcctcaaatcagggatcatcttcaaatcaaagttcttcgtctaaccaatcgtcctcgaatcaatcctcctccaatcaatcgtcatcatctaaccagacatcatcatccactacacaaaagcctttcaaacctgcagagaaatgtgaaagtgaggaaactttcttggctgacaacgaaaactgctcgaagttttatcgatgcgtggataatggtaagggtggttttacaaaagtatcattcacctgccctccaaacacgctatgggatcctgaggccaacagctgtaaccatcctgatcagatccagaccaagccgctcaaatgcaaaaaggtggttagccaaggcggaagctcctctaacagcaccagcaactcctcgagtagctcaaacaacagtggttcctcgtcgaacagtggatcatcttccagttcatcatcctccaacagtggctcctcctccaatacaggttcatcgtcaaacagtggcgcttcttccagcggtggctcatcgaatcaaggctcatcctccaatagtggctcctcttccggctcgaactcttctggaaatcaatcgacatcttcgtcaacatcgtcttcatcatcatcaagcaataataataatcaaggttcctcctcatcgtcctcctccagcagcagctcgacttcgtcaaaaccaaatccatctgaaacctgcaaagttaatggacaatttattggcgatcgatcggattgtgccaaattctatcgctgcgtcgataatgacagaggtggcttcaatatggtaccctttagctgcggtcctggcactgtttgggatgcccagatgcaggcctgtaatcatgcgtgggcagtaaaggaatgcggtggtattgctccacctacaacttctactccgacgacctccaggccaacaacggcaagcacttctagaccttctgaccaaacttcaacgtcgagacccacaggtccgcccactaccgcacgtccagtgactgccagaccaaccacttcttctccaacaacagcttcatcatcccaaaccacatctcctgttactcaggcacccaatacggatggcaaatgtcgatcggagggctttatggctgatcccaacaactgctccaaattctaccgctgtgtaaggaacaacaaaggcggcttcacctcaattccattccaatgtggagctggtaccgtatgggatcaggatctgcagacctgcaaccacaatttcaacaattgcagtacgggcactgaaagtaccactccaaaaccgccttgtgagccagcaacaaatggaacaacggccacgtctacgtcctcgaccaccacacctccacccaccaccactgatttaccacccacttcaacaacaggattgccgcctactacaacaaccgagttacctccaactacaaccacagacttacctcctacaacaactactaggttgcctcccactacaactactagcttgcctccgactacaacaactggactgccacccaccacgaccacaggagctcaacccactacaacaacattgagttcggaaactgaaacatcaacggtaaccacaagtccggaaagcaccacgcaaccaccgtctacaaccactatgaaacccctaccagctggaacggaatgcacaggagagggatacatggccgatcccgaagattgcaggaaatactaccgatgcatcaatgctggagcttcctacagaaagtacaactttacgtgtcccaagggcacgggatggaatgaagaagttcagacctgtgactacgtggagaatataccaaggtgctcgaagttacccgctgaaccaatcactacgacaccaagtgaagagtccaaggatcccggaagcaccactccgcagtcaacggatgagcccaccacagtgacaaaacccattacaaaacccaccgaagaaccttcaacagaaaaacctcaaaagccgaccactcaatatccggagaagccaaccaccacagaggaaccagaaaagccgcagaagccgactacaaccgagtatcctcagaagccaaccaccacggaggagcctacccctgagaagccccagaaacccactacaaccgaatatcctcagaagccgaccaccacggaggagcctactccagagaagccccagaaacccactacaaccgaatatcctcagaagccgaccactgaagaacccaccaccacaagtattccgggctacaatccaacaacaacgtctgttccgggctataatccaacaacaacgccgattccggtagaaactacaacctcaactcctggctataagccaactaccaccggcgaacctattaccacgaccacattaccttccacaaccacggatgcaattcaagagcctacaacctcaaaaaaacccgaacccacaacaaccacggaaagtcccgaatccagcacccctgaaggttcagtaaccactcttcagccggagccacagcctaactataactgctcatcggagggattcttcccagatcccgaggactgtagtcgctattaccgttgtgtggatgcagccaaaaacggcaaatatcaggtttatgccttcaagtgcggcaaaggaactgtttgggacacgtccaccgagacctgcaattacgccgatcaggtgtctggcaattgctcatcgggacagacgaccacgccgggaacgactacggaacctggtacgacggagagtacaaccagctctggaaaacctgaaaccacctcaaaggcccctgaaaacaccacaacatgggctcctgaaaccaccactacatcgtctcctgaaaccaccaccacagtagcctccgaaaccactactactacttctggcacaaccaccacagccactcctgaaaccactacaaaaccacccaagcctgaaaccactaccatagctggggaagaaacatcaacgtcaaaatcgcctaccactacggagagtcctgctcccagtaccaatacctctgctccttgtcccgaaaccggaccaggtcagaacgtgtacgtctgccccactggattccgccggcatccggagaagtgcggcatgttctaccagtgcagcgaaagtgccgataacaatgatcttaacatcgtggtattccaatgccccaacggaaccgtctaccaagacaagtcctgcagctgtggcaagccaccggcaggtgacaagtgctccaaggacatgaagaggaccaccaacgcgtttgaagaggaaacgaaacttcagaatgtggtaagtcgtataattgtaaagtctagtctacattccataatgaaataatacaatttaattattttaccatcaacaggttcaaatcagcacgacagatccgctctgcccggatgagggtcacttcgcgctcaacaacgaccagtgcggccagctgttcgtcaagtgcggattctcggagctgacgggtcgcatcgaaggccagatccaccgctgtccgcagggattcgcctactggaacgttagccgacgatgcgagcccgcccgcaagctgcccaactgcacgcccaccacctacaatgtgggcggaaacgtgccgctggagtggctcaacattggccatagacgccgcagcatgcgcatttaattagatttagtctagattcacttagtcgcccgccattgttcgtttgctgcgccagcacttgatggccagcttggcagctagctgattgcgatcgaggcaataagctggcgcagcaaacgatcgaaccgaagagttagcttaggacgtagggaaattacattaggttaagcacgggtgcagccctccgacatttatcttacaagtgggaacttaaaacaagttagcctataatacaaccatatatttctataatatatattgcttcgattgttggagggtaaactagattcttggtgtcggactgctagcgagactgcactttacgcatttgaaaaggaaacaaaaggttttgagtagtcttcctatagtggaaacaggcacagccttcactacacacacgtaaatgctgtagctttcatgcagtaattgtatttatgcttagagttaaaacatacgttctgaacgccatatacaatatatcttagactatgcttaaagattataataaattgaatcatatacagaaatcgtcgaagaatgatgcagtggtacttattttactttcggatgtatgcctccaggatgcagatgactggagcactaatgttttcattctttatgcgattgtagttttatgtattctaactactttcatttctgattgcgtttttgaaattcgttctctatttcacgatgatttcgacggaatactattccttttataagataaatacgtttcttggcttgttccctctgaaataatgagtaaactagaggtttgccttcggattttcggtaatctgctcgtttccggattttggaaggcttggaagtaattgaattttacgaaaacgtagacttttgcattctactatttttctatagttttatcatactttaaatattacttcaatgactgtaatagcttcctacttctttgaggatcagtggttgactccattcatgctcctgaaaaaccaatactgtatcgttctctcta

SEQ ID NO: 8000 - DNA, 6353 bp, DROSOPHILA
acatacgatcgccgatggaccagacagacgtggccttctattgccctggagagggtctgtttgcggacgactacgattgccggatttattaccgctgcgagcggcgttcggggcagtacatccaaccctatctgctggcctgtccggaggacgcggtcttttcccgcaccctgcgcatgtgtttgccaccagcgatgtctgggcgggatgagtgcgttgaccaggtgaacgaggtggatggcgacagcatggagaaatgggagcaggacgactacggacaggatgaccataatgcgatgcttaacctggccgtcacacctgcggccaatgagctgcgaacctatgcgtcgacccaccgtctgcccacaaattacggtctggctggtctcaacggtgtctctgtcatatccttctccagctcctcatccctgcgagctgttggatcagcggaggaggatggcataatatgccgggatgatggcttcatgaccgatcccagcgactgcaccgtgttttatcgctgcatctcgaacggccgaggctataacaaaatcggcttccggtgctcagatggcacggcgtgggacgagtcccttcagtcctgtaaccatatgtttgacgtacgtgccaacggaggatgccgcaatcaagctgttccacagaacgacggttattacgccggccaaacgtcaacacagtcctcgcagaccagttaccagaactcaaccacaagcagtcaacagagctcgtccaccagttcctccaactcctctcaaagttccagttcaacatccagttctacatccaactccagctcaagtcaggagtcctctacatccagcagcagtaatcagtcgagctccacgtctagcaaccatcaggagtccagctcggaatccagcaacaaccaggagtccaattcgggatctagcagtaatcaggaatctagcacgagttctagcagcaatcaaggctcaagctctcaaaatgctggcagcagcaaccaaaaccaaagctctggcagcaatcaaagttcgggaagtagccaatcttcaaacagtaaccagaactccagcaacaatcagaaccaaagctctcaaaattctggtagcaaccaaagctctagcagcagtcaaaactcgggcagcaaccaatcctctggcagcaaccaatcctctggcaacaatcaaagctccagcagcaatcagagctctggaagtaatcaatcctccaacaacaatcaatcctccagctcaaacagcaatcagacttcttcaagcagccaaaacaacagtggatctaataaacccgtgcccaccgagtgcgaggatgaaaatacttatattccggataaagaggactgtgctaagttctacagatgccgccaagataaagacggaaaattagagcaagtgcctttcacctgtggtcccggtaccgtttggaaccaagtggacaaggtctgcgatctgcccactgaggatcaaaagaagaagtgcaacattcaatcgggttcctcgagtggtagtaacaactctggacagcaatctagtggtagctcctcgaacaaccagggctcttccaacaatcaatcctcaagcaaccagagctcatctaacaatcaaggatcgtctaacaatcaaggatcgtctagcaatcaaggatcgtccagcaatcaaggatcgtctagcaatcaaggctcatctagcaatcaaggctcatcaagcaatcaatcttccagcaatcagagctcatccagcaatcaaggatcgtctagcaatcaaggatcttctagcaatcaaggctcatccagcaatcagagctcatccagcaatcaaggatcgtctagcaatcaaggctcatccagcaatcaaagctcatccagcaatcaaggatcgtctagcaatcaaggctcgtccagcaatcaaggctcatccagcaatcaaggatcttccagcaatcaaggctcatccagtaatcaaggatcctcaagcaatcagtcctccaatcaaggctcgacttcatcttctagcaaccaaagctcctcaagctcaaataataactccacgagcactcaaacaaagccatctaatcccgatggtgaatgccaagatacggaaacatatttggctgataagaaggactgtgcccgattctatcgatgcgtagagaatggtagcggtggcttcaataaagttcctttcgattgctcccctggaacggtttgggatccagatacgaagggatgtaaccatccaacagatgtgcaaaaggagcaatgcaaggctatggccaatggaagtggatcatcatccagccaaggctcctcttccaaccagggatcatcctcaagccagggatcttcttccaatcagggatcatcctccaaccagggctcttcttctaaccagggatcatcttcaaatcagggttcctcttctaaccagggatcatcttcaaatcagggttcctcttctaaccagggatcgtcctccaaccaaggatcgtcatctaaccagggatcatcttccagccagggttcttcatccaaccagggatcatcttccaatcagggttcctcttccaaccaaggatcatcttccaatcagggatcgtcatctaaccaaggatcatcatctagccagggatcttcctccaacgaaggatcatcttccaatcagggatcatcttcgagccaaggatcatcctctaaccagggttcatcttcgaaccaaggatcgtcctctaatcagggttcctcttctaaccagggatcatcatcgaatcaaggatcttcctcaaatcagggatcatcttcaaatcaaagttcttcgtctaaccaatcgtcctcgaatcaatcctcctccaatcaatcgtcatcatctaaccagacatcatcatccactacacaaaagcctttcaaacctgcagagaaatgtgaaagtgaggaaactttcttggctgacaacgaaaactgctcgaagttttatcgatgcgtggataatggtaagggtggttttacaaaagtatcattcacctgccctccaaacacgctatgggatcctgaggccaacagctgtaaccatcctgatcagatccagaccaagccgctcaaatgcaaaaaggtggttagccaaggcggaagctcctctaacagcaccagcaactcctcgagtagctcaaacaacagtggttcctcgtcgaacagtggatcatcttccagttcatcatcctccaacagtggctcctcctccaatacaggttcatcgtcaaacagtggcgcttcttccagcggtggctcatcgaatcaaggctcatcctccaatagtggctcctcttccggctcgaactcttctggaaatcaatcgacatcttcgtcaacatcgtcttcatcatcatcaagcaataataataatcaaggttcctcctcatcgtcctcctccagcagcagctcgacttcgtcaaaaccaaatccatctgaaacctgcaaagttaatggacaatttattggcgatcgatcggattgtgccaaattctatcgctgcgtcgataatgacagaggtggcttcaatatggtaccctttagctgcggtcctggcactgtttgggatgcccagatgcaggcctgtaatcatgcgtgggcagtaaaggaatgcggtggtattgctccacctacaacttctactccgacgacctccaggccaacaacggcaagcacttctagaccttctgaccaaacttcaacgtcgagacccacaggtccgcccactaccgcacgtccagtgactgccagaccaaccacttcttctccaacaacagcttcatcatcccaaaccacatctcctgttactcaggcacccaatacggatggcaaatgtcgatcggagggctttatggctgatcccaacaactgctccaaattctaccgctgtgtaaggaacaacaaaggcggcttcacctcaattccattccaatgtggagctggtaccgtatgggatcaggatctgcagacctgcaaccacaatttcaacaattgcagtacgggcactgaaagtaccactccaaaaccgccttgtgagccagcaacaaatggaacaacggccacgtctacgtcctcgaccaccacacctccacccaccaccactgatttaccacccacttcaacaacaggattgccgcctactacaacaaccgagttacctccaactacaaccacagacttacctcctacaacaactactaggttgcctcccactacaactactagcttgcctccgactacaacaactggactgccacccaccacgaccacaggagctcaacccactacaacaacattgagttcggaaactgaaacatcaacggtaaccacaagtccggaaagcaccacgcaaccaccgtctacaaccactatgaaacccctaccagctggaacggaatgcacaggagagggatacatggccgatcccgaagattgcaggaaatactaccgatgcatcaatgctggagcttcctacagaaagtacaactttacgtgtcccaagggcacgggatggaatgaagaagttcagacctgtgactacgtggagaatataccaaggtgctcgaagttacccgctgaaccaatcactacgacaccaagtgaagagtccaaggatcccggaagcaccactccgcagtcaacggatgagcccaccacagtgacaaaacccattacaaaacccaccgaagaaccttcaacagaaaaacctcaaaagccgaccactcaatatccggagaagccaaccaccacagaggaaccagaaaagccgcagaagccgactacaaccgagtatcctcagaagccaaccaccacggaggagcctacccctgagaagccccagaaacccactacaaccgaatatcctcagaagccgaccaccacggaggagcctactccagagaagccccagaaacccactacaaccgaatatcctcagaagccgaccactgaagaacccaccaccacaagtattccgggctacaatccaacaacaacgtctgttccgggctataatccaacaacaacgccgattccggtagaaactacaacctcaactcctggctataagccaactaccaccggcgaacctattaccacgaccacattaccttccacaaccacggatgcaattcaagagcctacaacctcaaaaaaacccgaacccacaacaaccacggaaagtcccgaatccagcacccctgaaggttcagtaaccactcttcagccggagccacagcctaactataactgctcatcggagggattcttcccagatcccgaggactgtagtcgctattaccgttgtgtggatgcagccaaaaacggcaaatatcaggtttatgccttcaagtgcggcaaaggaactgtttgggacacgtccaccgagacctgcaattacgccgatcaggtgtctggcaattgctcatcgggacagacgaccacgccgggaacgactacggaacctggtacgacggagagtacaaccagctctggaaaacctgaaaccacctcaaaggcccctgaaaacaccacaacatgggctcctgaaaccaccactacatcgtctcctgaaaccaccaccacagtagcctccgaaaccactactactacttctggcacaaccaccacagccactcctgaaaccactacaaaaccacccaagcctgaaaccactaccatagctggggaagaaacatcaacgtcaaaatcgcctaccactacggagagtcctgctcccagtaccaatacctctgctccttgtcccgaaaccggaccaggtcagaacgtgtacgtctgccccactggattccgccggcatccggagaagtgcggcatgttctaccagtgcagcgaaagtgccgataacaatgatcttaacatcgtggtattccaatgccccaacggaaccgtctaccaagacaagtcctgcagctgtggcaagccaccggcaggtgacaagtgctccaaggacatgaagaggaccaccaacgcgtttgaagaggaaacgaaacttcagaatgtggttcaaatcagcacgacagatccgctctgcccggatgagggtcacttcgcgctcaacaacgaccagtgcggccagctgttcgtcaagtgcggattctcggagctgacgggtcgcatcgaaggccagatccaccgctgtccgcagggattcgcctactggaacgttagccgacgatgcgagcccgcccgcaagctgcccaactgcacgcccaccacctacaatgtgggcggaaacgtgccgctggagtggctcaacattggccatagacgccgcagcatgcgcatttaa

SEQ ID NO: 8001 - protein, 2112 aa, DROSOPHILA
MDQTDVAFYCPGEGLFADDYDCRIYYRCERRSGQYIQPYLLACPEDAVFSRTLRMCLPPAMSGRDECVDQVNEVDGDSMEKWEQDDYGQDDHNAMLNLAVTPAANELRTYASTHRLPTNYGLAGLNGVSVISFSSSSSLRAVGSAEEDGIICRDDGFMTDPSDCTVFYRCISNGRGYNKIGFRCSDGTAWDESLQSCNHMFDVRANGGCRNQAVPQNDGYYAGQTSTQSSQTSYQNSTTSSQQSSSTSSSNSSQSSSSTSSSTSNSSSSQESSTSSSSNQSSSTSSNHQESSSESSNNQESNSGSSSNQESSTSSSSNQGSSSQNAGSSNQNQSSGSNQSSGSSQSSNSNQNSSNNQNQSSQNSGSNQSSSSSQNSGSNQSSGSNQSSGNNQSSSSNQSSGSNQSSNNNQSSSSNSNQTSSSSQNNSGSNKPVPTECEDENTYIPDKEDCAKFYRCRQDKDGKLEQVPFTCGPGTVWNQVDKVCDLPTEDQKKKCNIQSGSSSGSNNSGQQSSGSSSNNQGSSNNQSSSNQSSSNNQGSSNNQGSSSNQGSSSNQGSSSNQGSSSNQGSSSNQSSSNQSSSSNQGSSSNQGSSSNQGSSSNQSSSSNQGSSSNQGSSSNQSSSSNQGSSSNQGSSSNQGSSSNQGSSSNQGSSSNQGSSSNQSSNQGSTSSSSNQSSSSSNNNSTSTQTKPSNPDGECQDTETYLADKKDCARFYRCVENGSGGFNKVPFDCSPGTVWDPDTKGCNHPTDVQKEQCKAMANGSGSSSSQGSSSNQGSSSSQGSSSNQGSSSNQGSSSNQGSSSNQGSSSNQGSSSNQGSSSNQGSSSNQGSSSNQGSSSSQGSSSNQGSSSNQGSSSNQGSSSNQGSSSNQGSSSSQGSSSNEGSSSNQGSSSSQGSSSNQGSSSNQGSSSNQGSSSNQGSSSNQGSSSNQGSSSNQSSSSNQSSSNQSSSNQSSSSNQTSSSTTQKPFKPAEKCESEETFLADNENCSKFYRCVDNGKGGFTKVSFTCPPNTLWDPEANSCNHPDQIQTKPLKCKKVVSQGGSSSNSTSNSSSSSNNSGSSSNSGSSSSSSSSNSGSSSNTGSSSNSGASSSGGSSNQGSSSNSGSSSGSNSSGNQSTSSSTSSSSSSSNNNNQGSSSSSSSSSSSTSSKPNPSETCKVNGQFIGDRSDCAKFYRCVDNDRGGFNMVPFSCGPGTVWDAQMQACNHAWAVKECGGIAPPTTSTPTTSRPTTASTSRPSDQTSTSRPTGPPTTARPVTARPTTSSPTTASSSQTTSPVTQAPNTDGKCRSEGFMADPNNCSKFYRCVRNNKGGFTSIPFQCGAGTVWDQDLQTCNHNFNNCSTGTESTTPKPPCEPATNGTTATSTSSTTTPPPTTTDLPPTSTTGLPPTTTTELPPTTTTDLPPTTTTRLPPTTTTSLPPTTTTGLPPTTTTGAQPTTTTLSSETETSTVTTSPESTTQPPSTTTMKPLPAGTECTGEGYMADPEDCRKYYRCINAGASYRKYNFTCPKGTGWNEEVQTCDYVENIPRCSKLPAEPITTTPSEESKDPGSTTPQSTDEPTTVTKPITKPTEEPSTEKPQKPTTQYPEKPTTTEEPEKPQKPTTTEYPQKPTTTEEPTPEKPQKPTTTEYPQKPTTTEEPTPEKPQKPTTTEYPQKPTTEEPTTTSIPGYNPTTTSVPGYNPTTTPIPVETTTSTPGYKPTTTGEPITTTTLPSTTTDAIQEPTTSKKPEPTTTTESPESSTPEGSVTTLQPEPQPNYNCSSEGFFPDPEDCSRYYRCVDAAKNGKYQVYAFKCGKGTVWDTSTETCNYADQVSGNCSSGQTTTPGTTTEPGTTESTTSSGKPETTSKAPENTTTWAPETTTTSSPETTTTVASETTTTTSGTTTTATPETTTKPPKPETTTIAGEETSTSKSPTTTESPAPSTNTSAPCPETGPGQNVYVCPTGFRRHPEKCGMFYQCSESADNNDLNIVVFQCPNGTVYQDKSCSCGKPPAGDKCSKDMKRTTNAFEEETKLQNVVQISTTDPLCPDEGHFALNNDQCGQLFVKCGFSELTGRIEGQIHRCPQGFAYWNVSRRCEPARKLPNCTPTTYNVGGNVPLEWLNIGHRRRSMRI

SEQ ID NO: 8002 - DNA, 3380 bp, DROSOPHILA
ccaaaaaacgtcgatcaagggctggggagatgattcacacgctgggaatgccaccgaaaccaaaagagatttcaaatcacgtttcaaggtgtgcctaaatgagtaaatgagtccattccaggactcagcctgctgtaggaatcccatgaaggagttttcaaatgtgtgcaggcttctactttaatcgttgtcgactaggttttattacaattatcttaataaatgaattcgagagttcttaggctagctacatatgtatatattaaggatggctacatctatcgtcgcttcttcttctccagcttacgaatcttgtgcaggcgcgtccggaccggctcgccctcccgctccgtcacttcgccggactccggattactttggccatccgggttattctccatcaatactgcggccgaaatgcaaacgaactggaagagagcacccacataaagcccgtatcggattagcaagctgaagatgtcctcgtcgccgtacttgtccagggctgcggcggcgcccagactgtccgcggaagccgacatcgctgcgctggtattgtttataaacaaaacccgcgaggattagacaaaaaaaaataacaactacaaaaagtttgttttttgtattgggtagagatggtaccctgaaccaacagttcaggtggaaactatcgataacttttttaggtcaaagttttaaggttgttagctcattaacggcaagtatttaaaggcttgcacaaaatcttcgcttgattttatttaaattcaattacctggattattaaatacattttataaagtttaacactagtgaaataaatatcccatccccaacacattcttcagggttaccgtttaaggtatgttcaaaactttatggtatattccggagccctacaaaagtcttggtattttttcacactggtctcatagtcgcggctgataagtcgctaatttttgcataatattaagtataagtcaaaacaaacgtgcgaattatgtcatgtattcggctagcgtctgccaccgttctggcaggggtccgtcccccgccggcagcaagcggaggtggagccttgcgcctgttgactaaacggaatccggatgctgcattcgcacgccgccagtttgctgtagcggttgaaaacggcggaggcagaaagaagccgaatggaactttcaagctcgcagttttgggggccaccgtaggcgcggccaccggatcggtgtatacgatgtaccagcggtggacagacggcagctcgcacaaagagcacgaggagacgaagccgacgcggctggacgggattccggctggagtgcggataaccaagcgctatgtcaaccccaaggacacgtccggtttggacattgtgctgttccagttccagacgtgtcccttctgttgcaaggtgcgcgctttcctcgactacatgggcatatcctatgcggtggtcgaagtggatgccgtcctacggcaggacatccgctggtcgtcggtgaagaaggtgccgatggtgctcatccgacagcaggacggcaaatacgtccagatggtggactcaagtgccatcatatcccttatagccacccacctgcaggacaagcgcaccgacatcggcgagctggcacagttctatccgcacacctccttcttcgacgatgatggcaaaaagaagaacgacatattgaataaatacttcctcatgtaccgcgagcatacgcccaagggagtatccaaggaaacggatgagtaagttaaccagggtcaagtaatcttttaatcaaatcttttaaccttgagtgtctgttcttagaaccgatcgcaagtggagaagctgggccgacagccacttggtgcatctaatatcgcccaactgttatcagaccatgggcgagtccctagagacttttgagtggttctcgcaagctggcgagtgggacgttcacttccccaaatgggagcgcgacctgatggtttactgtggtgccaccgccatgtgggccatagccaagatgctgaagcgccgtcacgccctcagcgacgacgtcaggtcgcacatgtacgatgcccttgaccagtggaccactgagctgaaaaagaggaacacgaaattcatgggcggaaaacagccaagtctggctgatctatcggttttcggcgtgctttcaagcatggaggggtgtcagacgttcaaggattgtctgcaaaacaccagcatcggtaaataaggtttctttctcgggttttgtacctttttacgaactttttacatatttccgcaggtaaatggttttatgacgtcaaggcgttggtggagaagaatcgtgggcagttgcaaagagaacgtattgaaaacatggccgctatagcttaaaacaaatatttgcccttattttatccaaagattgttgaaaataaccgaaatgttcattaaaatatacattttaatcaaatctagtttgccgtttcgtttatggtatctgaatgtatatatttggtcaaaaacgcgtaaggagtgcaagtttatggtacaaattggaattaattttaggttttatattgttattttatttatatgttaaattaaaaatgtttactaaataaatacctcctgctaataaaaatatcccaaaccgacgtatgtatacctatcgataacgtttaagcaggctggatccgatgctcaacaacggtcacattgattttgtgattttggttagccgcttgcaaacttgcaaatcatttcgttggttttttacttggcgagttaattggtgaatttcagcacaaaacatgagcagattgggctttgagcaattcccggactaccaggtgcccggcatgaagcatcctgatttctcgccctacgagtccaatggcgggtgagttgctatttcccagcggaatcgagatgtggaagaatgtctccatctaaccggagtcttccctgtttacagctccattgtggccatcgccggagatgactttgccgtaattgcagcggacacccgcctgagcagcggctacaacattcactcgcgaacgcagagtaaactctttaaactctcgccccagacagtgttgggttccgcaggctgctgggcggacacgctctcgttgaccggatcgattaaggtgcgcatgcagagctacgagcatacccatctgcgcaccatgaccactgaggccgtggcccagatgctctccatcgccatgtacaatcgccgcttcttcccgtactacgtgtcgaacattctggctggaattgacaacgagggcaagggcgtcgtctactcctacgatcccatcggtcactgcgagaaggctacataccgcgccggcggcactgccggcaccctgctgcaaccggtgct

SEQ ID NO: 8003 - DNA, 1254 bp, DROSOPHILA
atgtcatgtattcggctagcgtctgccaccgttctggcaggggtccgtcccccgccggcagcaagcggaggtggagccttgcgcctgttgactaaacggaatccggatgctgcattcgcacgccgccagtttgctgtagcggttgaaaacggcggaggcagaaagaagccgaatggaactttcaagctcgcagttttgggggccaccgtaggcgcggccaccggatcggtgtatacgatgtaccagcggtggacagacggcagctcgcacaaagagcacgaggagacgaagccgacgcggctggacgggattccggctggagtgcggataaccaagcgctatgtcaaccccaaggacacgtccggtttggacattgtgctgttccagttccagacgtgtcccttctgttgcaaggtgcgcgctttcctcgactacatgggcatatcctatgcggtggtcgaagtggatgccgtcctacggcaggacatccgctggtcgtcggtgaagaaggtgccgatggtgctcatccgacagcaggacggcaaatacgtccagatggtggactcaagtgccatcatatcccttatagccacccacctgcaggacaagcgcaccgacatcggcgagctggcacagttctatccgcacacctccttcttcgacgatgatggcaaaaagaagaacgacatattgaataaatacttcctcatgtaccgcgagcatacgcccaagggagtatccaaggaaacggatgaaaccgatcgcaagtggagaagctgggccgacagccacttggtgcatctaatatcgcccaactgttatcagaccatgggcgagtccctagagacttttgagtggttctcgcaagctggcgagtgggacgttcacttccccaaatgggagcgcgacctgatggtttactgtggtgccaccgccatgtgggccatagccaagatgctgaagcgccgtcacgccctcagcgacgacgtcaggtcgcacatgtacgatgcccttgaccagtggaccactgagctgaaaaagaggaacacgaaattcatgggcggaaaacagccaagtctggctgatctatcggttttcggcgtgctttcaagcatggaggggtgtcagacgttcaaggattgtctgcaaaacaccagcatcggtaaatggttttatgacgtcaaggcgttggtggagaagaatcgtgggcagttgcaaagagaacgtattgaaaacatggccgctatagcttaa

SEQ ID NO: 8004 - protein, 417 aa, DROSOPHILA
MSCIRLASATVLAGVRPPPAASGGGALRLLTKRNPDAAFARRQFAVAVENGGGRKKPNGTFKLAVLGATVGAATGSVYTMYQRWTDGSSHKEHEETKPTRLDGIPAGVRITKRYVNPKDTSGLDIVLFQFQTCPFCCKVRAFLDYMGISYAVVEVDAVLRQDIRWSSVKKVPMVLIRQQDGKYVQMVDSSAIISLIATHLQDKRTDIGELAQFYPHTSFFDDDGKKKNDILNKYFLMYREHTPKGVSKETDETDRKWRSWADSHLVHLISPNCYQTMGESLETFEWFSQAGEWDVHFPKWERDLMVYCGATAMWAIAKMLKRRHALSDDVRSHMYDALDQWTTELKKRNTKFMGGKQPSLADLSVFGVLSSMEGCQTFKDCLQNTSIGKWFYDVKALVEKNRGQLQRERIENMAAIA

SEQ ID NO: 8005 - DNA, 4522 bp, DROSOPHILA
gcacctatcagtcgatcagtgtcccttttcttctgcctatttggtttcttttgttactgtttttgttttttttttttttttttctttattccttgtattttcccatggcgcaatcacaactaatgcaccgcgtatggagcctctaaatgtcgaatgaagtcagcgataaattcagctggttgattagctgttggggcaataaatccatcgcttcacaccgccacaagtaattgccgacaaagcgtcttcgtcgccgtcttcatctccatttcgacaaaaagctcagctccgatcagctcagcgactctggatgtggacatggggatgggggatggggactacagtccaagtccaagtccagctccgtccatccatccatctattctgcggtctggagtggactgagctggactggaatgagctggtcgagctcttcggctctccactctgagtaagaatgtgtgccggccaatattttatcaaacctgacatttcctcgtgtagctccgattatggcccgggttgcgacgaggtcgcgattctctgcgagcacagcggcattgattgccactgcccatgtgtatttattcctctgcttatgtttatgttgacattgacatatctcgcgtcttatcggtttgcaataagtgtacgccattccatcgcacaggcactgcaccaatgagccggcatctcttgaacgagcgttctgttttccaccgctctgtcgccacagtcgatactgctggtatgggtagaggtacccatggtcgaggacgctggcgacaactgcagctcggttcgggccctctggacccggatgaaatggacaatgacctgccgcaacgaacgggtttgaccattagcagtaagttattcggcaaacgaaattagagacacatggtacttaatacactaaatgatcgtaatagtttaaaccttgttcaatgatgctatttgcgaaaatacttgtaattttgtaacatacatacttgttgattgtgtagagcctaataaagtgagaaggagatttttattataatagttccctttgtaagattaggtatacaatatattaacctttcatggtcaattttaaatctttactagaaatggaggcttaaacaatttaaaagcgctaagaatttaaaataatttaaggacggttttgtatttgtacatgtttcattgccaaagtgtctagatggtttccattccaattgaatgctaatgactaaatggccatttacaacattaagcccatatgatattttacctattaagaactaagtatcggtggccaattaactaatgctgagcataagaggttaccatgtcacagtaagtatttacataagaagataattaaattgatctaattgcaccagacagcatcaaattggcatttgttgtggaaccagcgggtcatccatgcgtttttctttgacatgtttgcagtttccgccataacatcgaatctcattggatcgcgctgcataaagtaaggatattagttaatgatttctaagtttcttgaacatactacgtacaatgggcttagggaaaatgcgcttcatgtccacgcgatgcagatgctcctgatgagcctgttgcagcatcttgtactccgagccactgaggcattgcaggcaaagatcgcactcctccttgttgcaggacttgtcgcaatcgtgtgcagcgcatttattcaagtcggtggacaggtttttatcggttgtgatcatctcgctgctttcgccgagccttaaagtaaatacattttaaattacgttggatttaataatatcaatattacttacaatgcgccacttgttgatgtaagtggccttatgccaaccaaattaaacacgctgtatagaacttgctcgtacaacagcgagttgggcttgaaatgggcagaagaaagattgggagacatgttggcctccatgagaaaaactttcagatcctcgtcaataaacaaatcgaatcgcatcagatcgaaaaagttgtgagtcctgtaggatcgcagtatgttaacgatgtccttctccttggccgcaatcgtggtgcgtactatgtgctccacttgaggccaaatctgggcgggatccttgccctgatctcggacataggcttcaaaaacggtgcgcatgctgccgccaaagcgattgtagtacttgcgcagcgaaggaacctcccaggtgggtaaatagtcatcccccacaatgtacttgtccacattctcggcatcgaagggatggtatttcaccgggcaataccggaacagaacgtcgcccgtgtagatgtagactcgcaaaggattaaccgaggtaatgactacatagacgccgatgtcgaacttgtggccatccaccagatagggtcgctgcacgaattcctggacaaaggagtcgttcgatccgaaggcaatgtcagcgggagcgcgcaccttaatgtgccgatgctcgttgtgcttctggacgaacagtgcctggggattctccctggcgtagtccaggaactcctcccgttccgctggcaatcgaaaggcacgcggtagaaagggcaactgggtggtgcataggtccaccttgttagttaggtaaccgcagcctgggtaatggttcaccacctgatgctgtccgagattcttgagattggcgaacgaaagaaatggatagtcgtgggcccacaagagattccagctatcgttaactcccactcttttatagccaaacttgtgcagcacattgaccacatgcaccaggtgctcctccgtgggactgcgaccaaagatcgcatatgtgggcggtggctgcagctgatccgctgaagaatctgctaacttccaggggaagactctgctggcatggggcagcacctccaccaccacggccgtggccactgtcgccgccagaaatatcataatgggcagcagtccaatgctgttcgatggcttttcggactcctccgttgtagccatctacagaaaaagagaaagttttcggttgctcatcaatgggaaatgcaccaaaaatagatgaacttactttgccatctacctccttttgattaggagcattctccactacactggcatccattccacgtccgggagttctatctatcaaatgctaatacaagcgactaatttaaaacagacttttttgttcgcgatctccacggcaaccaaactgaaatttcccgtttgccattcaaagtgaagcgccagcgggacagctgttttaaaatttcccctttgtggcgcgcgtttaaaaacggcatctctggtgaaacggttagggaaatttgtaacggtcatttaaaaaaatttcaaataattataacaaatcggaaaattatataataaaaggtcttagagcccgatactgggtatttcaaaattaattttgatatattatgtcacacaaaaataaataaaacagccatttttttcgtatttatttttttatatttttgttcctattttttcgttgcaaagttaaaatgcaacggcgtacaaagaacactgcagatactaagagaattcaatcgcttaaggccttgtttaaaaaagtggttcgcctgatgagcctaaatgatccctggcgagaaaacgaagatgatccacgaataacttcaaacgtcatgaagaatttatctgccagagtgcgcacaaaatccaaatcgggattcctaactgcagcggtataacataattatttaaaatatatgtaacaaacgaataattacttactttatgacaggataaatctttgattcgaacgccgcacgtgattcgaacaattccggaaagaatgaaattatgtaaactgtttgctaagttgacatgcttggcaggcttcagtccagtgaagtaccttttttgtatgatgtgactagcaactgactttgggtttctttagaaaattcgagctcgactagttcctgtggtccgtttgatgcccgtggatgctggtcgcattatcataaggcaatcggatgctcctataaccgtgttttttgtactaacaggtgaagtacatatgattaaaaacgaaaaaaaccaggtaatggctgaaatggctgacgtgtataattacatgatcctaactcttggcttgatagaagggagaaggagtggtcatgggcttccttggtgctggagatatgatgggtgatgtggagctcttagagggtatcaagcgaactcacaccttcagagcagcaagtgagttattaactgtcttattggatagtagtcatatttaaaaacttttaattatattcttcattctgagagctagcaccagcatagctaacattcttatctcttccaattaaatcacacttaagtatgataagaaagtgaattaggcaaactgcactatttgcggctcatgtcggaataaatgggaaatacatagggccagcacgcgatttgtacgattgtgtttattgggattttgtttggttttgttgcttcatttgcgattgcctgtacccaccaatttaatca

SEQ ID NO: 8006 - DNA, 2341 bp, DROSOPHILA
acgccgttgcattttaactttgcaacgaaaaaataggaacaaaaatataaaaaaataaatacgaaaaaaatggctgttttatttatttttgtgtgacataatatatcaaaattaattttgaaatacccagtatcgggctctaagaccttttattatataattttccgatttgttataattatttgaaatttttttaaatgaccgttacaaatttccctaaccgtttcaccagagatgccgtttttaaacgcgcgccacaaaggggaaattttaaaacagctgtcccgctggcgcttcactttgaatggcaaacgggaaatttcagtttggttgccgtggagatcgcgaacaaaaaagtctgttttaaattagtcgcttgtattagcatttgatagatagaactcccggacgtggaatggatgccagtgtagtggagaatgctcctaatcaaaaggaggtagatggcaaaatggctacaacggaggagtccgaaaagccatcgaacagcattggactgctgcccattatgatatttctggcggcgacagtggccacggccgtggtggtggaggtgctgccccatgccagcagagtcttcccctggaagttagcagattcttcagcggatcagctgcagccaccgcccacatatgcgatctttggtcgcagtcccacggaggagcacctggtgcatgtggtcaatgtgctgcacaagtttggctataaaagagtgggagttaacgatagctggaatctcttgtgggcccacgactatccatttctttcgttcgccaatctcaagaatctcggacagcatcaggtggtgaaccattacccaggctgcggttacctaactaacaaggtggacctatgcaccacccagttgccctttctaccgcgtgcctttcgattgccagcggaacgggaggagttcctggactacgccagggagaatccccaggcactgttcgtccagaagcacaacgagcatcggcacattaaggtgcgcgctcccgctgacattgccttcggatcgaacgactcctttgtccaggaattcgtgcagcgaccctatctggtggatggccacaagttcgacatcggcgtctatgtagtcattacctcggttaatcctttgcgagtctacatctacacgggcgacgttctgttccggtattgcccggtgaaataccatcccttcgatgccgagaatgtggacaagtacattgtgggggatgactatttacccacctgggaggttccttcgctgcgcaagtactacaatcgctttggcggcagcatgcgcaccgtttttgaagcctatgtccgagatcagggcaaggatcccgcccagatttggcctcaagtggagcacatagtacgcaccacgattgcggccaaggagaaggacatcgttaacatactgcgatcctacaggactcacaactttttcgatctgatgcgattcgatttgtttattgacgaggatctgaaagtttttctcatggaggccaacatgtctcccaatctttcttctgcccatttcaagcccaactcgctgttgtacgagcaagttctatacagcgtgtttaatttggttggcataaggccacttacatcaacaagtggcgcattgctcggcgaaagcagcgagatgatcacaaccgataaaaacctgtccaccgacttgaataaatgcgctgcacacgattgcgacaagtcctgcaacaaggaggagtgcgatctttgcctgcaatgcctcagtggctcggagtacaagatgctgcaacaggctcatcaggagcatctgcatcgcgtggacatgaagcgcattttccctaagcccattcgcgatccaatgagattcgatgttatggcggaaactgcaaacatgtcaaagaaaaacgcatggatgacccgctggttccacaacaaatgccaatttgatgctgtctggtgcaattagatcaatttaattatcttcttatgtaaatacttactgtgacatggtaacctcttatgctcagcattagttaattggccaccgatacttagttcttaataggtaaaatatcatatgggcttaatgttgtaaatggccatttagtcattagcattcaattggaatggaaaccatctagacactttggcaatgaaacatgtacaaatacaaaaccgtccttaaattattttaaattcttagcgcttttaaattgtttaagcctccatttctagtaaagatttaaaattgaccatgaaaggttaatatattgtatacctaatcttacaaagggaactattataataaaaatctccttctcactttattaggctctacaca

SEQ ID NO: 8007 - protein, 516 aa, DROSOPHILA
MDASVVENAPNQKEVDGKMATTEESEKPSNSIGLLPIMIFLAATVATAVVVEVLPHASRVFPWKLADSSADQLQPPPTYAIFGRSPTEEHLVHVVNVLHKFGYKRVGVNDSWNLLWAHDYPFLSFANLKNLGQHQVVNHYPGCGYLTNKVDLCTTQLPFLPRAFRLPAEREEFLDYARENPQALFVQKHNEHRHIKVRAPADIAFGSNDSFVQEFVQRPYLVDGHKFDIGVYVVITSVNPLRVYIYTGDVLFRYCPVKYHPFDAENVDKYIVGDDYLPTWEVPSLRKYYNRFGGSMRTVFEAYVRDQGKDPAQIWPQVEHIVRTTIAAKEKDIVNILRSYRTHNFFDLMRFDLFIDEDLKVFLMEANMSPNLSSAHFKPNSLLYEQVLYSVFNLVGIRPLTSTSGALLGESSEMITTDKNLSTDLNKCAAHDCDKSCNKEECDLCLQCLSGSEYKMLQQAHQEHLHRVDMKRIFPKPIRDPMRFDVMAETANMSKKNAWMTRWFHNKCQFDAVWCN

SEQ ID NO: 8008 - DNA, 2996 bp, DROSOPHILA
tacgcccaagggagtatccaaggaaacggatgagtaagttaaccagggtcaagtaatcttttaatcaaatcttttaaccttgagtgtctgttcttagaaccgatcgcaagtggagaagctgggccgacagccacttggtgcatctaatatcgcccaactgttatcagaccatgggcgagtccctagagacttttgagtggttctcgcaagctggcgagtgggacgttcacttccccaaatgggagcgcgacctgatggtttactgtggtgccaccgccatgtgggccatagccaagatgctgaagcgccgtcacgccctcagcgacgacgtcaggtcgcacatgtacgatgcccttgaccagtggaccactgagctgaaaaagaggaacacgaaattcatgggcggaaaacagccaagtctggctgatctatcggttttcggcgtgctttcaagcatggaggggtgtcagacgttcaaggattgtctgcaaaacaccagcatcggtaaataaggtttctttctcgggttttgtacctttttacgaactttttacatatttccgcaggtaaatggttttatgacgtcaaggcgttggtggagaagaatcgtgggcagttgcaaagagaacgtattgaaaacatggccgctatagcttaaaacaaatatttgcccttattttatccaaagattgttgaaaataaccgaaatgttcattaaaatatacattttaatcaaatctagtttgccgtttcgtttatggtatctgaatgtatatatttggtcaaaaacgcgtaaggagtgcaagtttatggtacaaattggaattaattttaggttttatattgttattttatttatatgttaaattaaaaatgtttactaaataaatacctcctgctaataaaaatatcccaaaccgacgtatgtatacctatcgataacgtttaagcaggctggatccgatgctcaacaacggtcacattgattttgtgattttggttagccgcttgcaaacttgcaaatcatttcgttggttttttacttggcgagttaattggtgaatttcagcacaaaacatgagcagattgggctttgagcaattcccggactaccaggtgcccggcatgaagcatcctgatttctcgccctacgagtccaatggcgggtgagttgctatttcccagcggaatcgagatgtggaagaatgtctccatctaaccggagtcttccctgtttacagctccattgtggccatcgccggagatgactttgccgtaattgcagcggacacccgcctgagcagcggctacaacattcactcgcgaacgcagagtaaactctttaaactctcgccccagacagtgttgggttccgcaggctgctgggcggacacgctctcgttgaccggatcgattaaggtgcgcatgcagagctacgagcatacccatctgcgcaccatgaccactgaggccgtggcccagatgctctccatcgccatgtacaatcgccgcttcttcccgtactacgtgtcgaacattctggctggaattgacaacgagggcaagggcgtcgtctactcctacgatcccatcggtcactgcgagaaggctacataccgcgccggcggcactgccggcaccctgctgcaaccggtgctggacaaccagattggtcacaagaacatgaatttggaagacgccgacaagatcaagttaaccaaggagcgggccgtgagcgttgcctccgacaccttcatctctgccgctgagcgcgacatctacaccggcgactctgtgctgatcaacatcataaccaaagatggaattgaagtacgaactctgacgctgcgtcaggactagcctgtggcgaggatgttgccgtttcttttggttaggggcattcggtggaaaccaggcattctaagttagttggcttcaaatttttgtatttacccaaaacaacaaaacatcgtaataaaccgaatctttgagatttaaaatatgcggcctagtgtgaccagctggtcctagaaataaatcgttcccaagcagtgctcacagaagaggctgtgcgaatagtacagctttccccgtaccaacaaatccattttgctagctaagtttgtgcccgctggtgtgcgttaacaaaatcatttcttagtgttcgtctctcagagaattcagtccaatgacgagtttcgagtttgcactgctgccgcttctgtttttgccactgatcctggaaaacccgctaacctccgcccaaatgatgtcatcgctggtgaagccgggcattttccggcacctaatgtgccgcaacaacatgtatccgcgcagctcagtcctccggtacccagtttccgacgaacaggtcttctggtcggagccgttcccggactactgcccgcctgcgtacacggcgccacatattggcgggcaggtgtgggctgatccgccgttgcccagcgacacattctggccacagtggaatcagctggatggacaggtaaaccgcgaatcctttcacggtgcctacaacgtgcagaatggactgcccctaaatccgatcgggcgtaccggactaaccggacgtggttcgctaggcagatggggtccaaatcatgccgcagatccaatcgtcacgcgctggaagcgtgacgaccaaggagcaattgtggccaacccgacaaccggcaagtaagttggcccaatagcccattaactgtgatgacatcacttcctctttcctgcaggaatatcatacagatggttgccatacagcggtccgacaacaagttgtgggccattcccggtggaatggtcgatcccggcgagaatgtcagtgtcacccttaagcgggagttcaccgaggaggcattgaatttcacggacaaagccaacatggttgagcgattttttcaagcgggaggcgttcaggtataccaaggctacgtagacgattttcgaaacacggacaacgcttggatggaaaccac

SEQ ID NO: 8009 - DNA, 921 bp, DROSOPHILA
ttagccgcttgcaaacttgcaaatcatttcgttggttttttacttggcgagttaattggtgaatttcagcacaaaacatgagcagattgggctttgagcaattcccggactaccaggtgcccggcatgaagcatcctgatttctcgccctacgagtccaatggcggctccattgtggccatcgccggagatgactttgccgtaattgcagcggacacccgcctgagcagcggctacaacattcactcgcgaacgcagagtaaactctttaaactctcgccccagacagtgttgggttccgcaggctgctgggcggacacgctctcgttgaccggatcgattaaggtgcgcatgcagagctacgagcatacccatctgcgcaccatgaccactgaggccgtggcccagatgctctccatcgccatgtacaatcgccgcttcttcccgtactacgtgtcgaacattctggctggaattgacaacgagggcaagggcgtcgtctactcctacgatcccatcggtcactgcgagaaggctacataccgcgccggcggcactgccggcaccctgctgcaaccggtgctggacaaccagattggtcacaagaacatgaatttggaagacgccgacaagatcaagttaaccaaggagcgggccgtgagcgttgcctccgacaccttcatctctgccgctgagcgcgacatctacaccggcgactctgtgctgatcaacatcataaccaaagatggaattgaagtacgaactctgacgctgcgtcaggactagcctgtggcgaggatgttgccgtttcttttggttaggggcattcggtggaaaccaggcattctaagttagttggcttcaaatttttgtatttacccaaaacaacaaaacatcgtaataaaccgaatctttgagattt

SEQ ID NO: 8010 - protein, 235 aa, DROSOPHILA
MSRLGFEQFPDYQVPGMKHPDFSPYESNGGSIVAIAGDDFAVIAADTRLSSGYNIHSRTQSKLFKLSPQTVLGSAGCWADTLSLTGSIKVRMQSYEHTHLRTMTTEAVAQMLSIAMYNRRFFPYYVSNILAGIDNEGKGVVYSYDPIGHCEKATYRAGGTAGTLLQPVLDNQIGHKNMNLEDADKIKLTKERAVSVASDTFISAAERDIYTGDSVLINIITKDGIEVRTLTLRQD

SEQ ID NO: 8011 - DNA, 2932 bp, DROSOPHILA
gctctgctccagccactactccgcccgggtgatggagaagctgggcttccacgaggtgttccgcatgcagttcgccgactacaagcctcagggagaggtggtcttcaagccggcggccccgcacgtgggcatacaggtgatggccaaggaagtgggtcccgcgaaggcggcgcagaccaagctgtagacgatctgagttcggattttgtactatcgtatgtgattctttagtttgtagttcggtggcgggttcccagtagtgtatcaacgttcgattcagcgtagtgtaaacaaacagtacaagttacgtatttatctaatttaatcttcccgtcgcgacggtaaacttaagtgttttgtgtttagaacgagctcaaaataaaaccttgtcttaataacataaccgactggacaacaacttagcccctgctggcacggcgggagttcgacttcctgttcttgccggagcgcttggcctggctccgtttggcctgggtcttcttggcgttcagtttccggttgctcctggtcctggaactacggctggtgctgctggcggtggtggtgcccacacggatcttcctcacaatcgagtacgtcaagttggacaggtacactttcttgggcgtgctggacgagctgtaggtgggactggtggaagtggaggaggagttctgtgaactggagaagtccaggcagcagatcacgagcaccacgatgcacagggtgccgatttgaatagttgacttcatgttggtagtaggattgcttttaatatgcttcgatggatgcggccggagtgcttaagtagtcgccctggttgtttgcacagtttgctcaatcgcctacgaaggccgacgaaattgtttaattttggcaaaacacactggcgcttaagcaatcgctcttgagtttgctttgccttgaaccaaaacaaaatattcaaaaatagctatatgctttcacgtttaatttgaccaaaggaaatggggaaatgggattacttagccgaagactggttgaaaggactccgcgacatacggtccaccatacgacgcacttgctcctcgttgccgtacttctgggcatcggccacaacggcggcatgatgggaattagcctctgctgagatttcgtcctggatctggcgactcagtttaaaggacgacctgttggggatggtgaaagttcagtgtgactacttaaattctctggttcataatcattaacctgacggaggtgaagccaaagagtgccccgacgaagcctagggccatcagaaccacggccacctgccagttggagaccctcttcagaccacggatgccatagtacggtcctggattgggatcgtagttgggcctcacatcccacgcctggccgggattgaccgtctcgccaacgggactgcggtccgagcgcgatggctgccacagcaggctgtcatcgtagtctctcctccgctccggctttatcagggtcttgtacgcctcggagatctgaacaaatcgggctgtgcgctccggacacgcagcattgctcttaacatctgggtggtactgtggaaagggcagggtttaggaggctcctttggaatcttggagttacttaccaatttggagagctggacaaaggcattacggacttcacgggtgctgcaatcattgcgaatattcaaaacttcatagtgtgtttcgggttttcttggtttgtcgttcgagaaactgcgcaataggcaaacatttactttacataacaagttttatagacgtaaagtccttacttacgcacatatccagctcgagttggaaggcacaaccttagcattgtgagctttattagtattatttgtgctgatctgtcggagaaagcataattttaaactaggactttcaaaataaaatcaaaacacaaaacagctgatttgagggccttactctggcaatcctggctggccagctacaaaaatagagttggcagctctgttcgatgaaacagcaactcagttgaactatcgacagcgagcagtgctgccagactgtcggagcgctagcaacagaaataacaaacatttaatatttctttagccacttgacaaggcaaatcaatatgagtgcacaggaaaaagccttcgaactgcagcgccaggtgcgccagaacgcgcgggagtacgagaactccgtgaaggacttgtactcctgggagcaagacattaaaaacaaggagaaagagctccagaagtcgccgctttctgccgccaataaggttagctttaaattctttggtattaacaagtaaagctcacactttcaatgcaggatctgccagtgcgcagtcatgtccagacagacaagtcgcggaaggagagcccatcctcctcggcggccagctcacccacggagaaacaggacttgccagtggatcctgtggcccagcagtacaagaaggccaacgacatcaaggaccgtggaaacacctatgtcaagcagggggagtacgagaaggccatcgtggcctactccactgccattgccgtctatccccacgatcccatttaccacattaaccgggcactgtgctacctaaaacaggagaggtaggactgtttagaatgttctcgatacttcttccttacatgcatatttatccttgcagctttgatcaatgcgtggaggactgcgaggccgccattgcgctggataagctctgcgtgaaagcttactaccggcgaatgcaggccaacgagtccctgggcaacaacatggaagccctgaaggattgcaccactgtgctggccatcgagccgaagaacatcgaggccaagaggagcctggccagaatcaacgaccgtctgcgcaagattggtaaatataattttgattacctagtaagcatattttaaggcttttcattggcatccttacagccacca

SEQ ID NO: 8012 - DNA, 759 bp, DROSOPHILA
gccctcaaatcagctgttttgtgttttgattttattttgaaagtcctagtttaaaattatgctttctccgacagatcagcacaaataatactaataaagctcacaatgctaaggttgtgccttccaactcgagctggatatgtgcgtaatttctcgaacgacaaaccaagaaaacccgaaacacactatgaagttttgaatattcgcaatgattgcagcacccgtgaagtccgtaatgcctttgtccagctctccaaattgtaccacccagatgttaagagcaatgctgcgtgtccggagcgcacagcccgatttgttcagatctccgaggcgtacaagaccctgataaagccggagcggaggagagactacgatgacagcctgctgtggcagccatcgcgctcggaccgcagtcccgttggcgagacggtcaatcccggccaggcgtgggatgtgaggcccaactacgatcccaatccaggaccgtactatggcatccgtggtctgaagagggtctccaactggcaggtggccgtggttctgatggccctaggcttcgtcggggcactctttggcttcacctccgtcaggtcgtcctttaaactgagtcgccagatccaggacgaaatctcagcagaggctaattcccatcatgccgccgttgtggccgatgcccagaagtacggcaacgaggagcaagtgcgtcgtatggtggaccgtatgtcgcggagtcctttcaaccagtcttcggctaagtaa

SEQ ID NO: 8013 - protein, 217 aa, DROSOPHILA
MLRLCLPTRAGYVRNFSNDKPRKPETHYEVLNIRNDCSTREVRNAFVQLSKLYHPDVKSNAACPERTARFVQISEAYKTLIKPERRRDYDDSLLWQPSRSDRSPVGETVNPGQAWDVRPNYDPNPGPYYGIRGLKRVSNWQVAVVLMALGFVGALFGFTSVRSSFKLSRQIQDEISAEANSHHAAVVADAQKYGNEEQVRRMVDRMSRSPFNQSSAK

SEQ ID NO: 8014 - DNA, 4406 bp, DROSOPHILA
tttttatagtcaacatagttttgttggtaaacaaataaatatttaaaatctaaaccactaaacttgtgcctccatcgctggaatatcgaaccaaaagtcatagaaaaatgcaaacaacttattgtccccttagctatgttgcctttcagatagtttcgatatgtttcgggtagttggaatatcattgtgggagtatcataaataatgcttaaggttaccgaccccttggaggcttggaatacgaatacgaatacgaatacaaatacgaatagaaatagaaacaggttctggtgacgacttagcataaccaacttagcatcgactaacgactgcaggtgagatgggtggctccgatcggcggcgatcggttaagtacgcaaaggtctgactaagacgttgatatagttacttgcgggtgcacacagcgagtttgggagtatcaaaaagtagaccacgaataagtaattgcttatgtgccgaagtattttccatctaacacttaaaactattgtacatatagttactttcacacgtacgatcaacgatcaacttacacaccgataaaagcattttgctcgagtttacaatttccgtttagtgaattcctttggcgaaatgcatttggttcttcctaattattactacatagaccttgagtacacgaatgttaacgttgtcatcaaaataatcaatacggacgtctttacacttttgatattgttgtcaatgttatatcactagttgaactaaattaaacttctccttaaacccatgtcttttttccattctttcccagctctgcttcatctctgccgctgctggcccatatttatacctagattttgtattttggtggtgatggtggtggtggtggtgttggtgggtgagctttaagcaagcgttttccattcgcaactagctactggctgctttttggtttcgatatatagcctttcgttcatagcacgcaattgcagctcagctcgctttgcgaatctcctcagatatctcccgtttccatggctgcgtttatgtccgccacaatctttcccatcacctcgcggtagggggaatctggtcggaaagccgtctccagcagcgcctcctcgccgaagaaatcgaacacctcgtcgatgcggcccagcgacttttctgtgagatgcggctgcacaatcgacttcagcgccacttgcgattcggctattgacttttgcaggtacggcaggtcgaacgtgaagtccacttcgtagaatgatatgatggacagctgcgtgttctgcaacaaaaaaaaatcataataacatgtagttaaggagtagcatttaagactcacttgaaactttctcttaaagagctccgccttctgcagctcctcgtcgctgaactgattgttccggtggagcacaccgatcttgatcacaatcttgatgatgttcttgatcagcttctccgccttggccttgttccccgtgtgcatcttgcagagcctgtagaggttgtccagcagcgacgccgtcgtgccatcgatgaaggtcttggcgatgttttttgtggccatgcgtgagaggatcttcttctgcgcccgcagcccgatatcgtgcgacttgaagacattgtccgccatgactaaagcggatgggaggggtgggattggaattcagattcagacattattatcgctgcatattcattgactaaagcattgtggcaaagaaatacgagcagtacgagcaaacaaaacggagcaacaactcagcaaccaaggaaaacttaaaactgaacactgaatggtggcaactgaaaagcaaatcagctccgctcttctccgcggtttaccttccaagttccagtagtcgacgctccacagcagcagacattgtcgaagcccggccaccgacatcgcgactatatatcacacatatattacaccgattccagttgcaagcattgataagggaattatagacagagatataaaaacatgaatgattgggccatgtacatcagcgccgtatctttagataaaggaaacctggttctttcttcgctgtgcttctgtgtttctttgtgctttacgtgaagtgggcaataaaacagtctgtgtggcctacgtttaactacaatgagtcactcaaatgcaattacttttacctatagtgctgggaactgaaacattggaggagagtcctgtaggactgaagtctgtttagactaataaatggaatcaactaacataagtcacatttctatttaaagaacaaaacaaaacgattaatgtacgcacaactttatttgtaacgaataatttcttatcgagtgttcgtcacaagcttttaacaaacaaaacaggaatctaacgataataagacattctggggaattcgaattgggttatcatcgtaaacacaacataaaacgaataaatttgatataaggaatttaatgtacagtcaaagttagagctccgctgctccacaactttgctgctttccacacacagatataggaatgctgccgtattaataatggatgaccaactgcgcccctctgaccgtatctataaggtcgttctaacggcgcggcgtacgtgctggagcccgaaatggaaatgcggcagtgcttccaactgtccaaacaaggagtcccgatcagagctagttgggtgacggagtgctggggggaggaaaccgctggcgggtcaacagagttcagacacacataggtattaactagaagtcgtgactaagcctaatctggagcagggcatccctggttgctaatttaactaagtgaatgccagttccagttagataacgcccggcaatagaaccgtgtcaggacacggactgctccaaatggctaaggtcacgcgaagtgcaataaaagaaggcctatcccttcaaaggaacggagtgtgggtcccccaaggacgccagtggagtgcggaagtgcgctacagccgaaaccacagagtacttgagttcgttgggccattcttctcctggctttcctgtttgtcctgcatttgcgtgttccgttttcgcagcaggagggtttctttaccttctgggtgttattgattgcaacaggctgtgtgtgatgcccgcccccttgaaaccagaatagaaatccaatttggcgctcacctgtttttgtttttgttgttgctgcagtccttgaatcgaatccttgagtccttgagtccaagtatgtgtgtgtatgggtgtaatgtgtgcttgatgaccagtgtccgcaaatcgaagtgctagcgaaagcaactgaaaggggttggctgcattaaagcccgcgaactgcgtacaatttgcagctaaatttatgcgcaacttcgattaaacataaaacaactcagcgaacagcaacaaaaacaaaatatcagcctgtgagaccagctgcttgtagcaaccaaatgttagactgaaacgaatcaatcttccgtggctagtattattttcacttttggcggttctccagtctttcgcaacagaatgcgtttacttcccatctgagcacggtcacactgcccaagagtccagctgcgtcgttgaaaaatattttcgatgcctcgaaggttgatttatttcagaggaaatagcaggaaataaagttgaaaacgcagattacgagcagcagccgccaagaggagtgcacaatgaacatttacaacaagttgcgggccagggagcatggctacggtgagtctttcgcttggcgggagaatctcacttttggcgctcgaatttcctgcgatcaaaggtgttgatttttaaaaggtttcaatgggttttcctggccatctggtcaatgtgcatcctgcacggccacctgaccacagagcattgcctaaggggtgaagaaacccgactagttgctccactggaaactgctgatcgtgcagaagttccgtggaaaacaaagccacggcactattttcatggtttctcctctggttttcgtttttctttttaggcaatgagaggacctacgacttcgccctgcgccgcctttccgtggccaaggaggacagctggcggggcatcgcgccggccaactactgcccagacttcaatccggaaccgccgatcttctccgccaagttcgccaactgcgatggctatcggcacatcctggcgatcgccaacgaggacggcaagatcacgctgcaggacaccacccagcgcaaccaccagccggaggagcagtccctggtgggcccgcagtgccacttcaacgccgttttcgatctggaatgggcacccggccagatgcgcttcgtctccgcctcgggcgatcacactgccagactgtgggaggtggcgggctccggcatacgcggcctgaactcctatgtgggtcacacaaggtccgtcaagtcggcggcctttaag

SEQ ID NO: 8015 - DNA, 829 bp, DROSOPHILA
tctcacaggctgatattttgtttttgttgctgttcgctgagttgttttatgtttaatcgaagttgcgcataaatttagctgcaaattgtacgcagttcgcgggctttaatgcagccaacccctttcagttgctttcgctagcacttcgatttgcggacactggtcatcaagcacacattacacccatacacacacatacttggactcaaggactcaaggattcgattcaaggactgcagcaacaacaaaaacaaaaacagtcatggcggacaatgtcttcaagtcgcacgatatcgggctgcgggcgcagaagaagatcctctcacgcatggccacaaaaaacatcgccaagaccttcatcgatggcacgacggcgtcgctgctggacaacctctacaggctctgcaagatgcacacggggaacaaggccaaggcggagaagctgatcaagaacatcatcaagattgtgatcaagatcggtgtgctccaccggaacaatcagttcagcgacgaggagctgcagaaggcggagctctttaagagaaagtttcaaaacacgcagctgtccatcatatcattctacgaagtggacttcacgttcgacctgccgtacctgcaaaagtcaatagccgaatcgcaagtggcgctgaagtcgattgtgcagccgcatctcacagaaaagtcgctgggccgcatcgacgaggtgttcgatttcttcggcgaggaggcgctgctggagacggctttccgaccagattccccctaccgcgaggtgatgggaaagattgtggcggacataaacgcagccatggaaacgggagatatctga

SEQ ID NO: 8016 - protein, 188 aa, DROSOPHILA
MADNVFKSHDIGLRAQKKILSRMATKNIAKTFIDGTTASLLDNLYRLCKMHTGNKAKAEKLIKNIIKIVIKIGVLHRNNQFSDEELQKAELFKRKFQNTQLSIISFYEVDFTFDLPYLQKSIAESQVALKSIVQPHLTEKSLGRIDEVFDFFGEEALLETAFRPDSPYREVMGKIVADINAAMETGDI

SEQ ID NO: 8017 - DNA, 3836 bp, DROSOPHILA
tgtatatcacgtttacaatagctgcgcaaaatgtagcgaccatgtttgatcagtcgcacggtcagcagtctcacagacatctttcggcccgcaaagacctcggctcctagtgcctgcaactgaatgaagcaccttaaacggtctgtcatctattaatttaatttttaatttttacctattctttaagatttgtggtgcttaactcttgctgctgcttcctcttcttctccgccaattttgctcatgtgtgcgatcgatagcgccgatttataaccaaacagctgctgtcgtttcgtttcggttcggttcgtttcgattcgattgttttgtttttgcgtcgcaaataaattttctgtttgtgggtggtggtggttgtggtgcagctgcggggcgaagtgtgggggcggtggtggcagaactacaaggcgaaatcgtcgaatcgaaagggtttatttttgcaatgattatccaaagatatatcgcctttttcgatatctgtgtgggctagactgattttgggctattttcaactgaacaaaacgattaatttacgacctccaacttgcctggcagccaatttttaatgtaatgcgcctacttcaacgtttcgtttcgattcgatttggtcgttagataatcgctggtcagctggatcttttcatttgtcacggaaaatgtgcgccgcaataaacacttgtttaaaagcttgctttgcttatatttcgctataaaataatagctaagtgtgcaagaatttacgataaaaacaacggaataatttagaaacagcaaggcgttagtgtgaccacacttacggtatatctttagaatcgataatgactatcgcgtagtgtggactcgaatcatttggagaattcaaaaactaaaaaccgttattcacctgccgtaaaatcaacaaattaatacaatctattgaaatatcctgctacacacaaaaatttattacacgaaactaaaacaaaatcgtcaatagccgcacagcgaatcacttcggtcccagcatctccttgggattgacccactccttgaactgctcttcggtaattccggtcttcagtgcctcctccttcaaggtcgtcttattcttgtgcgccgtcttggcgatcagggcggccttgtcatagccaatgtgcggattcagcgcggtcaccagcatcaaggactcgttcatgatcttgtcgatcctctccttgttggcctgcagtccctccacgcagttcttgctgaaggtcatgctgccatcagctgggaggagaaggttatgtatgcatgtttttccacttggaaaacacatttccgactcacccaacaagcgaatggagcgcagcacattggacacgaccaggggtttgaatacatttagctcgaagtgcccgttggagccgccgatggtcaccgccacctgattgcccatcacctgggcacacagcatggtcattgattcgcattgcgtgggattcaccttgccgggcatgatggagctaccgggctcgttctccggcagcattagttcgcccagaccgcaacgcggacccgatcccagcaatcggatatcgttggcgatcttcatcaggctgacggcgatcgtgttgagcacaccatgcacctccaccatggcatcgcgggcagccagtgcctcgaacttgttgggcgccgacacgaagggcaagcaggttagctccgaaatgcgcttggccaccttctcggcgaatcccttgcgtgtgttcagacccgtacccacagcagtgccgcccagagccagctcatagacgcgcggcagacagcccttgatcctttccagaccgttggtcaactgctgtgtataaccgctgaattcctggcccaaagtcagcggaactgcgtccatcaagtgggtgcgtccgatcttgatgatgtccttgaactcatccgacttggacttgagggcatccctcaagtgtgtaaccgccggaacaagccgctcgttcagctccatgcccaccgaaatgtgaatggccgtggggaaggtgtcgttggagctctgcgacttgttcacatgatcgttgggatgcaccggcttcttgctgcccagttcgccgcccatcatcttaatggccgcattgctgatcacctagtaggtttgccaatggcatggggcaggagaagcatccagctatacacatttctctcgttagccctatctaacaatcttacctcgttggtgttcatattggtctgggtgcccgaaccggtttgccagatgaccaatgggaagtgaccctgtttgtatagcttgccggaaatgacatcgtcgcaggcgcaggatacggcatccgacaccttgccatctagtccgtaatccttgttgacctcggcacatgccttcttcagtatgcccatggcctggatcaccggcatctgcgggcagtttggggattaattggctatggcaaagcacttggtagatgccagaatatgttggttggttggttggttgcctaccggcatacgttcgcctatgtcgccaatgggaaaattcaatttggagcgcatcgtctgtgcgccgtacagcttgtccgccggcacctttagctccccgaaggtgtccttctccgtacgaaacttgccattctccttgcccttgccgcccttaccgccactgtcgcactgcaaagatgccccatgtagccatgagttgccagcgaccattgtcgcgtacttacatccttggcacggaggccactgcaaaccacccagagattgcgcctagccagatgcagaccattgttttgcttcagcattttcaattattattggttctgtgtttccgagcgattcatatacaacaaaacgatctgatctagaaaatcacactgcgattccgatgacagcgatgattgaatgatggatttcgtcgtcggcctacttggctccacttcacttgggtcccagcatctgttcgggtcgcacccagtcgttgaactgctgctccgtcaggtaacccaaattgatggcctcctccttgagtgtggtgccattcttgtgcgccgtctttgcaattttcgcagccttgtcgtaaccaatgtgcggattcagagcggtcaccagcatgagcgactcgttcatgatcttggcaatattctcgcggttcgcctggatgccattcacacagttggcagtgaaggtcctgctgccatcagctacaaaaaggaatagattcgattgatttggcgttccaccaagggtgggtaataggtagcttacacaatagccgaatggagcgcagcacattggacacgatcaggggcttgaatacattcagctcgaagtgcccattggatccaccgatggtcaccgccacctgattgcccatcacctgggcggagagcattgtcagcgactcgcattgcgtgggattcaccttgccgggcatgatggagctacctggctcgttctccggtagcgagagctcacccaaaccgcaacgcggtccggagccaaggaaacgaatatcgttggcaatcttcatcaggctaacggcgatcgtgttgagcacaccatgcacctccaccatggcatcgcgggcagccagtgcctcgaacttgttgggcgcggtaacgaagggcaggctggtcagctcggcgatctttgcagcgcacttctcggcgaatcccttgcgtgtgttcagacccgtacccacagcagtgccgcccagagccagctcatagacgcgcggcagacaggcatcgatgcgctcctgggcgtaggccaattgctgggcatagccgctgaactcttggcccagcgtcaatggcaccgcatccatcgtatgcgtg

SEQ ID NO: 8018 - DNA, 1613 bp, DROSOPHILA
atcgctcggaaacacagaaccaataataattgaaaatgctgaagcaaaacaatggtctgcatctggctaggcgcaatctctgggtggtttgcagtggcctccgtgccaaggattgcgacagtggcggtaagggcggcaagggcaaggagaatggcaagtttcgtacggagaaggacaccttcggggagctaaaggtgccggcggacaagctgtacggcgcacagacgatgcgctccaaattgaattttcccattggcgacataggcgaacgtatgccgatgccggtgatccaggccatgggcatactgaagaaggcatgtgccgaggtcaacaaggattacggactagatggcaaggtgtcggatgccgtatcctgcgcctgcgacgatgtcatttccggcaagctatacaaacagggtcacttcccattggtcatctggcaaaccggttcgggcacccagaccaatatgaacaccaacgaggtgatcagcaatgcggccattaagatgatgggcggcgaactgggcagcaagaagccggtgcatcccaacgatcatgtgaacaagtcgcagagctccaacgacaccttccccacggccattcacatttcggtgggcatggagctgaacgagcggcttgttccggcggttacacacttgagggatgccctcaagtccaagtcggatgagttcaaggacatcatcaagatcggacgcacccacttgatggacgcagttccgctgactttgggccaggaattcagcggttatacacagcagttgaccaacggtctggaaaggatcaagggctgtctgccgcgcgtctatgagctggctctgggcggcactgctgtgggtacgggtctgaacacacgcaagggattcgccgagaaggtggccaagcgcatttcggagctaacctgcttgcccttcgtgtcggcgcccaacaagttcgaggcactggctgcccgcgatgccatggtggaggtgcatggtgtgctcaacacgatcgccgtcagcctgatgaagatcgccaacgatatccgattgctgggatcgggtccgcgttgcggtctgggcgaactaatgctgccggagaacgagcccggtagctccatcatgcccggcaaggtgaatcccacgcaatgcgaatcaatgaccatgctgtgtgcccaggtgatgggcaatcaggtggcggtgaccatcggcggctccaacgggcacttcgagctaaatgtattcaaacccctggtcgtgtccaatgtgctgcgctccattcgcttgttgggtgagtcggaaatgtgttttccaagtggaaaaacatgcatacataaccttctcctcccagctgatggcagcatgaccttcagcaagaactgcgtggagggactgcaggccaacaaggagaggatcgacaagatcatgaacgagtccttgatgctggtgaccgcgctgaatccgcacattggctatgacaaggccgccctgatcgccaagacggcgcacaagaataagacgaccttgaaggaggaggcactgaagaccggaattaccgaagagcagttcaaggagtgggtcaatcccaaggagatgctgggaccgaagtgattcgct

SEQ ID NO: 8019 - protein, 523 aa, DROSOPHILA
MLKQNNGLHLARRNLWVVCSGLRAKDCDSGGKGGKGKENGKFRTEKDTFGELKVPADKLYGAQTMRSKLNFPIGDIGERMPMPVIQAMGILKKACAEVNKDYGLDGKVSDAVSCACDDVISGKLYKQGHFPLVIWQTGSGTQTNMNTNEVISNAAIKMMGGELGSKKPVHPNDHVNKSQSSNDTFPTAIHISVGMELNERLVPAVTHLRDALKSKSDEFKDIIKIGRTHLMDAVPLTLGQEFSGYTQQLTNGLERIKGCLPRVYELALGGTAVGTGLNTRKGFAEKVAKRISELTCLPFVSAPNKFEALAARDAMVEVHGVLNTIAVSLMKIANDIRLLGSGPRCGLGELMLPENEPGSSIMPGKVNPTQCESMTMLCAQVMGNQVAVTIGGSNGHFELNVFKPLVVSNVLRSIRLLGESEMCFPSGKTCIHNLLLPADGSMTFSKNCVEGLQANKERIDKIMNESLMLVTALNPHIGYDKAALIAKTAHKNKTTLKEEALKTGITEEQFKEWVNPKEMLGPK

SEQ ID NO: 8020 - DNA, 11328 bp, DROSOPHILA
actatctgctgcagcgaccgctctccaagatggtcagcttctattcgctgtcccagccaccgttgcccgatccggaactcttcatccgttggctccagctggccacctttatgccggccatgcagtttagccatctgccgtcggagtatcgcagtgatctggtcacccgggtggctcaggagttgaaggaggtgcgccagctgatcgtgattccgctgctcaagaagtacctcaatccgtcgatgaacgagggactgccgctggtgagaccgctctggatgatggatcctcacgatcccgcctgtctcattgtcagcgatgagttctccgtgggcgaggagctaatcgtggcgcccattctgcatgcgaatcgcgaggagcgcgagggtgagtttaagcaaccagttattagcaaatacttgataattttaagtttaatactttattaatttgtgcatatccatttggcagtttacctgccgcagggcgtgtggaaggacggtatcgatggatcgctgaggaagggcagtcgctggatgcacggctatcgggtgccgaaggacaagattgcctacttccgcaagatgccggacaatacgcggttctaggagcactgatataaactgatgcacctgatgcacctgatgcactgcatccattctcccagcagaacccatgtgatatcaactacatagagagaaagtgaaagagaagagaagagaatccggcaattccgcatacatctatctgtattgagtaacctaaatactataatattatatatcgataagcccgcgatcgtaatacataagatgccttatcgctagtgcctaagcgttatcctaagcctatgtaatttccatttttttttttttgtttttgtgcgtgcgtatagttagttaagtacatctgggatgatcgcttactcgctgaataaatatgttccataacaacgcactgatccttcggtggcgtcaataaatagggagtgtgtcctgtgctacttggtcctgcagatcggcagcgaggattcgcagggctccatttccgccggcttctgcaggtgaccacattcggcatcggccaccaccacatcgtgttcgtccagacagacgacggatcgccggcgctgaggtggcgccacaaatccaactggacgacaggtgaccggacaaaattgccaaggacctggccaccagtgggcaggacatggctggtcgccacatcctcgcgattgccgggccggtctcttgttcttggcgtgcgtccagcagggcagcgtatcacccaaggctatgagaagattgcgtttaatggacacgattcgttggaacggttcgttggactcacccttgccgttctcctggcagatgggctcacggtgctgcacgccaccgccgcagctggcggagcaggcggtccagttgctcaggcgccactggaactgcctgccagcggtcacattcagtgcgggcagggtgaactcgtagaaaatgccagcgttgctctcattgccgcgcacaatcgcctggaaaaacccgataaaattcttgctagaatgtgcaatatacaccactcacatataacgatatggaatgctggatgggctgaggtattgtgatggtctcctgctcgtcgacgcgatcgtagaggctctcggcgccagcgatctcaaactcgccgggcatggagatgaggctatccccgttcaaatagaatcgatccccgccgtcgcccgtggcaatggcaagaaagtgcggcgaattggccagctcgcggatgagaatgtgccgcgcccgtgccggtatggtgacgatttccacataggcgccatccttggcggcaaacggatccgtgtaggtctccctcaccggctggcactgatcgccagaaccgccgcagacaccgcaccgatcgtcctgcacctccgagtcgacgatccaatcgcaaccaactttctgaacaagacgcggttcgcgatcagttatcggacattggattcgcaataccctaccttgcagatgccgtcgatgcacatgttgttcgtgcccaaggtgcagggtgtcccgtccagcaccgtggcgccccagttggcgattatcgtgtcgtccacatcgctgcagaacagcttgcagggattatctaggtggaggagatatcgagatctcaactaagcatcgtatgctgaatgctgatgaacttactcttatcgaagaagggcagccacttgtaggtggcaccctggtagctgacattatcgaaccgagcgcattgctgcgcccggaaactgggctcctccgccggacacggccgcttccggcaaatcttgtaccgcttccgttcgccaatgcagaagacaccgccattggccggcaccggattgtcgcattcccgctgctgcgtggacacgccgccgccgcagcttcgcgagcactcgctccactcgctccaatcgccccatcccccgttgaccgccgccagctcctcgcgtcggacgcacttgccgttctggcaccacttgttccgaccgcacaatgtgcccggcgctgtgggccgcatgtgggtgacgcactcgccgttgaccttgcaccacagcgtcgagcagaattcgtggggggcggaacaggcgcccacctcgctgtccgtggtcaagttgaactgcaggcggcactggcccctcgcattgtatcgcatgcccggcagctcgcccgtgtagttgtactcatccaagggcgtcggcggatcgtccaggcactcgcccaatccctgactgcaatcgttaggttttcaagtttgtgagatggagtttcataaccagtagcagctacagagcatacaaaccgataagaagatacttactccaggaaatgtgtgatatacttgcggctgcagttcgaccagcaaacctgcagggtgtccgccccaaaagtgggcgtcatgatgtgcacaatgggacccacgcgcggatggcagccgatcttcgccgtatcgtggaacatcccgaagctgttgttgtggaaaaagaacaatccatttggttattgggaaaagacataggagattatggaaacaaagttgctaactgtcagtgagacagcacatcgctccaaaacctgattatttcaatggaataatagccaatttggagcaaatcgctggtaaacaagcagctatatccgattaatagcacataagcgaaaccaaaacaaaccacctgtttttgttttttttttcccccgcccagagagattccgattccggtcggcttacacaacccatcgccactatatcttggtcgctcgtggagatcggcgagatcggggagatcggagcggtcggatccgccgagggggcggtgagacaatcgcgtaccgagcacgctagactgactgacggcccctgggctgcactggcagaaaagcggagtgagttggaaaaaaaatattgcttatcagtggaaaaaacaactagtgtgaactaatcaactgagttcataaaggtacatacatacataggtagttgtaatcaatttagttcatagtttagtatagtatatatagtatatagctatctgatttctcgcagtgtgctctgacacagtaggcgacccacagccacggaccggccacttggaaactggaaaacttggcaacatggcacgaacgatcgatccaatccaatccaatcccatactatccgatcagatccattacgatccaagtccgcagctcttcgtcgccccacaaccccaccacccgataagtcaacgaaaaccggacccggctgtcgttgggtgtgagttggaatgagtcgtagtgtctgggtgtgccgacggatcgagattcgatgctgtgatcacggtgaatcacatggaatcacatgtaatcgtctaattgccggcaatagagcattttttgtaggtaatgaaggaggagaaggaggagaaggaggaggtggaggaggagagtgcacagtaacatggaattattgcataaatatccaataatttgtaacctgtgactatgacttgtgcatccccttgaaagttttgtggctccaacttagtacaacaaaccccaacatagcgccaaaaactatgctacgattattaaccaacaagttcttagtcatatttagcttataaaacaaagtttggtactatcatattgtgaaactcaaacgtagtgtttaaatcgaagtttgttaagttgctcatggttgggcatagattcatttgaaaccgtgacattaggtgactttcagtgactggacagtgactggacagtgactgggcggtcatctctgttgagatctcggtgcctcgactaattgagtttgaatcgagcaggaagccgccgggccaccacgaggtacatacatataaatcttgatctcggcactgaatctgtatctgaatcagaatatgtatctgaatcggaatatgcaacgcaggcgatcattgtcgctaaaaatgagacacacacgcaggtgtcaaagcatccgtcgcgtccacttagccgcctcgtttgaaatcgagcaacttggctgctggctcacttcgctggctggattcattcattaaacgaattggtctggccataaatcttgcccaggggctgggcaatcggaaatcgcatttggctagctgcgcgtggggcatgcgaattggccaacgtctggcgccgcaggtggcaatgcaaatcgctgccggctacctgttacacatgctcctcctgcctcgcgcgtagcagctttaattcaatttggagatcatacacttagttacttacttgtggcccagttcatgggtgatggtgtgcgagagcatgatgccattgtcctcgttcacgctgcacgattgcttcggcttgcacatgccacccacgttggccaggccgagagtcctgcgaatgacatggaggatatactcgttgtttcgaaaccccccattccatcgacttggactcacatgcagttgttggcgcagatgttcttccgcgtgatgagaatggccacgtcatggtgatgcggatccttttcgctgcccttgttcagtttgtgctgccaactaaggaaagatttcattgggaaaataaaaaaaacgaaggaatgttatgaatcccacctgcagaaccgatccaagttcttctgcgcattctgcgtgagattcagctggagctgggactcctcctcgtccagttggataatgcgcaccacaacgatctcgatggagttgccaatgctgggatccttgtacaatgcggacaccatgttcatgatggtcagcagatagccgttgaggtccctgtgaaacgccgacatggtggcatcggccacgatgagcgtctccacatgccgtggactgctgatggatcgcctgcgccggggaatctctgcgtgatccggctccgtttggaactgcgtctcgtacttgaacttggtgtgcggaactctgctgattttctgctgatgatggcggtacttgtgcttgtgatgatgatggtggtggtggtgatggtggcgcctaatttgacggcctccctggaccttcaccttgcccctggcctgccactccagtctcgtctccattcgacggcgtggctcccgcgtgccgcaattgctgacctcggctccggatcccgatttgccgccccgcttgcgcttgtttcgctttcgcaacgaatgctaatggatcgattatcaagggtaggtaaacaagtgatgggttagccaaccaaccttcggtttgacggaggagcgctggaagaccacgtgcggatgcccgttgaccggatgcggctcgtgctccttcgagggctcaatgaagtactcattgcctgccgtccggatgtgacccacctggcaaagagtgatcagttcgggcagaacacaaaagttcgggcaactcaccagtccggcgcatgtggagatggccacattggtggccggttggccgcgcacctttccatggaagtgacagttgaggtgccgcgttgtcaacggtgaccgagtgcgcagatcccgccggtggcgctccaccaccagattcggggccagaaagtagctgtgcgccataagctccagatgcagtgtctcgttcgccagcggcaacagcagatgcaggtccgccgcctgggtatcgtgttccgagttcaggctgcgcctctgccgatgccgccgatgatccagttcgtgtgcgtactccaattggtgggtcataaacgcaccatcgggatgaacgcgtcgtggcaccaccaactgcccctcacccgccaccagttcgtcggaatggagtccgtaaagcggacgtacgccaccgccttgcgtaaccacgaccagccaatagtggagcagcaggcccagccagcgactcctgatccacatcctgctgcacgtcatgctcctcaacccgatcctagtccacagccctagccgttatccaggcgttgtctcagcagcatggcagcggtcgcataatacggatcttgggctggtcaggagatcagcgctcgctgaaatggacaatgcatcagatgtatcatttaggattgtaatgattttcaaagtttacaccctgccgttttcagtagccaaatagatgatatttatgatgtttcgtttgttaatgaggcaatcaatctttgaagtactggtctcactgctgcggtttttttttttttttttgccgatcattgtggtttccatgtggatggacatggcgccaatcccaatcccacaagttgttgttgaagcaatcaaatccctcgatcccagcccaagcccaaccaaacccatctctagagacaatccgatctgggattatggcggattgtgtgtggcatacggaggccataaaaagaaagagcccacttccagatacaataaataatcggtgatttggctttttggctttttggcttttagcaaacgctttcgagatgaaacgcagacaatggatgggtggcgaacaaaaaatatggtagacaaaaaaagaagacacgggccataaaattaagcaaattttttgttgtttttttttttcttttggagtgcggcgcttcaaagacagcaacaacaataacagcaacaatacactatcaaagcaacacaacaacttaattattcaaaaaaattgacgcagtcaacggcgctcttcttatcacgatcacgatttgtaatttatgataaatgttggcaattccattaataaaatttaacaaaagctcattagcgccacagcagccgatttgcagtcgaaggagaagacaagcattagaatattagactccttttttttactcaaccaattcgcataccctgtaaatctgctactattaatattatttaatattagcaagagtaagtctgttgcatagtatcacttatatatggatttaagcaactacagcttagttatatcttcaatagtttggaaccatcaatagatatacatttcaacttcatagatacgccggtcagaaaggcgcagctactccgtcagtgcgatgaccttgacaatggcgcctagggagtgctcaggtgccgttcctaattccgaactcatcgcggccataatgatggccataaaatatgcgcttaaatattgggtataccccaaaattcccactcgaccattccgcccattcctgtttcgatttcgattctgtgttgccaatccgagtggcggtgaaacttgaaagactgcccccagccaaattagcaagcgccacatgtaatcgtatattaaaatgtggccattgtccagacatccatccgtccatccgtccatccgtttgtcccattatgctgcagtgcctcccgtttcgccggctcaatagaatggaatggaatggcgtggcgtggctgccagtaggcgccactcttaattatcaatcaatcaatcactgccgcccgacgactccctcaattgaatgtcagccaattgattgcagactgtctgccacgcccctcacctccaccgcccgatcgagattcacatatatgtatgtgtatatattatacaagccccccccccccccactacttttctaccccaggactcgctggcaaatccttgaagctataatttatgacttggttttcaagatcagagtcacacctttgaatacaaatagacagctagcccaattcgataacgatttgatgtgaatttcaggtacttcccctttattccaacaaaccggatagcatcagttggaataacttaacatatatttgatgcaagaattcattgagaagggcaaatttcgtggaacgacgaggcatgatctcatgtgcgctgggcatttctcctccaatatgcgatgcgtttgctttttcgggaatttcacttgaattcgattgccagtcgccggctcagttgatgaagtcaagatcgaaccatcatcaccacctacgcatattgattgtccagcgccactcttaactattttctatatcgttggcgtttcattatttggctcagttcggtctttaggcgatttgtcgaacatttatcactagatttgtcacctccgatttttttggtcagcccagccatcgatcatcgttgtcgaatttttatgctaatgaaagaccaaatcaagatcggatagatactcgaactcctcctctttcctggcggccacgaccacatacgagaaaagcgaaaaacaaaaatcaaaaaaaaaaaaaacaaaaaacaaaacaaaatagtaagaaaccgaccctctggctggcgaatttccgatttcactttggtggaggcctccagccgagaggcgaagcaatttgtacgcccaccatccatccagttggccagatcggatccaagaaagagcacccagcacccagagttccagagtttggatccagactaggccgccaaccggaccaaaatggatcgcgcagttggttgtggctgtggctgttttttgggggggtaagtattgggcgatcggagatcggggatgggggcatctttggctgtttggagctccattgatgtgtcttgccattcatgcattgtagtttcattgaggaactcagacgaacgcacatggagcaggcacacacggtttcagttttaaaaataccctacaaaacgaggtagttttggctacaaatacttaataagcctgcatagcatgaatcttttatatagtaatattcagttcgaaacaataaatactatttgaataatagtttcagaaattagtaaaactcaatttcgattgcactgatttggctaattacatgcacttgaagtcagcgagggtattaaaatgtcgtatcgcccaaatttgcttcctttctcgtttctttttcatttatggcattttttatgaatgaaatgaagcttttcacgtaaaacgacgattccatattgctcgctcggcttcgcttgggttgcttagttggctggctggctggctggttggttggttgggttccccatagctcccccgatctctgatcaccccccccccacccctgattatatgagggaggggggttttggttgccccgccctcgccggatcgcacgttactccgatgatttcgctcctatctgggggcacatttgaatctctatggcttcgctcgcatgtgggccgaaaatgtatttttatggcagcggcgtcgttcgatttattatttcatttgttttctgtttgtgttatttggcgtgtagtacacacatgtctgctggaaagagtctttatcttcactcatttttgtcttccgatttttttttttctgcttttcgcacagccatttctcatttcttggggatgttcctgccgttttttttttttgtatggacaggccaactggtcgcggccaaaatacaaaatacaaaatactacgaagcagatcgtttgaattcggtttatttgtcatgacattgtgggcatcttgccgcttgtgaccatacatgactggcggtttttttttttttattttcactgtttttgggagtcgcacttttttggattttatttctgttttgttgtctgcgcgataaaagtgtgtgtttttatacgatgctttcggttattcggttgagatcacacacaggaaattggctgtgctgcgaaaagggcgaaggaaaagtctgagatgccaaaagatactacataggtgaacctaacagttagatctatatgcaataagatatattgcctaacaatcgaagtaatctagaatgtaataaagtataatatatatataataataactatctatctaactaactatctcgatatcgcaacagtcattcgactatcagataccatcgctggatcgaagatacttcgcatacttcggatgccccgactcaccgattccgaattcgaactggaatccaattccgagaggcgccgctggtgaagcccgcaaatattttaaccgcaaacaaaagcaaaagcccgtcggcagcagtttagctttattgttattcttatttatttttttattatttcatttaggggcggcgattatagcgccaggtaggagaacccaggcccagacagccgctctttcacaacaatggccgatggccgatgatttcacaagtcgcgaaccgaggttcgcaggcacaggtaaaaaaaaaatatatatatataaatacccaaaacagggcagtaaaaaaagcaaaagacgcgttttcgaaaactccaatattacgatttgaaattcgagtcaatcacacacgcactggcacacacacacactcacaagccgagtttctttttttttgctctagctgtattgcagcgaagtctgtaactggtgctggtaaggatctaaggaaaactgtcgtattgtccacactttcaactggcgtttccgtttttcccggctttgcagcgttttccctaatatgtattttcacagcggctctctgtgggaagcgaggcacaagcagcgcgggtgaaaagatatcgtgcaaatacaaagtgtcgagagttgtgtgttgcttaaatagattttcctctcgatcggttcgaaccgcccggctcgacgtcgaacctgagccagtgttgccaaattggctattcaaaaaatctaaaaaaaaaacaaaccataaaattaatttgaattctttctaaaaatagttgaaatattaatatttaagaaaattcgatctctttccataattatgataattatagttctgcttagcctgaaaggtttaaagcccttcgaattgcaaaaagtatgctacatttatttcatgggttcaggatttcaggattaactctatcaagaatttgagtgctactattcctggccagttaagtcggtccgaaagaagcacttgctc

SEQ ID NO: 8021 - DNA, 3237 bp, DROSOPHILA
ccgaagtatgcgaagtatcttcgatccagcgatggtatctgatagtcgaatgactgttgcgatatcgagataatgtggatcaggagtcgctggctgggcctgctgctccactattggctggtcgtggttacgcaaggcggtggcgtacgtccgctttacggactccattccgacgaactggtggcgggtgaggggcagttggtggtgccacgacgcgttcatcccgatggtgcgtttatgacccaccaattggagtacgcacacgaactggatcatcggcggcatcggcagaggcgcagcctgaactcggaacacgatacccaggcggcggacctgcatctgctgttgccgctggcgaacgagacactgcatctggagcttatggcgcacagctactttctggccccgaatctggtggtggagcgccaccggcgggatctgcgcactcggtcaccgttgacaacgcggcacctcaactgtcacttccatggaaaggtgcgcggccaaccggccaccaatgtggccatctccacatgcgccggactggtgagttgcccgaacttttgtgttctgcccgaactgatcactctttgccaggtgggtcacatccggacggcaggcaatgagtacttcattgagccctcgaaggagcacgagccgcatccggtcaacgggcatccgcacgtggtcttccagcgctcctccgtcaaaccgaagcattcgttgcgaaagcgaaacaagcgcaagcggggcggcaaatcgggatccggagccgaggtcagcaattgcggcacgcgggagccacgccgtcgaatggagacgagactggagtggcaggccaggggcaaggtgaaggtccagggaggccgtcaaattaggcgccaccatcaccaccaccaccatcatcatcacaagcacaagtaccgccatcatcagcagaaaatcagcagagttccgcacaccaagttcaagtacgagacgcagttccaaacggagccggatcacgcagagattccccggcgcaggcgatccatcagcagtccacggcatgtggagacgctcatcgtggccgatgccaccatgtcggcgtttcacagggacctcaacggctatctgctgaccatcatgaacatggtgtccgcattgtacaaggatcccagcattggcaactccatcgagatcgttgtggtgcgcattatccaactggacgaggaggagtcccagctccagctgaatctcacgcagaatgcgcagaagaacttggatcggttctgcagttggcagcacaaactgaacaagggcagcgaaaaggatccgcatcaccatgacgtggccattctcatcacgcggaagaacatctgcgccaacaactgcatgactctcggcctggccaacgtgggtggcatgtgcaagccgaagcaatcgtgcagcgtgaacgaggacaatggcatcatgctctcgcacaccatcacccatgaactgggccacaacttcgggatgttccacgatacggcgaagatcggctgccatccgcgcgtgggtcccattgtgcacatcatgacgcccacttttggggcggacaccctgcaggtttgctggtcgaactgcagccgcaagtatatcacacatttcctggatcagggattgggcgagtgcctggacgatccgccgacgcccttggatgagtacaactacacgggcgagctgccgggcatgcgatacaatgcgaggggccagtgccgcctgcagttcaacttgaccacggacagcgaggtgggcgcctgttccgccccccacgaattctgctcgacgctgtggtgcaaggtcaacggcgagtgcgtcacccacatgcggcccacagcgccgggcacattgtgcggtcggaacaagtggtgccagaacggcaagtgcgtccgacgcgaggagctggcggcggtcaacgggggatggggcgattggagcgagtggagcgagtgctcgcgaagctgcggcggcggcgtgtccacgcagcagcgggaatgcgacaatccggtgccggccaatggcggtgtcttctgcattggcgaacggaagcggtacaagatttgccggaagcggccgtgtccggcggaggagcccagtttccgggcgcagcaatgcgctcggttcgataatgtcagctaccagggtgccacctacaagtggctgcccttcttcgataagaataatccctgcaagctgttctgcagcgatgtggacgacacgataatcgccaactggggcgccacggtgctggacgggacaccctgcaccttgggcacgaacaacatgtgcatcgacggcatctgcaagaaagttggttgcgattggatcgtcgactcggaggtgcaggacgatcggtgcggtgtctgcggcggttctggcgatcagtgccagccggtgagggagacctacacggatccgtttgccgccaaggatggcgcctatgtggaaatcgtcaccataccggcacgggcgcggcacattctcatccgcgagctggccaattcgccgcactttcttgccattgccacgggcgacggcggggatcgattctatttgaacggggatagcctcatctccatgcccggcgagtttgagatcgctggcgccgagagcctctacgatcgcgtcgacgagcaggagaccatcacaatacctcagcccatccagcattccatatcgttatatgcgattgtgcgcggcaatgagagcaacgctggcattttctacgagttcaccctgcccgcactgaatgtgaccgctggcaggcagttccagtggcgcctgagcaactggaccgcctgctccgccagctgcggcggtggcgtgcagcaccgtgagcccatctgccaggagaacggcaagggtgagtccaacgaaccgttccaacgaatcgtgtccattaaacgcaatcttctcatagccttgggtgatacgctgccctgctggacgcacgccaagaacaagagaccggcccggcaatcgcgaggatgtggcgaccagccatgtcctgcccactggtggccaggtccttggcaattttgtccggtcacctgtcgtccagttggatttgtggcgccacctcagcgccggcgatccgtcgtctgtctggacgaacacgatgtggtggtggccgatgccgaatgtggtcacctgcagaagccggcggaaatggagccctgcgaatcctcgctgccgatctgcaggaccaagtag

SEQ ID NO: 8022 - protein, 1054 aa, DROSOPHILA
MWIRSRWLGLLLHYWLVVVTQGGGVRPLYGLHSDELVAGEGQLVVPRRVHPDGAFMTHQLEYAHELDHRRHRQRRSLNSEHDTQAADLHLLLPLANETLHLELMAHSYFLAPNLVVERHRRDLRTRSPLTTRHLNCHFHGKVRGQPATNVAISTCAGLVSCPNFCVLPELITLCQVGHIRTAGNEYFIEPSKEHEPHPVNGHPHVVFQRSSVKPKHSLRKRNKRKRGGKSGSGAEVSNCGTREPRRRMETRLEWQARGKVKVQGGRQIRRHHHHHHHHHHKHKYRHHQQKISRVPHTKFKYETQFQTEPDHAEIPRRRRSISSPRHVETLIVADATMSAFHRDLNGYLLTIMNMVSALYKDPSIGNSIEIVVVRIIQLDEEESQLQLNLTQNAQKNLDRFCSWQHKLNKGSEKDPHHHDVAILITRKNICANNCMTLGLANVGGMCKPKQSCSVNEDNGIMLSHTITHELGHNFGMFHDTAKIGCHPRVGPIVHIMTPTFGADTLQVCWSNCSRKYITHFLDQGLGECLDDPPTPLDEYNYTGELPGMRYNARGQCRLQFNLTTDSEVGACSAPHEFCSTLWCKVNGECVTHMRPTAPGTLCGRNKWCQNGKCVRREELAAVNGGWGDWSEWSECSRSCGGGVSTQQRECDNPVPANGGVFCIGERKRYKICRKRPCPAEEPSFRAQQCARFDNVSYQGATYKWLPFFDKNNPCKLFCSDVDDTIIANWGATVLDGTPCTLGTNNMCIDGICKKVGCDWIVDSEVQDDRCGVCGGSGDQCQPVRETYTDPFAAKDGAYVEIVTIPARARHILIRELANSPHFLAIATGDGGDRFYLNGDSLISMPGEFEIAGAESLYDRVDEQETITIPQPIQHSISLYAIVRGNESNAGIFYEFTLPALNVTAGRQFQWRLSNWTACSASCGGGVQHREPICQENGKGESNEPFQRIVSIKRNLLIALGDTLPCWTHAKNKRPARQSRGCGDQPCPAHWWPGPWQFCPVTCRPVGFVAPPQRRRSVVCLDEHDVVVADAECGHLQKPAEMEPCESSLPICRTK

SEQ ID NO: 8023 - DNA, 4236 bp, DROSOPHILA
cgctggacgtcattggggaatcaggctgagggtcgagacccgcacaagtgctcctccttcaaggttgtctcatataacatcctggcccaggatctgcttctggagcacctcttcctgtacgtgggaatcccgcatgagttcctcagctggcaacgccgccagcagaaccttctcagggaactgctcaaactggatccggacatactgtgcctgcaggagatgcagttcgaccaccttccagtgctcgtccaacgactgcgtatgggcaacggcaagaagttggcttatgtgtacaaaaagaagaccggctgtcgaacggacggatgcgctattgtctacgactcctcaaagtttgagttgctagaccaccaagcagtggagctgtacgaccaggcggtggctctactcaatcgcgacaatgtggccttgtttgccaggttccgattcaaaaagcagcaggagcagcagaaggaattcgtggtcgccaccacgcacttgctgttcaacacgaaacggagcgatgtccgttgcgcccaggtggaaagaattttggaggagctgcagtcgttctccaccgacacacctatcgtcctgactggtgactttaacagtctgcccgactcctcgcctattgaattcctcgttggcaagaatggggatgtggattccacagcttgcccagaacccctgcatttcgagatcatcgattcgggcgaaggtactgcctccacataccagaacgaatgggttatcgtggactacatcctgcgctcgctaggatcgcggagcaggcacaagctcttgcctctcagcgtctactcactgccctcaatcaaccggtgcatcggggcgggacagatccccaattaccgtctggggtcggatcactacgccttgggtgcagtattcaccgttgtctagtatttaatctcttcatgctttcttggactcatcaataaaggtacgaaatgaacatgcccacttattataaagtaaaagattaagggaagggactcacctgaaaggttctaactgcgtgctcatcgctagcctccagcttggccctgatgctgctgagcagatagcccattttagtgatggtgacgtcctggtcgagatccttgtgatacgagcgataggtggtgggtgatgttgctgctgcttgaaagtccagcttgcgggctctgtttgcacggggcagcttcttcggaggcgtcggtgccttcaccttgcgttcgaaatcgaagtacggctgctctgtgtccagctgttggcgggtggatgtggtcgtacccgagggcgtggtctgcatgggggagtggtagcttcccggcggagactgtgactgcaggtccagctgcgaggtagatgtctgtacgccaatggtgcactgctggggagtgaatctgtgctgatccagctgcgtgtgcacctcctgattagacttcttcggcgagacgaagcgcaggatcttctttttggagttgttcagaaagttcttggacttctttccaaggttcttcggtttgttacccttccaaggagatagattgcgccactgctcgctccagatgaacttctggctagcctgacctcctgccgtgttaactcgactgggatacttgatgggcgtctccttgtgcaccatatttgatgccaggttctcggaaacacttccgtcaacagtgtccaaggaaacctttggcactacgggctgtggctgtgctttaggcatttgccatccaatggctacttgcggttccgccggtgtcctaaactcgctggctgtcttgccctcgtagttgagcatatcggtgatcttgggctctgtccagccaagaataacctccttggtgggcgctcctttccgcctactctcctgccgaatattccggtcgtaatttgagccccgcttggattccactacgcgctcaatgtcactgagcgaggggcaggtgggcagttgcttgttgctcctgggatgcctgggcttctctacctcagctaaagaaagacgcaaagctcgtaaaaacatcgaaaaccaaggaaccaattaatgaaaccgtaagccaaatgtttggatacaaaacactttatttggtaaatacatttgatttttggtaaaaatagtttctatttggttacggtttcattttctagggcttacgggtataacttacccatggggaacgatctgcgcttgctgtcttttttgagcgatggttccagcttgctcgtaggcacctgaacgccacgtttgcgcagaaactcgtccagcactcgctcggcctcccgcaccgaaggattcgtggaggtgagcgaggattgcgatagcttcccgtccagactttgggagctgcgacgcggcggcttcggaggcggcagctgcgagttccgtgccttgaagctgacttgaccctgcgagaggcgcttctgcagcaggcgtccacctgctccggaactgcgtcgagagcgggaactcctgcgacttggcggctcggtggccagctcttctttctcctgatcttcctccacagcggattcctgttcgctgatgttagacaaaacaggagctgagggcttataggctatgggctcataggaaagcattttagtaggctctctctgtgtgctcctgtgccggcacctggagctagaatctgacagtttgtggcggttcacgcgcacttcggacaccacacagttgtcgtgcagctcctggatgatgtgtataagcggttcatcctcgccggccacggctctcaagcgactgacagcagttaagggagttttcaagccagaatttatgctggccggctcgcttcgacgaagtttctccgcctgctgccgctggctaccgagattgttctgcttggcgggctgtaaaatgtgagtttaatgagggaactgtagcgggctggttagtggcttaccttggcgctctcagatcgcctgctgcgccttggtagtcgcacgtgctggtcacgtggcggtgccgtggagccgcagtctccgctgtcgctggtgaagcagtagcagaagccgttctggcacggcttccccttgcgctcctgctccttgttgcagcgattctggttgattaggtccgcatccgtggttctgcggactcggggaagttgtcgggacatgttgatgtggttattgttggtctcgcagtcgcgactttgagtggacacacggcgaatgcggcgtgccctaaactcgtcgatgcactcctgcaaactgaacgacgatgtggaaccagactcggcggaatcctcctcctcctcctccccctcttcttcatcaactagaacatgtttggagaactttgagcctacaaaagtctggaggccaatatgctgttcatttgcacttgtgattaaatagcgatttaatgcttacggtggccattttgcagtctatgtatttatggagctgattagaccagctgcatgtgctccacttttacacgttgcacgctttctactccgcttctacttcgtgtttttccaatcaaatgaaaagcgacgcctcgcctgcatttttgttttccgctttgtgccgcttcttctttatcagcgaaagagagagaggagagagtgcataacagccctgtcttgcgtcagagattgggcaattggctggtataactcaggcagcactatattcatatgcttgaaattgttattatttatacaattgttcaaatgggctttactatttattatttaattcagcgcggaataggttcatatttaaaagaggatgtgctagagattaattatgttccaatgtaagctggggttataggggttatagctataaaacataatgtttctagctaactcgtcatctctggtcagagagaatcagctgtttgcggcatgctattacgtcgtctcttatttggaattgtaaaaaatagttaaaaattgttttgaattaaaaacaaatacagaatgtcaaacagccacttgttcttgaagtccggcttcccccgtgcacccctgcaaaatggattgggacgctatgtttgtcagctccagcggatcaccctgaagttctgcaagaataatggatccagcagaggcatgcggtaagcaaaatccttaaatgtttacatataaagtaaaattaatcatacgaaacgttcaatagcgacttcattgagaatcacttgctggactttgccaaagagaatcccgggattgtggtctatgtgaagcccaggcg

SEQ ID NO: 8024 - DNA, 2007 bp, DROSOPHILA
gagtgcatcgacgagtttagggcacgccgcattcgccgtgtgtccactcaaagtcgcgactgcgagaccaacaataaccacatcaacatgtcccgacaacttccccgagtccgcagaaccacggatgcggacctaatcaaccagaatcgctgcaacaaggagcaggagcgcaaggggaagccgtgccagaacggcttctgctactgcttcaccagcgacagcggagactgcggctccacggcaccgccacgtgaccagcacgtgcgactaccaaggcgcagcaggcgatctgagagcgccaagcccgccaagcagaacaatctcggtagccagcggcagcaggcggagaaacttcgtcgaagcgagccggccagcataaattctggcttgaaaactcccttaactgctgtcagtcgcttgagagccgtggccggcgaggatgaaccgcttatacacatcatccaggagctgcacgacaactgtgtggtgtccgaagtgcgcgtgaaccgccacaaactgtcagattctagctccaggtgccggcacaggagcacacagagagagcctactaaaatgctttcctatgagcccatagcctataagccctcagctcctgttttgtctaacatcagcgaacaggaatccgctgtggaggaagatcaggagaaagaagagctggccaccgagccgccaagtcgcaggagttcccgctctcgacgcagttccggagcaggtggacgcctgctgcagaagcgcctctcgcagggtcaagtcagcttcaaggcacggaactcgcagctgccgcctccgaagccgccgcgtcgcagctcccaaagtctggacgggaagctatcgcaatcctcgctcacctccacgaatccttcggtgcgggaggccgagcgagtgctggacgagtttctgcgcaaacgtggcgttcaggtgcctacgagcaagctggaaccatcgctcaaaaaagacagcaagcgcagatcgttccccatggctgaggtagagaagcccaggcatcccaggagcaacaagcaactgcccacctgcccctcgctcagtgacattgagcgcgtagtggaatccaagcggggctcaaattacgaccggaatattcggcaggagagtaggcggaaaggagcgcccaccaaggaggttattcttggctggacagagcccaagatcaccgatatgctcaactacgagggcaagacagccagcgagtttaggacaccggcggaaccgcaagtagccattggatggcaaatgcctaaagcacagccacagcccgtagtgccaaaggtttccttggacactgttgacggaagtgtttccgagaacctggcatcaaatatggtgcacaaggagacgcccatcaagtatcccagtcgagttaacacggcaggaggtcaggctagccagaagttcatctggagcgagcagtggcgcaatctatctccttggaagggtaacaaaccgaagaaccttggaaagaagtccaagaactttctgaacaactccaaaaagaagatcctgcgcttcgtctcgccgaagaagtctaatcaggaggtgcacacgcagctggatcagcacagattcactccccagcagtgcaccattggcgtacagacatctacctcgcagctggacctgcagtcacagtctccgccgggaagctaccactcccccatgcagaccacgccctcgggtacgaccacatccacccgccaacagctggacacagagcagccgtacttcgatttcgaacgcaaggtgaaggcaccgacgcctccgaagaagctgccccgtgcaaacagagcccgcaagctggactttcaagcagcagcaacatcacccaccacctatcgctcgtatcacaaggatctcgaccaggacgtcaccatcactaaaatgggctatctgctcagcagcatcagggccaagctggaggctagcgatgagcacgcagttagaacctttcaggtgagtcccttcccttaa

SEQ ID NO: 8025 - protein, 639 aa, DROSOPHILA
MSRQLPRVRRTTDADLINQNRCNKEQERKGKPCQNGFCYCFTSDSGDCGSTAPPRDQHVRLPRRSRRSESAKPAKQNNLGSQRQQAEKLRRSEPASINSGLKTPLTAVSRLRAVAGEDEPLIHIIQELHDNCVVSEVRVNRHKLSDSSSRCRHRSTQREPTKMLSYEPIAYKPSAPVLSNISEQESAVEEDQEKEELATEPPSRRSSRSRRSSGAGGRLLQKRLSQGQVSFKARNSQLPPPKPPRRSSQSLDGKLSQSSLTSTNPSVREAERVLDEFLRKRGVQVPTSKLEPSLKKDSKRRSFPMAEVEKPRHPRSNKQLPTCPSLSDIERVVESKRGSNYDRNIRQESRRKGAPTKEVILGWTEPKITDMLNYEGKTASEFRTPAEPQVAIGWQMPKAQPQPVVPKVSLDTVDGSVSENLASNMVHKETPIKYPSRVNTAGGQASQKFIWSEQWRNLSPWKGNKPKNLGKKSKNFLNNSKKKILRFVSPKKSNQEVHTQLDQHRFTPQQCTIGVQTSTSQLDLQSQSPPGSYHSPMQTTPSGTTTSTRQQLDTEQPYFDFERKVKAPTPPKKLPRANRARKLDFQAAATSPTTYRSYHKDLDQDVTITKMGYLLSSIRAKLEASDEHAVRTFQVSPFP

SEQ ID NO: 8026 - DNA, 4529 bp, DROSOPHILA
gtgtcaacggatcggcgctgtatgtgaccgagatcggaaccaatcaccagacgaaccgagtgtggaagtatgtgctggcctgagcctaagcctaagccaaacccgaatcccgaatccagaaggacacgacttgcactgcgctcctgcatatccttagacccatagactcatcccaactagttatcagcagaaacagaaagagaaccacaatcagagccgaatcaaatacagattatagcgatcctaagcctaagcagagcccacacaccaagtacagtttaacgtgaccagttgtcagatcaatagagaatagtcagtgcttaagtaatgtacaagttaagtatgtaaattgcttggaaacaataccacaacaaacataacctcagactcttatgttttgcactttaatgagcaaacaaaaacgaaatgaaaacgaaattacaaagcagcttaaatagtacatatacttaaatgtaatagttacgcgtaggcactaactaggcacgaatgtgaggatgtggggacgcgagcatggataaccgatttcgcagataaccgggggcaaccagcgcatataacatacttgtgtatcatattgtaacctatatcaaatatataatcgtatctgtatcttatcaacttatcgtagcccatgtaaattatgtacgtaataaactgttgttgttgtgacgtgaacgccaaaagtgagcaggactctggggactcagatgcttcacatggttcagtttgaatgactatatcccgctaagggaagggaatgttgactctcatacatatgatacatagggctatgaaacggaagtggtaaatctatacctttcttgctaatttcagacttaaattgaaaggagcgacacgtttgcatggcaaacaatatacaattagtggaaagatctaagcacaatttaaatataaccaaatataaatagaaaactttaacacatataaaaataaaaattgtttggcaatgcacgagctgtcaagaggagcccagccagtgcctggcgaatgcgatagcctcatttaggtggattagccattccgagagctccgcttgcgtatcggcagcaaagaagactctccccgattcgcaatcagaattccttccttgcagcagaaaacttctcgcccgagcacacaactcccggggggctgcagctatcagggattgtccgagtccaggcaactccagcgtgaaaatcgggatatcactttccagattatcctcatgttgccaaaccgataaccgaacgccatccagactgcaccatctgcgattccagttgtgttggctcttcggatcctgaacatttaggtagccagagaagcgggtcttgggcagccgtaagtccactctgccagtaatagatatggcaggtcccagattcgtggatttggtgtgcgtggtcaggggaacttgccaggagcgtgaactgcgcaggcagattttgtcgctggatctcgactcattggacaccagttgaaatggcgacaggtccacagctcgcagatggaaagaggcatgtaagcgaaagcgcgacatgatttgctcaccaccagagcccgcagaacagctcgagttggcggaacctaagtttccgctgccacgacgctgtaaggtaactcattagcgaactgcctctgaggacaactgaagctacttaccagagacttggcaggctccaaggccagagtggaaactttgcgcaggcggagcatgaagatttgacagcgcagctccaaggagtccgcattttctccactgtagaactccaagccacagtctcgaaagaaggcggagccattctggcactcaacggattgagtggatctaatgcgtcctccgcactcaaaggtgcagatatagtggtagttgaagaacatatcccggctgacgtccgccctcactggcagttccatggcgtcgatcagcaggcactgggatttcctccgtgcagccaatgcttcatcattcaattggcaaacgggtggagtcgattttcgcaaggtagagaagagcaacagtcgctccgcctccaccatctctgcagagatctccaatgtcggcatctgccgacatatgctcacagcttgggccagctgctcgtttgggttcaaggaatcgtttagcaaggaatccacgttgaagttggcatagtaggtgctgctatccagctccccatccgtctgattcgattggtcccttgagagattgaggctctgagccaggcgttgcttctccgccagaaagaagtcttttcccttgcggtacgaacgacgaagggcattcttcagtaggcggtagcgagcgagagcgctgactgacatcagctggctgtcactgggattgggcatcgtctgcatcagctcacccaaactgctgctgttgtgcaggacagtgggatccactgcctgcgaggcctgcgcctgctgtggcgttgtggggcaactgatgctcagattgttaccaaaatggcgcagcgacgtggcttggccatcattaatttctatggtcaaattggaagcgggctgaaagatcaatcattactcagtttcaacaacaatcttatatttgaagtgcgtttcagaaagcgatggatgagtacagtgtggtagtggctatttacagaatgtacagtgtcagaaatcagatgcaagcggaagccttaagctttagtgggagtcaacaaaaatctctaccttggttgtaaagcgctggctctgcttctttttcggcgtactctggttggccggctcaggttcaatttgcccggagccgtaatcgttggtcacgaaggagctgccggcgctgcccgctccaaccaaactgtaatctgcgtagagctgctcgggcatgtcatacgaaacggaatccatattggaagtattctgtaatgggctttggcttagaaatgtgacaaattgtaaaaactgcaatggcacttacattgggcaccttttctgggcgatccaacaccagttcactgcggcagagattgtccaagaagatctcgctgcgctgcagagagagttctgaacgagaaagattccggttctgcttgggcggcgaatgctgctcactgatattgttcaaggattggtgggcatgtggcgaaggcaactttaacttcggctggcgaatcacagaggactcagtggtctgactagctgagcacgaggattccgttccactcggctcctcgggcagaggcatgaactggaagaagttgccgttcttcagggattcgtggagaaagtgacccaaagctacaggctgctgaggagcagttgattgtggtgaaaccatctgggtgcttagctgcgctggattcgactgggtgcagcttttaggttgtaccgcctgatcaagaacaatatgtgttgttataggcggcgaaaaggaatgagtacttttctgtggctgaatagcttggaaactaatctgaggcttatccactggcttcatttgcggtgagttcttcggcgtcttttgcaccctggcgtacatggcactgatgtcatcgcgcgaggtcgacggagcaggcacagacccactcacatacgcggtggagctttccgtaggagtcggcgtgtggtctataatctgtgccgcggtcctaacctcgtggtggggactccctctaatccgcaggcagtcttcctcaatctccgagtaaatgggctcgctgtcgaaatcgcgctgttgccgtgtggtggccaacgatgtggttgcaccactgctgggtccgtctgtgcagtcgtagctctcggtttgaagatggctgatctgaggctcatggcggtcaaagcgggagcagtcctgcaatcgattgaaattatactcttattattgaaatacaaaccatattaacgatatatttataaaagaagagccttattacttggatcaataaaccaatgattaactaaatctatttgaccagaaagttagtaagaacgaatcttgcaatgctacttcgagatacacttttttaaatttcgatagaccgagtaccgccccgttatcgatatcagctgcaatgcagcccagcgaaggaaggcgcaaaacaagaagtgaaaacagctgacagcagcagatttctttcctccactcggaaattcagacgccatccaaaaacactaaagaaacaagaggctttcaaggggaccaggagctcgggcttatggggaggcgcacctggtgagatgtacaggtctctgctgcacaacgtttcactcaaggcgacatcaaggattatcaggcgcagcgtgagcagccaggcaaaaggagccagcggaaagcgcaaacaaaaagcgaaggagatggagtcgagccacgatcggaatagacgctggacgtcattggggaatcaggctgagggtcgagacccgcacaagtgctcctccttcaaggttgtctcatataacatcctggcccaggatctgcttctggagcacctcttcctgtacgtgggaatcccgcatgagttcctcagctggcaacgccg

SEQ ID NO: 8027 - DNA, 2247 bp, DROSOPHILA
atgtacgccagggtgcaaaagacgccgaagaactcaccgcaaatgaagccagtggataagcctcagattagtttccaagctattcagccacagaaaagtactcattccttttcgccgcctataacaacacatattgttcttgatcaggcggtacaacctaaaagctgcacccagtcgaatccagcgcagctaagcacccagatggtttcaccacaatcaactgctcctcagcagcctgtagctttgggtcactttctccacgaatccctgaagaacggcaacttcttccagttcatgcctctgcccgaggagccgagtggaacggaatcctcgtgctcagctagtcagaccactgagtcctctgtgattcgccagccgaagttaaagttgccttcgccacatgcccaccaatccttgaacaatatcagtgagcagcattcgccgcccaagcagaaccggaatctttctcgttcagaactctctctgcagcgcagcgagatcttcttggacaatctctgccgcagtgaactggtgttggatcgcccagaaaaggtgcccaataatacttccaatatggattccgtttcgtatgacatgcccgagcagctctacgcagattacagtttggttggagcgggcagcgccggcagctccttcgtgaccaacgattacggctccgggcaaattgaacctgagccggccaaccagagtacgccgaaaaagaagcagagccagcgctttacaaccaagcccgcttccaatttgaccatagaaattaatgatggccaagccacgtcgctgcgccattttggtaacaatctgagcatcagttgccccacaacgccacagcaggcgcaggcctcgcaggcagtggatcccactgtcctgcacaacagcagcagtttgggtgagctgatgcagacgatgcccaatcccagtgacagccagctgatgtcagtcagcgctctcgctcgctaccgcctactgaagaatgcccttcgtcgttcgtaccgcaagggaaaagacttctttctggcggagaagcaacgcctggctcagagcctcaatctctcaagggaccaatcgaatcagacggatggggagctggatagcagcacctactatgccaacttcaacgtggattccttgctaaacgattccttgaacccaaacgagcagctggcccaagctgtgagcatatgtcggcagatgccgacattggagatctctgcagagatggtggaggcggagcgactgttgctcttctctaccttgcgaaaatcgactccacccgtttgccaattgaatgatgaagcattggctgcacggaggaaatcccagtgcctgctgatcgacgccatggaactgccagtgagggcggacgtcagccgggatatgttcttcaactaccactatatctgcacctttgagtgcggaggacgcattagatccactcaatccgttgagtgccagaatggctccgccttctttcgagactgtggcttggagttctacagtggagaaaatgcggactccttggagctgcgctgtcaaatcttcatgctccgcctgcgcaaagtttccactctggccttggagcctgccaagtctctgcgtcgtggcagcggaaacttaggttccgccaactcgagctgttctgcgggctctggtggtgagcaaatcatgtcgcgctttcgcttacatgcctctttccatctgcgagctgtggacctgtcgccatttcaactggtgtccaatgagtcgagatccagcgacaaaatctgcctgcgcagttcacgctcctggcaagttcccctgaccacgcacaccaaatccacgaatctgggacctgccatatctattactggcagagtggacttacggctgcccaagacccgcttctctggctacctaaatgttcaggatccgaagagccaacacaactggaatcgcagatggtgcagtctggatggcgttcggttatcggtttggcaacatgaggataatctggaaagtgatatcccgattttcacgctggagttgcctggactcggacaatccctgatagctgcagccccccgggagttgtgtgctcgggcgagaagttttctgctgcaaggaaggaattctgattgcgaatcggggagagtcttctttgctgccgatacgcaagcggagctctcggaatggctaatccacctaaatgaggctatcgcattcgccaggcactggctgggctcctcttga

SEQ ID NO: 8028 - protein, 748 aa, DROSOPHILA
MYARVQKTPKNSPQMKPVDKPQISFQAIQPQKSTHSFSPPITTHIVLDQAVQPKSCTQSNPAQLSTQMVSPQSTAPQQPVALGHFLHESLKNGNFFQFMPLPEEPSGTESSCSASQTTESSVIRQPKLKLPSPHAHQSLNNISEQHSPPKQNRNLSRSELSLQRSEIFLDNLCRSELVLDRPEKVPNNTSNMDSVSYDMPEQLYADYSLVGAGSAGSSFVTNDYGSGQIEPEPANQSTPKKKQSQRFTTKPASNLTIEINDGQATSLRHFGNNLSISCPTTPQQAQASQAVDPTVLHNSSSLGELMQTMPNPSDSQLMSVSALARYRLLKNALRRSYRKGKDFFLAEKQRLAQSLNLSRDQSNQTDGELDSSTYYANFNVDSLLNDSLNPNEQLAQAVSICRQMPTLEISAEMVEAERLLLFSTLRKSTPPVCQLNDEALAARRKSQCLLIDAMELPVRADVSRDMFFNYHYICTFECGGRIRSTQSVECQNGSAFFRDCGLEFYSGENADSLELRCQIFMLRLRKVSTLALEPAKSLRRGSGNLGSANSSCSAGSGGEQIMSRFRLHASFHLRAVDLSPFQLVSNESRSSDKICLRSSRSWQVPLTTHTKSTNLGPAISITGRVDLRLPKTRFSGYLNVQDPKSQHNWNRRWCSLDGVRLSVWQHEDNLESDIPIFTLELPGLGQSLIAAAPRELCARARSFLLQGRNSDCESGRVFFAADTQAELSEWLIHLNEAIAFARHWLGSS

SEQ ID NO: 8029 - DNA, 2015 bp, DROSOPHILA
aatcgagatgtggaagaatgtctccatctaaccggagtcttccctgtttacagctccattgtggccatcgccggagatgactttgccgtaattgcagcggacacccgcctgagcagcggctacaacattcactcgcgaacgcagagtaaactctttaaactctcgccccagacagtgttgggttccgcaggctgctgggcggacacgctctcgttgaccggatcgattaaggtgcgcatgcagagctacgagcatacccatctgcgcaccatgaccactgaggccgtggcccagatgctctccatcgccatgtacaatcgccgcttcttcccgtactacgtgtcgaacattctggctggaattgacaacgagggcaagggcgtcgtctactcctacgatcccatcggtcactgcgagaaggctacataccgcgccggcggcactgccggcaccctgctgcaaccggtgctggacaaccagattggtcacaagaacatgaatttggaagacgccgacaagatcaagttaaccaaggagcgggccgtgagcgttgcctccgacaccttcatctctgccgctgagcgcgacatctacaccggcgactctgtgctgatcaacatcataaccaaagatggaattgaagtacgaactctgacgctgcgtcaggactagcctgtggcgaggatgttgccgtttcttttggttaggggcattcggtggaaaccaggcattctaagttagttggcttcaaatttttgtatttacccaaaacaacaaaacatcgtaataaaccgaatctttgagatttaaaatatgcggcctagtgtgaccagctggtcctagaaataaatcgttcccaagcagtgctcacagaagaggctgtgcgaatagtacagctttccccgtaccaacaaatccattttgctagctaagtttgtgcccgctggtgtgcgttaacaaaatcatttcttagtgttcgtctctcagagaattcagtccaatgacgagtttcgagtttgcactgctgccgcttctgtttttgccactgatcctggaaaacccgctaacctccgcccaaatgatgtcatcgctggtgaagccgggcattttccggcacctaatgtgccgcaacaacatgtatccgcgcagctcagtcctccggtacccagtttccgacgaacaggtcttctggtcggagccgttcccggactactgcccgcctgcgtacacggcgccacatattggcgggcaggtgtgggctgatccgccgttgcccagcgacacattctggccacagtggaatcagctggatggacaggtaaaccgcgaatcctttcacggtgcctacaacgtgcagaatggactgcccctaaatccgatcgggcgtaccggactaaccggacgtggttcgctaggcagatggggtccaaatcatgccgcagatccaatcgtcacgcgctggaagcgtgacgaccaaggagcaattgtggccaacccgacaaccggcaagtaagttggcccaatagcccattaactgtgatgacatcacttcctctttcctgcaggaatatcatacagatggttgccatacagcggtccgacaacaagttgtgggccattcccggtggaatggtcgatcccggcgagaatgtcagtgtcacccttaagcgggagttcaccgaggaggcattgaatttcacggacaaagccaacatggttgagcgattttttcaagcgggaggcgttcaggtataccaaggctacgtagacgattttcgaaacacggacaacgcttggatggaaaccactgcgctgaacttccacgatgaagacgggagccaggtgggacaattggagctaatggccggtgacgatgcctccaatgtgcgctggacggacgtcgactcgaatctcaagctgcacgccaatcatgccgacatagtccgtgaggttgtcatccgacgaaatgcacactggtagaaactagactgaaactataagagttaagatcaact

SEQ ID NO: 8030 - DNA, 924 bp, DROSOPHILA
atgacgagtttcgagtttgcactgctgccgcttctgtttttgccactgatcctggaaaacccgctaacctccgcccaaatgatgtcatcgctggtgaagccgggcattttccggcacctaatgtgccgcaacaacatgtatccgcgcagctcagtcctccggtacccagtttccgacgaacaggtcttctggtcggagccgttcccggactactgcccgcctgcgtacacggcgccacatattggcgggcaggtgtgggctgatccgccgttgcccagcgacacattctggccacagtggaatcagctggatggacaggtaaaccgcgaatcctttcacggtgcctacaacgtgcagaatggactgcccctaaatccgatcgggcgtaccggactaaccggacgtggttcgctaggcagatggggtccaaatcatgccgcagatccaatcgtcacgcgctggaagcgtgacgaccaaggagcaattgtggccaacccgacaaccggcaagaatatcatacagatggttgccatacagcggtccgacaacaagttgtgggccattcccggtggaatggtcgatcccggcgagaatgtcagtgtcacccttaagcgggagttcaccgaggaggcattgaatttcacggacaaagccaacatggttgagcgattttttcaagcgggaggcgttcaggtataccaaggctacgtagacgattttcgaaacacggacaacgcttggatggaaaccactgcgctgaacttccacgatgaagacgggagccaggtgggacaattggagctaatggccggtgacgatgcctccaatgtgcgctggacggacgtcgactcgaatctcaagctgcacgccaatcatgccgacatagtccgtgaggttgtcatccgacgaaatgcacactggtag

SEQ ID NO: 8031 - protein, 307 aa, DROSOPHILA
MTSFEFALLPLLFLPLILENPLTSAQMMSSLVKPGIFRHLMCRNNMYPRSSVLRYPVSDEQVFWSEPFPDYCPPAYTAPHIGGQVWADPPLPSDTFWPQWNQLDGQVNRESFHGAYNVQNGLPLNPIGRTGLTGRGSLGRWGPNHAADPIVTRWKRDDQGAIVANPTTGKNIIQMVAIQRSDNKLWAIPGGMVDPGENVSVTLKREFTEEALNFTDKANMVERFFQAGGVQVYQGYVDDFRNTDNAWMETTALNFHDEDGSQVGQLELMAGDDASNVRWTDVDSNLKLHANHADIVREVVIRRNAHW

SEQ ID NO: 8032 - DNA, 4009 bp, DROSOPHILA
ttttgattatgcccggttttggtacgccgcatacctcggatacttctacgcacaacaatgccaaatccccgaccccaaaatccagtagctccacgtatctacccaatgccccttacaccgcaggatcccctcggaaaacccaatccaatccaagccaagccaaaccaaccccacgccccattgatagccgccaagtttgccgtcacatcaaatatttattgcgagaagggagcgaaacaagttggaacgaaatagtcgaaaattcggaatttaaaatttaactacgactactgcagaacttttcgcggttgcaatacattaaggtcgacagcgcacacctcaatgagactaatgactttggtataatttctaatggctagaagagtaggcaggaatctaaagctttatttaaatattatgtagacagaaagttaattaaaaatcgaataattatgttgctttaacatattgatttaaatattttattttacttgcaacttcgttggatttttcgcaactaagccagccgttttattcattggatacgtcgtagtaacctaaccaaatctggcagtcatacattttaatctcgactaagccattcctaatttcattataataacttatgcaagccgtggcaagaggagaaactcaatcagctataaatatgcgtggaaggaaacaacatcagcttaaaaccaaaatgaatcttaaactgagtgttcttcttttcttagtttacaactttggcgtgaggtggtcatttgcaagagcgggagaaaaatagcttactttttaatttgacggctaataaaattaataaaattatttccttggagttttattaatattacatagttgaaaaaaatgtttgctactattaagatgacattctagtgctattgaagttattattaatgcataaactttgacagcacgtgatgcacaagaaaggcgcagttaatcaagaggtatttaaaagtatgatattccatattggctaggacctcctttccctgagacgaaggtgcagaccattgtctgatttaagggttaggaccgcggatagaatgggatcgtatttgtggcgccctgcctcgcgtttcaacttttcgtctggggcgagacccaggtaggtatttaggcgaccatccgtggagaccagttcatcaactgctggaaggacctcaaaggaccgcaccacctttgatataactgtcttaagttccaggagcgcgaacttttggccaatgcagtttcgtggcccggcactaaaaggcaaatactcaaagggagcgggtttctcctcctcaaatcgctccggacgaaaatgatggggatccttgaagatgcgatcgttgtagcccagcaggatgagagccaaattcagagttgtacccttgggcactatactgccatctaaacagggggggaatttggaattattattatttttttaaatatataagatacttactgatatcataatccttatcgcagtatcgccctataaatggaacgctgggataaacgcgctgcgcctccttaataaacagatctagatatttcattttggctatctcctggaaactgacacttctgttcatatcatgacccatgacttcacattgctcccgatacaatttcctctgcatattcagacaatgagtacccaaaatgaatgtggaataaataaactaaaatacctggacatcgggatgtcgcgagagaagatatacggagaacgatactcccgaggtggtcgtgtcgtgtccttcaaacataaaggtggatacctcctcgtagatctcctgtcgtgtgagaggacgaccgtcaatggtggaggatagcagggtgtctaaaaatgccatcttctttcgtggcaacgatggatcgtggtcctccttagatcctccattctggagagcatatactcgtttttcgatgatgtcatacgtaaaatcttgaagtgtcttcaaagttttttgataggctgaaaactcaggtgttaaactaaacacgcgattggagcgcttaaatggatgaaatgctctcatatttatattgtaacacatactaaaaataatgttgcttttagtaaatttaaatgttctgtaaagctactttcgagaactcactctctgaatgcctggacaatggaggagtcacgctgttccatggcattgatgggcactcccatcgccgtgtcacagatgacatccaaagtaaggtagttggcatgctcctggaaatcaatgatagtgtctcccgcgctcgccttcttcaactgagtcataaactttgcggagttctcgttcatcacctcgtggaagtcctgcaggatgttgaagtggaaggatggggtgatcatcttgcggtgtttatgccatttactaccaaaactcgttagaagaccatgacccagccatggatgcagtagatcgtagatggtggatttttgtatcagttgctgactgttcaaaatgtactggcgaaagttgcatacgctaggataagattatcttacagtaaattctattgtacttacctccaattgcttgggattggtcatcacaatgtgggaactgtatccgatccagaagagaaagttatcttttccgtagtcgtaccaccaatcaaagaatgtagacagtatttctgtgaaaagcagtaaagcagtcgcgattaggatcagattgatctttggccattcgacctgcgtatttcgccacaccagatgtcgttctatcagccggttatagtacaactgataacacccactaaatcattatcagtgcgacgcgtagactgggagccgagcctccatgcctggatgttttggaactgacctgccggatttttgccaatccgattggcgttgcccaaaatgggcaccggagtgggtccattgaattccttgagcagttggcgccgttgcgatgccttccgttcaaagtacaccaatgtgatcagtggcagaaccagcagagccaacacagcgagccacatatttatataaacctgttcccgtagaaccaacgaaaactgaaccgatcgcagctggagcagattgaagaatcgcttgcgccgctcgcttttatagccaagccaggttattcagctcgctccggattggtccactcaccgattagacaagcgaaatctcccgactcttcctagtcgcactgcaatcggttctagcctggcctcgggaaggtatctctgttgaatcaacacagtctggcgggtcaaagtccacatttccccgcacatttatcagattgcatgcaccatgagatcgtaaacgctagaaaaacaatgtatggtcaaaaatcttacagcgctatggacctttgagcccactttcgatattcaatatttcaattgcaaaaccagataatatttattaatcttctgaataagagtattgcaaaattggcgatgccgaacatcaatgtcaggtttttgaattttttcttatttttttatgtctggccccgtggactttgtacttatttgtttatctatcacacagacgtacggcagacggtatgaattagtaatctcgtatcagcgaggggctcggcatatacgagaagctcagccagaagttccatcacatgccaggcctccaaaaatggtcattagcgattaatttttcggctagtcaagcatcccagatctggacacgacagggcaaaatagagttggggttggcccaaacaaatggtcagaagtcagaagccactaacaaaagaggtataactcttatatgcataacaatggtatcggcaggcgattttcctcattcccatcgacatgggcatatgtttttcgaaggaggcagcttaataaagcatataatatgagaattaatcaaagaccacgcattgggttctcgcctgcgtgggtgaactggacccgtgacacgaatccccggagatgaaccatacagaattccttgctgggagttgagcacatgactttcgtgaaaaattgcccgccaaac

SEQ ID NO: 8033 - DNA, 1581 bp, DROSOPHILA
atgtggctcgctgtgttggctctgctggttctgccactgatcacattggtgtactttgaacggaaggcatcgcaacggcgccaactgctcaaggaattcaatggacccactccggtgcccattttgggcaacgccaatcggattggcaaaaatccggcagaaatactgtctacattctttgattggtggtacgactacggaaaagataactttctcttctggatcggatacagttcccacattgtgatgaccaatcccaagcaattggagtacattttgaacagtcagcaactgatacaaaaatccaccatctacgatctactgcatccatggctgggtcatggtcttctaacgagttttggtagtaaatggcataaacaccgcaagatgatcaccccatccttccacttcaacatcctgcaggacttccacgaggtgatgaacgagaactccgcaaagtttatgactcagttgaagaaggcgagcgcgggagacactatcattgatttccaggagcatgccaactaccttactttggatgtcatctgtgacacggcgatgggagtgcccatcaatgccatggaacagcgtgactcctccattgtccaggcattcagagatatgtgttacaatataaatatgagagcatttcatccatttaagcgctccaatcgcgtgtttagtttaacacctgagttttcagcctatcaaaaaactttgaagacacttcaagattttacgtatgacatcatcgaaaaacgagtatatgctctccagaatggaggatctaaggaggaccacgatccatcgttgccacgaaagaagatggcatttttagacaccctgctatcctccaccattgacggtcgtcctctcacacgacaggagatctacgaggaggtatccacctttatgtttgaaggacacgacacgaccacctcgggagtatcgttctccgtatatcttctctcgcgacatcccgatgtccagaggaaattgtatcgggagcaatgtgaagtcatgggtcatgatatgaacagaagtgtcagtttccaggagatagccaaaatgaaatatctagatctgtttattaaggaggcgcagcgcgtttatcccagcgttccatttatagggcgatactgcgataaggattatgatatcaatggcagtatagtgcccaagggtacaactctgaatttggctctcatcctgctgggctacaacgatcgcatcttcaaggatccccatcattttcgtccggagcgatttgaggaggagaaacccgctccctttgagtatttgccttttagtgccgggccacgaaactgcattggccaaaagttcgcgctcctggaacttaagacagttatatcaaaggtggtgcggtcctttgaggtccttccagcagttgatgaactggtctccacggatggtcgcctaaatacctacctgggtctcgccccagacgaaaagttgaaacgcgaggcagggcgccacaaatacgatcccattctatccgcggtcctaacccttaaatcagacaatggtctgcaccttcgtctcagggaaaggaggtcctag

SEQ ID NO: 8034 - protein, 526 aa, DROSOPHILA
MWLAVLALLVLPLITLVYFERKASQRRQLLKEFNGPTPVPILGNANRIGKNPAEILSTFFDWWYDYGKDNFLFWIGYSSHIVMTNPKQLEYILNSQQLIQKSTIYDLLHPWLGHGLLTSFGSKWHKHRKMITPSFHFNILQDFHEVMNENSAKFMTQLKKASAGDTIIDFQEHANYLTLDVICDTAMGVPINAMEQRDSSIVQAFRDMCYNINMRAFHPFKRSNRVFSLTPEFSAYQKTLKTLQDFTYDIIEKRVYALQNGGSKEDHDPSLPRKKMAFLDTLLSSTIDGRPLTRQEIYEEVSTFMFEGHDTTTSGVSFSVYLLSRHPDVQRKLYREQCEVMGHDMNRSVSFQEIAKMKYLDLFIKEAQRVYPSVPFIGRYCDKDYDINGSIVPKGTTLNLALILLGYNDRIFKDPHHFRPERFEEEKPAPFEYLPFSAGPRNCIGQKFALLELKTVISKVVRSFEVLPAVDELVSTDGRLNTYLGLAPDEKLKREAGRHKYDPILSAVLTLKSDNGLHLRLRERRS

SEQ ID NO: 8035 - DNA, 2916 bp, DROSOPHILA
taaatgatatacatcattttatatcatcatttatatattttatttttagctatatatgctttatatagttcatttcaatcaattaatgatttcatttatttacaaaaacaataatttttcgattacatttttctgttagcagtaaacggccactctagcacactatactagtaaatccgagaaaaacatctgcttccaagtttgtttgtttgtttgttccttgaaaccaggacgccatgtcgaatccgcaggaagaactactgccgcccagcgccgaggacgacgagctgaccctgccacgggccagcatcaacaagatcatcaaggagctggtgcccacggtgcgggtggccaacgagagtcgcgagctgatactcaactgctgctcagagttcattcatctgatcagttcggaggccaacgaggtgtgcaacatgcgcaacaagaagacgataaacgcagagcacgtcctggaggcgttggaacgcttgggttttcacgactacaaacaagaggcggaggccgttctgcacgactgcaaggaggtggcagccaagcgaaggcgccagagcacgcgcctagagaacctgggcattccggaggaggagctgctgcgccagcagcaggagctgttcgccaaggcacgcgaggagcaggcgcgcgaggagcagcagcagtggatgagcatgcaagcggcagcaatggtgcagcgaccaccgctggcagacggctccgttgccagcaagccaagtgaggatgacgatgacgatgacgacgacgactactagtaggaaatagtctttctatgagcttagtgtagatttaatcttaaaatatatgccataagttgaactttcaactattagctactcttcattacggatcatccgtttgtccttcactccagcagcctgggcaccgcatcctcaatctccgaaacgacttccttagatgtatcgtaactttaatctttaaaaatgcaagactattcgttattatatcagctggtaccagccagattttgtggctcctccgcctcattgtcatccttgccatttatttgcatctccaccaatcggggaaaagtttgtggtgcgtcgtatgtgcctggcacatattttcccaatatttcggtgtgttccttccagaactgcgaagatatcagatcctcgtgcagcggcaccacggcctgcctgctcttctcacccaatatcacgcgttttctcagcagaatcgttccctttctgtacattgccggcagattgttgtaatttatcccgaattcctggaagagcagctcatttttgtccgccgaaaaggtgccacggagtttcgcctcggcttgctggttcgtcaggcctttttccaaaacgagtttccaaaaggcggtattgtacaggttgttcacatgcacatcggcctgtcgccagctgagatagtcctttagattctgctccgaaggatacagaacaacgcgaccatcgaaacacggagcataggccaatggcagattcatccacttggaccattgcattacatagctcgaggagaacaagctggtgacgtaggtgagcagtttggcggatcgtcgcttgaacgctgccgtctctttgcgaaaaacaaaggagtactcatcactttgaccgtaggcgaggacaatatcccgaaactcctgcatcaccgccgtggcagcagcattcatcacattgagagctaaagcgaatatttaatgggattattaagaactataatgagtgttttttcttaccattttcatcgttgggcttttcaaaatcgtgcgtcttggagaacttgtggaactttttgccgtctattcgtatgactatccacacattaggcagtatgctgtcgtcctgctcaaaggatttaacgtactcgaatctgctgcaggccatgctgcgttttggaaaattccgggcaagggaataattcaataatttaacaaatttattcaaagttccaagcaaccgcatttaaaaagttaagaaatgcatgagttaccaacagctgattgatgttttccattaacagcactgttaactagtgcttgactagtgatggaacttttaaaatctgtttagctttaatcttaaaagtagctaatgaggatggtttagagaatattggtttataaaaaattaattaggaagaaaaataaatttaaatctaaaatgtatatttcttattctgaatactttccgcgcgaaataacatcgagtgccgatagcactcgtgcactcattcctaactgacccgataacttcgataggcaacgactgttggtcatccggcaaaacagaaaattaatagagactatgagtcttaattacgaacaaaacgcggcagacgagcagttcgcccgcgcacacaaagcagtcagcctgtcggacgacgaggagagcgagggccaagcggagaccacgtctgcaccaaatcaggagccgcatgttagtaaatcaccgagggagtactacgatgagcctggcgggaagggcaatggaagtggagcagatgatcaggatgagccggaaacggaggctgccagcggagcggccaacacacatgtggtggcacaccactacaacgagctgaaggaggcgggccgcaaggatcgtcagaagtcaaagatattcttcatgaggaactttaacaactggatcaagagccagctgatcaacgagtatatgtcgcagattaagcagaacaaacgcatgggtgatgctctcagagttctggacatgtgctgcggcaagggcggtgaccttctcaaatgggagaaggctgccatctcccacctcatctgcaccgacatcgctgaggtgtcggtggagcagtgccagcggcgatatcaggacatcctgcagcgatcggagaagtcgaaatttgcgaataagt

SEQ ID NO: 8036 - DNA, 861 bp, DROSOPHILA
atggcctgcagcagattcgagtacgttaaatcctttgagcaggacgacagcatactgcctaatgtgtggatagtcatacgaatagacggcaaaaagttccacaagttctccaagacgcacgattttgaaaagcccaacgatgaaaatgctctcaatgtgatgaatgctgctgccacggcggtgatgcaggagtttcgggatattgtcctcgcctacggtcaaagtgatgagtactcctttgtttttcgcaaagagacggcagcgttcaagcgacgatccgccaaactgctcacctacgtcaccagcttgttctcctcgagctatgtaatgcaatggtccaagtggatgaatctgccattggcctatgctccgtgtttcgatggtcgcgttgttctgtatccttcggagcagaatctaaaggactatctcagctggcgacaggccgatgtgcatgtgaacaacctgtacaataccgccttttggaaactcgttttggaaaaaggcctgacgaaccagcaagccgaggcgaaactccgtggcaccttttcggcggacaaaaatgagctgctcttccaggaattcgggataaattacaacaatctgccggcaatgtacagaaagggaacgattctgctgagaaaacgcgtgatattgggtgagaagagcaggcaggccgtggtgccgctgcacgaggatctgatatcttcgcagttctggaaggaacacaccgaaatattgggaaaatatgtgccaggcacatacgacgcaccacaaacttttccccgattggtggagatgcaaataaatggcaaggatgacaatgaggcggaggagccacaaaatctggctggtaccagctga

SEQ ID NO: 8037 - protein, 286 aa, DROSOPHILA
MACSRFEYVKSFEQDDSILPNVWIVIRIDGKKFHKFSKTHDFEKPNDENALNVMNAAATAVMQEFRDIVLAYGQSDEYSFVFRKETAAFKRRSAKLLTYVTSLFSSSYVMQWSKWMNLPLAYAPCFDGRVVLYPSEQNLKDYLSWRQADVHVNNLYNTAFWKLVLEKGLTNQQAEAKLRGTFSADKNELLFQEFGINYNNLPAMYRKGTILLRKRVILGEKSRQAVVPLHEDLISSQFWKEHTEILGKYVPGTYDAPQTFPRLVEMQINGKDDNEAEEPQNLAGTS

SEQ ID NO: 8038 - DNA, 3092 bp, DROSOPHILA
ttaacaccgggaataggcggccggaaggcggagcagcctgtggccaggtagattttatcgtacttcaccacgtagccattgctgcagtgcagctctttctgagcggtatccaacttctcggcggcgactccttgccacagttcgatatcgtactctttgtagaactcctcgtcgcggaaccgcagctgctcgatctcaaggttcatagccttggagatcttaacgcgatcgtagggcagatagtcttcgcggcacacaaagattaggcgcccagtaaagccctcctgtcggatggtttccacggctacagcgccagaaggaccaccgccaaccacgatgaacactcgctgatcgtcgggcttgcgtcggaccatgttcttgagtcgcttgttattcaccagatccgatcgctttgcacggagcatcacctgtccctcgttacccacttccacgcgataacatggcagggaatcgagaccaggaaagtcctcaatgtctccgttttccaggttaaagcaagcgccgtgccaaggacagcggacacgacccaaacccaaagctccagtctggagcggagctccgtaatgggtgcacttagcacccactgctagcagacgatcgttctgcttcacgagcagcacgcgggtgtcctcatcgaagtccacctgcttcatttcgttctccttcagatccgtaactctgcagtccacggggaccgcacttgtgtactccgaatccggcgaagactcttccgtcgacatggttgtactgggactctggttgctgcacttggactggtaggaacccacggcaccacctgccgaagccatcatgtaaagagacaagcaaagagaaacggagataacaatacagataagaagagtgtgtaggtgaatggacacatcaaaattttccagtttttctccaagggtccaagggaaattctggcaccgcttgctgctcaggtagaaacaacaaaaaacgaatatcagtcgagaaaatgcttcgctcgcgttcagaagtctttgtgtgtttgcttatgatcctgggatcagttctggtccgttcgaatcttgggaatcctcaggaactggagctaagtgcgctgcgcacccacaaacagctattgcaggcggagatcgcacgtctttttttagagcagccgcttcgagcggaaactcaacttctgctggaagatctacagctaagagatcatcaaataggcgttcagatagaaaagctcgaggaaatctccaagggcgagaccacgcagaggctggccatcaatctaacggctgactttgaacacctgcagcataaattggatgatttgaaacgacaacttgagctgctcgacggacgctttgcctcccaagggaagcaactggaaggacactcgtcggaaggcgcatcgccggctggccccggattaggttcctttttgtggggacccttgctgaccatgccagagtttccacagggcagtgtggccagcgaccagcaacataaccaccaccagcaggatcattccccggatccgcagcaggattccagtccctctatcattaaaagagtgctggacatgcttaggccatccataggagtatcaggtctgcggagtcgttggactgaatccgcaaaatcagctgcaacgggcttggcaacacctaagcccactcacccacttagtgctgaggagctcctaccgcagctgcaggagcagcgcaggtttctggacgatgctattacgcgactggagctcttggccgtcaagaagggctcgaacaaaaactaaaatatgtggaaaatctaagtaaatcaaacacttaaatccatctatccaaaagttgagctttgagattaaacagaggatcaatatttatttacttaaattgccagagatcatcattcataaccagattcgttgagtcactgtcaaaaattcagagaaattatactataccaaataagtaaagttcgtttcataatgatttgtgaccatttccgaaaacaattgaactaaaattagattgaacagtcaccttaatgaaaagtctaaagcaataaatactaactatctttaaaaccatgatatgtaattgtaaaattgtgtgtgtcagggcacttattttaagcaacaccgaggatagggtagcagctgcctaattgccatcgatggttacctgaccacaacaaagcggatcctagcgacaagtccgaatcgattgactcatccgacctactgcaatgtcacgtcaactaggcatacctaagaacctcaagttgctacgtcatcaagaaaagccaggcggtgaggaaaacacctattgtataaagcgtaaccgtaacacctgtaaacgtgtgtcggttctgttctgatatggcgataatgtctacacgcccctatctcaagtgactggctttatgatgtatggtaatatggtatcgctggtatatgtatcgccgatatgcccatgatagaggagctgatgattcggctttttgcggacggaggcgtgctgatcggaaatcaaacatttccatcgaagcagcaaacatgaaaaacagcaagtcatgaattacccagcgaaacagatgtagggacaacttttccatcgagtcggttaacttcgaccctgcactgtacatttgccaatctctttcagttctctcatctaattagcaatgattcgccatgttaataacacagctgcgttttccacacacacacggacgcgtatacatgggagcaaaccaaaccggttggccttgtccaactcaagtgagtcaaaagccaggccaaataataataataataacaattgcacgagaacaagtttcaccgaaatatataactcacaaaatcgggtatcacagaaaaggacggacaggccgcagctaagagaacgttccgtctgatattaagagcttgccggcagttggcgaacgaatgaactggagaccgccgttggagcagccaatttaagcgaactggggcctcattggagagcccaagagaacgaatgcaagacatggcaatagacaataggcaggcacacaacacagacgaaattccgatggcggtgactaac

SEQ ID NO: 8039 - DNA, 1092 bp, DROSOPHILA
atgcttcgctcgcgttcagaagtctttgtgtgtttgcttatgatcctgggatcagttctggtccgttcgaatcttgggaatcctcaggaactggagctaagtgcgctgcgcacccacaaacagctattgcaggcggagatcgcacgtctttttttagagcagccgcttcgagcggaaactcaacttctgctggaagatctacagctaagagatcatcaaataggcgttcagatagaaaagctcgaggaaatctccaagggcgagaccacgcagaggctggccatcaatctaacggctgactttgaacacctgcagcataaattggatgatttgaaacgacaacttgagctgctcgacggacgctttgcctcccaagggaagcaactggaaggacactcgtcggaaggcgcatcgccggctggccccggattaggttcctttttgtggggacccttgctgaccatgccagagtttccacagggcagtgtggccagcgaccagcaacataaccaccaccagcaggatcattccccggatccgcagcaggattccagtccctctatcattaaaagagtgctggacatgcttaggccatccataggagtatcaggtctgcggagtcgttggactgaatccgcaaaatcagctgcaacgggcttggcaacacctaagcccactcacccacttagtgctgaggagctcctaccgcagctgcaggagcagcgcaggtttctggacgatgctattacgcgactggagctcttggccgtcaagaagggctcgaacaaaaactaaaatatgtggaaaatctaagtaaatcaaacacttaaatccatctatccaaaagttgagctttgagattaaacagaggatcaatatttatttacttaaattgccagagatcatcattcataaccagattcgttgagtcactgtcaaaaattcagagaaattatactataccaaataagtaaagttcgtttcataatgatttgtgaccatttccgaaaacaattgaactaaaattagattgaacagtcaccttaatgaaaagtctaaagcaataaatactaactatctttaaaaccatga

SEQ ID NO: 8040 - protein, 264 aa, DROSOPHILA
MLRSRSEVFVCLLMILGSVLVRSNLGNPQELELSALRTHKQLLQAEIARLFLEQPLRAETQLLLEDLQLRDHQIGVQIEKLEEISKGETTQRLAINLTADFEHLQHKLDDLKRQLELLDGRFASQGKQLEGHSSEGASPAGPGLGSFLWGPLLTMPEFPQGSVASDQQHNHHQQDHSPDPQQDSSPSIIKRVLDMLRPSIGVSGLRSRWTESAKSAATGLATPKPTHPLSAEELLPQLQEQRRFLDDAITRLELLAVKKGSNKN

SEQ ID NO: 8041 - DNA, 2264 bp, DROSOPHILA
taaatagcgtaacgccgaaaaataaaactgtaccgagagtttcgaatttaacatagccacatttagacattctgggcctagagatccgctatcctattatacagatatgtttaaccattcgtcgatcctccgcgaagtaatcccccttcctttccagaccctttttttcgatatccatttaactagttgttgtatttaaaatttgatcgtttttgaaacgagatatcccttcaccgccttgacctgccacgccccttttgcgccccaaaaaaaaaaaactgaagattcacaatgagttttgacttaaaaatgtaattccacgcaaaattcatgaaaagaacgaaaactaaatactgcataaaaataataataattcatagtgataattgtctgtgcatccttcggcatggactctactatatatacactgatatatatatatagaaagagcaagagaaagaaaaagagagagaaagcattcaacacacacacacactacacacatgcatacgtacatagttaaaagggaagtaaaacaagaaacaacaacattgcaagcaacataataactatacgattattataatttatattattcccaaattaaagataacagccaaacaaatcagcagtttttccactgtgggcggtggttttctcagggggcgtgcagctcccccctgagtcatgtgcaaaaaatcgtgccagggcggcaacctcacccaaaaaacgtcgatcaagggctggggagatgattcacacgctgggaatgccaccgaaaccaaaagagatttcaaatcacgtttcaaggtgtgcctaaatgagtaaatgagtccattccaggactcagcctgctgtaggaatcccatgaaggagttttcaaatgtgtgcaggcttctactttaatcgttgtcgactaggttttattacaattatcttaataaatgaattcgagagttcttaggctagctacatatgtatatattaaggatggctacatctatcgtcgcttcttcttctccagcttacgaatcttgtgcaggcgcgtccggaccggctcgccctcccgctccgtcacttcgccggactccggattactttggccatccgggttattctccatcaatactgcggccgaaatgcaaacgaactggaagagagcacccacataaagcccgtatcggattagcaagctgaagatgtcctcgtcgccgtacttgtccagggctgcggcggcgcccagactgtccgcggaagccgacatcgctgcgctggtattgtttataaacaaaacccgcgaggattagacaaaaaaaaataacaactacaaaaagtttgttttttgtattgggtagagatggtaccctgaaccaacagttcaggtggaaactatcgataacttttttaggtcaaagttttaaggttgttagctcattaacggcaagtatttaaaggcttgcacaaaatcttcgcttgattttatttaaattcaattacctggattattaaatacattttataaagtttaacactagtgaaataaatatcccatccccaacacattcttcagggttaccgtttaaggtatgttcaaaactttatggtatattccggagccctacaaaagtcttggtattttttcacactggtctcatagtcgcggctgataagtcgctaatttttgcataatattaagtataagtcaaaacaaacgtgcgaattatgtcatgtattcggctagcgtctgccaccgttctggcaggggtccgtcccccgccggcagcaagcggaggtggagccttgcgcctgttgactaaacggaatccggatgctgcattcgcacgccgccagtttgctgtagcggttgaaaacggcggaggcagaaagaagccgaatggaactttcaagctcgcagttttgggggccaccgtaggcgcggccaccggatcggtgtatacgatgtaccagcggtggacagacggcagctcgcacaaagagcacgaggagacgaagccgacgcggctggacgggattccggctggagtgcggataaccaagcgctatgtcaaccccaaggacacgtccggtttggacattgtgctgttccagttccagacgtgtcccttctgttgcaaggtgcgcgctttcctcgactacatgggcatatcctatgcggtggtcgaagtggatgccgtcctacggcaggacatccgctggtcgtcggtgaagaaggtgccgatggtgctcatccgacagcaggacgg

SEQ ID NO: 8042 - DNA, 264 bp, DROSOPHILA
atgtcggcttccgcggacagtctgggcgccgccgcagccctggacaagtacggcgacgaggacatcttcagcttgctaatccgatacgggctttatgtgggtgctctcttccagttcgtttgcatttcggccgcagtattgatggagaataacccggatggccaaagtaatccggagtccggcgaagtgacggagcgggagggcgagccggtccggacgcgcctgcacaagattcgtaagctggagaagaagaagcgacgatag

SEQ ID NO: 8043 - protein, 87 aa, DROSOPHILA
MSASADSLGAAAALDKYGDEDIFSLLIRYGLYVGALFQFVCISAAVLMENNPDGQSNPESGEVTEREGEPVRTRLHKIRKLEKKKRR

SEQ ID NO: 8044 - DNA, 7336 bp, DROSOPHILA
gaagaacagactagatagcccaactagacgactgcggtcagtacaataccttcgaagttcagtgcaggcgttctccacgtcgttaatcctcatcctggttacgaacagttcctgactgatgtcgaaagctcgggagcacagcatggcagttcgtgactcgaagaggtcagatttatccagcgcctgaggaggaactgcttttactacaaacagtggtcggacgaatctttacaaaccagattcctgagctggcggttccgctcctcaagaaattgggtgcgcttctggacatccgccagctgctgggacatcccagtcggtacagtattctgatgatgtaggtcgacaccatgcagcgaggataaatcactcagcggaagctattcgccgacaaagtggtaagttagtacaccccacatgaccattttcaaaagccataccgtgtgctgggtcctacccagctttgtggtaaacaattggaggcctgcgttaagcagggatcgctgggaactccgactaggtgaggccatcgattctagagttacgttcctaatttggaatttcggtttgaacgcgaacaattagttagactgtgtaaaaataagcaagtgtggaaagtacggaaatactcacggataaaaccgtttgtaagttaacgggtgaagcgaggagctaacgaccttgtttgaaattcatcaataggaaaaaagccaaaactattgttttaaatacgaaacgttaaaattctttatttagcaaaagtaaaccaatacgccattgtgtggcaagggaatgaaacgcttacatctttgatctcttgggccaaaagtggcaaccgcggcgggaactcaaggaagtccccacaactacaattataaatatacacagatatagttacacgtttatagagttttgcatacgagtacccataataaatactcaacgattgcatgaaaatataacaacaaatctcagcggtaatacacattaagttgattatttagcgaacttggggcaacggctggccaagcttctttgtccagtcctcacgggtggccgggtcttcgatctggccacgaccgaggcacttgccctgcgagattagctcggcaaactgggccacaatcggatcccggccgcacgaagccaccgctgtcaccgtatccgcctcgttgatgaagtaggccacaaacttaaagtcctccatgctgccgtcaatgatcacatccttgtaagagccatgcccggcataccgaattcccttgccgaagatgagggtgaaaaagaagggcacggcctccagcttctttaccccgccgcacatgttgatggccgccactcgtccatggtattgagccagctggtaatgcccgatgttcacgcgatcgtgggccagcccgtgaatgtgggcgtttgctatatcaccgcccacatacacatcgggtacattggactccaggaaatcagtgacgtccacggatccgttacgatttaccttcacgcccgacttggccagaaattgggtgttgagcttggagccagtgcccaagatcagcagatcgcaaggcagacgcgtgtcatctaccagcaccacctctgataccttgccgtcttcgttgccaacgatctcggcgatgccgctctccatgcgcatgaccaccttgttgtcctcgaacagctggagcaccctctgaccaatctccgcgccgaatgcggccttaagtgggacgttttcacgacccacaaccgtgacgctttgcactttggagaccaacccagcagctgcctccaaggcgataaagctcgatcccagacagacgacgcgggactccggggtgatcgatgccaatatcgcctttgtatccgccaactctcggacagtgcggacgttctccaagttaacaccgggaataggcggccggaaggcggagcagcctgtggccaggtagattttatcgtacttcaccacgtagccattgctgcagtgcagctctttctgagcggtatccaacttctcggcggcgactccttgccacagttcgatatcgtactctttgtagaactcctcgtcgcggaaccgcagctgctcgatctcaaggttcatagccttggagatcttaacgcgatcgtagggcagatagtcttcgcggcacacaaagattaggcgcccagtaaagccctcctgtcggatggtttccacggctacagcgccagaaggaccaccgccaaccacgatgaacactcgctgatcgtcgggcttgcgtcggaccatgttcttgagtcgcttgttattcaccagatccgatcgctttgcacggagcatcacctgtccctcgttacccacttccacgcgataacatggcagggaatcgagaccaggaaagtcctcaatgtctccgttttccaggttaaagcaagcgccgtgccaaggacagcggacacgacccaaacccaaagctccagtctggagcggagctccgtaatgggtgcacttagcacccactgctagcagacgatcgttctgcttcacgagcagcacgcgggtgtcctcatcgaagtccacctgcttcatttcgttctccttcagatccgtaactctgcagtccacggggaccgcacttgtgtactccgaatccggcgaagactcttccgtcgacatggttgtactgggactctggttgctgcacttggactggtaggaacccacggcaccacctgccgaagccatcatgtaaagagacaagcaaagagaaacggagataacaatacagataagaagagtgtgtaggtgaatggacacatcaaaattttccagtttttctccaagggtccaagggaaattctggcaccgcttgctgctcaggtagaaacaacaaaaaacgaatatcagtcgagaaaatgcttcgctcgcgttcagaagtctttgtgtgtttgcttatgatcctgggatcagttctggtccgttcgaatcttgggaatcctcaggaactggagctaagtgcgctgcgcacccacaaacagctattgcaggcggagatcgcacgtctttttttagagcagccgcttcgagcggaaactcaacttctgctggaagatctacagctaagagatcatcaaataggcgttcagatagaaaagctcgaggaaatctccaagggcgagaccacgcagaggctggccatcaatctaacggctgactttgaacacctgcagcataaattggatgatttgaaacgacaacttgagctgctcgacggacgctttgcctcccaagggaagcaactggaaggacactcgtcggaaggcgcatcgccggctggccccggattaggttcctttttgtggggacccttgctgaccatgccagagtttccacagggcagtgtggccagcgaccagcaacataaccaccaccagcaggatcattccccggatccgcagcaggattccagtccctctatcattaaaagagtgctggacatgcttaggccatccataggagtatcaggtctgcggagtcgttggactgaatccgcaaaatcagctgcaacgggcttggcaacacctaagcccactcacccacttagtgctgaggagctcctaccgcagctgcaggagcagcgcaggtttctggacgatgctattacgcgactggagctcttggccgtcaagaagggctcgaacaaaaactaaaatatgtggaaaatctaagtaaatcaaacacttaaatccatctatccaaaagttgagctttgagattaaacagaggatcaatatttatttacttaaattgccagagatcatcattcataaccagattcgttgagtcactgtcaaaaattcagagaaattatactataccaaataagtaaagttcgtttcataatgatttgtgaccatttccgaaaacaattgaactaaaattagattgaacagtcaccttaatgaaaagtctaaagcaataaatactaactatctttaaaaccatgatatgtaattgtaaaattgtgtgtgtcagggcacttattttaagcaacaccgaggatagggtagcagctgcctaattgccatcgatggttacctgaccacaacaaagcggatcctagcgacaagtccgaatcgattgactcatccgacctactgcaatgtcacgtcaactaggcatacctaagaacctcaagttgctacgtcatcaagaaaagccaggcggtgaggaaaacacctattgtataaagcgtaaccgtaacacctgtaaacgtgtgtcggttctgttctgatatggcgataatgtctacacgcccctatctcaagtgactggctttatgatgtatggtaatatggtatcgctggtatatgtatcgccgatatgcccatgatagaggagctgatgattcggctttttgcggacggaggcgtgctgatcggaaatcaaacatttccatcgaagcagcaaacatgaaaaacagcaagtcatgaattacccagcgaaacagatgtagggacaacttttccatcgagtcggttaacttcgaccctgcactgtacatttgccaatctctttcagttctctcatctaattagcaatgattcgccatgttaataacacagctgcgttttccacacacacacggacgcgtatacatgggagcaaaccaaaccggttggccttgtccaactcaagtgagtcaaaagccaggccaaataataataataataacaattgcacgagaacaagtttcaccgaaatatataactcacaaaatcgggtatcacagaaaaggacggacaggccgcagctaagagaacgttccgtctgatattaagagcttgccggcagttggcgaacgaatgaactggagaccgccgttggagcagccaatttaagcgaactggggcctcattggagagcccaagagaacgaatgcaagacatggcaatagacaataggcaggcacacaacacagacgaaattccgatggcggtgactaaccgcagtggtacagtggccattgcctaacagagacacgcaaagataccctgtaagactcagaacaggaaacttcagagcgtcgcaaccatacataggagctcctgtaactccattcaaggtggtaaagatggccatgctattggatatccacagggaaactgtcgctttaggggaattagtacccgggattaagtattcccgcatcgatagctactgtggcaatgacgcagcagcagttcaagcaagttgcgccctcccgccgtccctatctctttgccaatctcttggacttgtgccgctgagacaatcatctaggcacctacgcccggcccgaaaacacccatctaatgcgggtcattcccactctcctaatcacaactccaagccatttggcctcgtttagttggtaaaaggaacacggcactggtggcaatcggatcatctacgacattaccacgcacttttcgaattgaagtcggaaaacgaagggattggtttaagtacatttggaactttttttttgggcaagatgatcttattttattgggaagaaaccatttgcgagattagaagtggcgcagtcaaattggaaatgcgaccttgccttgttgtttggcaattgacctttcgaaaactattcatctgtaaatcgtgcatttacctgtcgacttctcctttttgggagtgctgcccgtggtcttgtactccttgcagttgacggaacccattgtgtttaacaggcggttgttgatgtggctcgcaaaagacggggcgttgagtatcctccaggattggctggacgggagcttgcgtatcctcagaaggccttcaaaggctcgtttcgttttgaccaagctcagagctgtgcgaggggactgccacctgaaagttgagtggccagtttaggagctttacttttcacttaataacaatcaatcactgtgccaaagctcgttatcagttagttagttcccgcgtgttaatcatttctatttaattattcctccacagcctgagtcatcagccgcagatggatgtgctgaactcccccaaacgtgtccgagatgctgttttttgcagcacacacaacacacgtcgttgtttatttgcgaattgcttttagtcgccaatcatcactcaccactctccacaacaacactaaacaaaacaaaaacaaaacaactggaatatcgcgtggaagggaggatgagagcctgggagcgtgcaacaggtcgggggtccgcgtctgtgccgagataagcgaagtggagtcgagtggaccaggaacgctgcgagagagccgggagagcaagagccaatgcaatgcgaggcacgtctggcgcgcgtgaactgcggaccgcgtatggcgcgcaacttcgtcgctggattcgactggaactggaagcttcgtgcctccccaacacacacgcacttctgggctctgtgtgtgtccgtggacacaggaacggtcaagatactaggagccagccctactgtgtaatcgcaacgctccctgttcaatgcatctctcatgtgtataatgcgattatagatgaaacaagcgccaagactacctagacgaaacaagaaaatttcttggcaggataaactacctatgaggtacccaatgcagagcgctggaaactataacgctgaccgcagttgtcagcctttccgaccattctcgtgtgttccactaacaaaaacttcgcgaccttgccgtcgccgcacttcacttcgaagcaatctcctccaccagcctgtggccagcaccaagaagtcgtagagggtaacacatagctggccttcttcgcgattcggaccaatgcacttggcgaccaacatatgtacctgttggctgagctgagctaagcccatcgtgccacagtcagtgccggcagaattgcatcaccgccagcggaactagaacaagaacacgaaataccagcgttttattgcggttgccatgactcttcgagtggaataaccagaacgataagtaaaccaaattttccgtcactgccttcgtaagtaattgggaaatggctgttccttagacctgttgatacggatagtaccgaacaaattgttgatatctcgctatctcgaggtaaacattgtatctttggacacattgtattcttgtctttggttaaggagttcgaaaataatgctcttaagagcgtacacattcaatatcattctatacgcatggaagccatgtcaggtgtattatgtcctaagcccattccgtcaatgtctgcttgagcgaatgttgacacagtccagttatgcggataggcttatttttatcagacccagggaatgggactctcaaaatacagt

SEQ ID NO: 8045 - DNA, 2141 bp, DROSOPHILA
cgcgcgccagacgtgcctcgcattgcattggctcttgctctcccggctctctcgcagcgttcctggtccactcgactccacttcgcttatctcggcacagacgcggacccccgacctgttgcacgctcccaggctctcatcctcccttccacgcgatattccagttgttttgtttttgttttgtttagtgttgttgtggagagtggtggcagtcccctcgcacagctctgagcttggtcaaaacgaaacgagcctttgaaggccttctgaggatacgcaagctcccgtccagccaatcctggaggatactcaacgccccgtcttttgcgagccacatcaacaaccgcctgttaaacacaatgggttccgtcaactgcaaggagtacaagaccacgggcagcactcccaaaaaggagaagtcgacaggtggtgccgtgggttcctaccagtccaagtgcagcaaccagagtcccagtacaaccatgtcgacggaagagtcttcgccggattcggagtacacaagtgcggtccccgtggactgcagagttacggatctgaaggagaacgaaatgaagcaggtggacttcgatgaggacacccgcgtgctgctcgtgaagcagaacgatcgtctgctagcagtgggtgctaagtgcacccattacggagctccgctccagactggagctttgggtttgggtcgtgtccgctgtccttggcacggcgcttgctttaacctggaaaacggagacattgaggactttcctggtctcgattccctgccatgttatcgcgtggaagtgggtaacgagggacaggtgatgctccgtgcaaagcgatcggatctggtgaataacaagcgactcaagaacatggtccgacgcaagcccgacgatcagcgagtgttcatcgtggttggcggtggtccttctggcgctgtagccgtggaaaccatccgacaggagggctttactgggcgcctaatctttgtgtgccgcgaagactatctgccctacgatcgcgttaagatctccaaggctatgaaccttgagatcgagcagctgcggttccgcgacgaggagttctacaaagagtacgatatcgaactgtggcaaggagtcgccgccgagaagttggataccgctcagaaagagctgcactgcagcaatggctacgtggtgaagtacgataaaatctacctggccacaggctgctccgccttccggccgcctattcccggtgttaacttggagaacgtccgcactgtccgagagttggcggatacaaaggcgatattggcatcgatcaccccggagtcccgcgtcgtctgtctgggatcgagctttatcgccttggaggcagctgctgggttggtctccaaagtgcaaagcgtcacggttgtgggtcgtgaaaacgtcccacttaaggccgcattcggcgcggagattggtcagagggtgctccagctgttcgaggacaacaaggtggtcatgcgcatggagagcggcatcgccgagatcgttggcaacgaagacggcaaggtatcagaggtggtgctggtagatgacacgcgtctgccttgcgatctgctgatcttgggcactggctccaagctcaacacccaatttctggccaagtcgggcgtgaaggtaaatcgtaacggatccgtggacgtcactgatttcctggagtccaatgtacccgatgtgtatgtgggcggtgatatagcaaacgcccacattcacgggctggcccacgatcgcgtgaacatcgggcattaccagctggctcaataccatggacgagtggcggccatcaacatgtgcggcggggtaaagaagctggaggccgtgcccttctttttcaccctcatcttcggcaagggaattcggtatgccgggcatggctcttacaaggatgtgatcattgacggcagcatggaggactttaagtttgtggcctacttcatcaacgaggcggatacggtgacagcggtggcttcgtgcggccgggatccgattgtggcccagtttgccgagctaatctcgcagggcaagtgcctcggtcgtggccagatcgaagacccggccacccgtgaggactggacaaagaagcttggccagccgttgccccaagttcgctaa

SEQ ID NO: 8046 - protein, 552 aa, DROSOPHILA
MSTEESSPDSEYTSAVPVDCRVTDLKENEMKQVDFDEDTRVLLVKQNDRLLAVGAKCTHYGAPLQTGALGLGRVRCPWHGACFNLENGDIEDFPGLDSLPCYRVEVGNEGQVMLRAKRSDLVNNKRLKNMVRRKPDDQRVFIVVGGGPSGAVAVETIRQEGFTGRLIFVCREDYLPYDRVKISKAMNLEIEQLRFRDEEFYKEYDIELWQGVAAEKLDTAQKELHCSNGYVVKYDKIYLATGCSAFRPPIPGVNLENVRTVRELADTKAILASITPESRVVCLGSSFIALEAAAGLVSKVQSVTVVGRENVPLKAAFGAEIGQRVLQLFEDNKVVMRMESGIAEIVGNEDGKVSEVVLVDDTRLPCDLLILGTGSKLNTQFLAKSGVKVNRNGSVDVTDFLESNVPDVYVGGDIANAHIHGLAHDRVNIGHYQLAQYHGRVAAINMCGGVKKLEAVPFFFTLIFGKGIRYAGHGSYKDVIIDGSMEDFKFVAYFINEADTVTAVASCGRDPIVAQFAELISQGKCLGRGQIEDPATREDWTKKLGQPLPQVR

SEQ ID NO: 8047 - DNA, 18909 bp, DROSOPHILA
attaatttgtccagttacggaatcatattcggctattccatgatagcttttgccagtgtctttctcatcaccggcatcacgctgactgtgacgaaaaagtgggtgcggcgaactcccgaggatgaggacatacttaccaactagagcaaaatagtttttaagctttgccaaagtgccaggaattgttaactctcctagttcattctgatagtcgcccgtcaaatgctgttctttgtcagttatgcgttatgtaatatgtaagtgatacgaatcgacgttcgtcttgcagtttgtgatagcaaaacctactctaaaaaaaaaactaaaaactactctaactctaaaaaaaaaaccttactctatctgcatattacacgaatcattcacaagttgaaactttctgtttgagacttaagttatcgtacttgataaacaatacttcatacaactaaaacactccgtgcattttattttaacgtttttatttgaattttcatttattttgaaaagatagttttttacaatttctgtatgcttttctgcaggacttttacttatcgtatacgattgttggatgctttaacgatttgctttataaatgcattattcaaatgttgttttgtaaattaataaataaaaataattgtatacgtatatatatttatttatatatatgtatatatattggtgtatatgtaagatatatggcaaaaattttacattttctcaaagatcacattcctcaatttagccatagacttttagtcgagaaaaatctacgcaaatatttgtgacatccatcaaaaactcaaattaatttttgcacgcacactaacacatccaaaaaaacagtgggggattattaatcgaacaaaaaataataaacaaagtggatacaaaaaataaatgataatcatctctcgcttattactatggtggggatggagggcaagtctaggcactcttgaaattctttagttcccttcgtccagcgatcggagcaagcaaacccatttcaaaccatttcatagccgatttgaatgcttttcacttgattctaccgctggcccgattcgttgtgagtatgtgtgtgtgtgtataaagagcgacgttgctacgtactaaaaaatttgcatagtatatgttgcgttgttcttggtgactaaaatagttataaatttagtataagtttaaataaaaatcaatcacagttgtttgggcggaagtagttagttttaagtattcgcatttctggcctaactaagtatttgcagctaagactaaagatctacgatgtagtttagtaaattaggtagtggtcgtattttatacttgagtattgttgcttcccattttgataagcttcctctctatttccgatgttgtgtcatgttgtggtctgtgctgtggttacgttaccaattcccttaagtgactagactgggttctgattatttgaatgtgtattttgaggttacgttgctcacgtcctgtaggcttaagtattgactctgtgatattcagttgtttcagtggctcgtgtattttaccatctgaagttggtggacctgctagtttgtgtttttctaaaaaactgtcttcgctagttaaatgcatgttagttcctactaaatagctattgtttctgctgttctgacaaatggtttctcacggtgggttttcgtttacatttacccttttgtgcccggcgaatctttacccttcgaaacactgtgatcgaatttatataacgctacaccacccgatctatgcaaatttccgaacgcagaattagctcttcacctgggcacactcatacatcagcacttcgaacagcaatcgaactagagagaagagtgtcgtattggacccccaatgtccacttccgttccggtttccaattagcttgtcgagtctagctggtcttgttgtgctgctgctgctgctgctgttgcttcatcatgacagcgggatcgatcacgtagttgttggcctccgccaattgttggacaggtaaaggcggcagtttgtcctgcggatgacggtggcttacggtagatccttttctggccttgcttagggttcctgctcctgcagaggagttggcaactccatttgtggtggcacctgaaggttgcgcactggaagtgggcatctcctggccagtcttcggatttataacaaccttagtctgtttcagcaaggagcgatcgttgcagagcgccgagatcagcggcagatctagatgcttgctcttctcccgaagaagcgcaatgtctagcgcttgggcctgtgcctgggcatgagactgggctaccattgaagcctgcagctgggccaaaatgctgttgtttccccggttcaatcccagaccaagacccaagtcaggtctcggacgctcacctgcccactgggcgccgctggaggtctttgttagcggtgagttcgcatgatgcggattcaacgttgggggttttcgtggtggaatcgggctcatcctgctaggaattggcttagagggtactgaaaatcggagagattaataagatatcgaaatgaatctaaatgtaaagttactcacttggaggtggcttttcactgggcgccggcatgggtggtttctttagccgtctgtttacatacggtggtggtggcggcggtggcagtcgttttcccttgggcagcaaatctagtgagttcagaatattgtcatctgatcgcgatcgcgcaaacatcgaggaagacgaggagccagcccccgccgcagcagctgctgctagagcagccgggtgaaggggaggaggcggtggaggctcatacgaggagcataggctggccatcgaaggagagtacaggggtgagtatccgggtcctggaagctgcacatatgtatccgatagattttgggtggatgcatatcgtgagtgggtcgacagagtcagtggtaggtagggggtgcttctgtaaatcgccggcgacacctgcatggccagatatgggtggtgcggtgggggtggtgctgcttgggccattgccgccagtaaggatccctgtttggcatccagatactcttgctggcttacagctggatcctggatggggtaaattacgtaatccacatcgctgtaaagctgctgctggtagagctccaattgttttctagccatttccctctcgtaaaggtgactcgccaaatgggggtgattcggtgggggcggtggtggaggctgccgcggcaaactgggcggtggtggtgccaggaactgccgaggtttaataaccggtagtagtacacatgactgctgatgatgcagtgatgccgtgctcttgtgcagaccgtaaggaactattccaatggctgccgatccagaatgtcggtggtgtgacggcacgtgatgatggtgcagtgaagcctgggatccgccggcatagttggagttatgcagcgattgctgactcaactgatggctgcaaaccgatccattggaggaggcaactgatgaacaatggtgcggtgccgcgtaacttggcttggccccatcgggaatcaggctggtgtgggctttcagaatactaatctgtggcctggtggtgataaatctggctgtaacctcctcggactttaaagaactcatcgagccggcagcactgggcgcaggatgtgccgacgaactgacagatatcagggatgtgggtctaggcttgctagagatggaatatggcggtggatctcttcgtcgaatagccggcggtggggctggaattggtgctggcggtaccggtggactacatggcggtgaatctggtttgggagctaccacagctataggtttagggataggtttggcgataggtgggccacagagaccagttttctcatgcctagcactgtagggtggtggtggtgctggtggttggtctacctcctcttctccttgatctcctagtggtaacgtcacgtaatcacagtccgagtgaaggctactagatactgttttccgactggggtaggtccccctgcccacaatcaaattggttaactcttctgcggagagcaaggaatgtttgttgtctgttggatcgctgccatcgcctctaaaggaactccctgtgctgacgttagaatccgatcgcggtctgaagtcttctttcttttttccatctacggaatcagaatgttgcacgtgggtttcttctagtttttggggctggaacatcccgtagtgcgaactcttttccgactcggcgatctccgatgattgtccagttagctcactgctgtgcatggtgtaaacgcctgaggtttccgtgggtggagctccgtgcgccaaagtataaaccccagatgcgcccgatacactctccgtttcttctcttgccgatgtggagagaaaatcgtcgggactcgtttcgctcaaggccgagttttgagcggtgtgactaaagccaagctccaaactagatgaagtggagtgcacaggtatgggagcacctgaagaggaagcgcctgctccatttacaggagatgttaccaccacagtgctacaagtggatgagcactgagagccgatgttatgctgcgaactgggtgaatcagtggcggtagatgaatcattggcagttgttcccatggaatttctctgaacagaggagttcgtgacgatcgtggccccgttagaactcgcgtcttgtggcctcacactcaaggcagccagttgttcttccaaatccttcagagacatctgacccacgctcgaagtttgtctgctcacactgggtctgtccaaaagatgagccaaggccaaactttccgttgacggagcagctaagggtgctggtggtgtattgatcatgatctccagctcgtcttcggagtgcactcgatcacttactatcccagaggttgtgttggagctggtactcgagataaccgatattcgctgctcgtttttacttttgtagggcaagagcagacttctggaacaagcgtagctggcatgtagcctttgtgattcggcagcctcctcctcctcgcgtttggatacctcctttagcctggcagccagtttcatgctccactgatgtgtatccttgcagagggtcaataggagtttatttttctcatcggatgcggcgtacagggtgattcggctctctccagatcgtatttcaaactttttccgctcgaaggagagcttcgtgatattcggccacagaaaggttgtggtttcgggattggaagagctgttggtagactctcctcccagaatcttgattcccttggcatagaccacaaaccaggcactaccagatccctgctcgcttttggccaatcgcatcctgtaggtatgggcattgatggtttcatgaagactgcatgcctgttgaatatatagcagctccgcctctgccgtggccatgcccaaatgctcccgatgacaggctctcattgcacttctcgcccagggagtgtgcagtccactgggtaggtaatcctcgatccggtagtaatctgctccattcggtggcaggctgggtggtaatggtattgtttctctctttgatgtggacgccacatatgtcgagagtctaagcatcctctcattagcacgtttgctgatcttgggtaatgtagtggtggcacttagacctcttcctccgttagaaggagatgccgatgtctcctctcctgaatcatccttggaattactcgtgcccggaggagcatcacccaggtccgcctgaagagcaagtccagcaaggaagaccagtgcctgctccgcctgttctctcggcaaatcgcgctgcaagatgttgtggcgcagctgcaggtagtaattatggcgggacgtctcatctttcagcatgaacgggctctcgatgtagaactgcacgcgaaagtgtagctccaggagcggtcgtccgttggcatccagcccctaaataaagacatgtcgcattacttaacacatcatgataattacttttttaataaatatttacgtgggtgtgcgatgatcgccagctctttgggccatattttgagagcttgctctcgggatctgcgaacatgtactcgccatctgcaacatacgaaacaagagattggttataaaaatggtttgattgatcagattttgggtctgctattccatcgaacattctttttttaatttcaatttttttaaaagttaaaacggaggtgcattcattaaggatatataaataaccaaacagagacctacaactgctttcattgaaatatcaaattacttgtcaagtcggatgccatgccttggctgaatttccggttgggctaaggaactttttggcgcgcagccgccaaggtcgctaatcaaaattttaaatgaactttcggctatgcaagagggagcgctcctcttgcgtcccaaatcgggctcaaatcggatcgagaccccgaccagacttctgtcagtttgtcaggcaataaacaagcaacccattgacatcaacaagagtcagagactccagcagatgaagacgatgatgatgacgacacgtcaggttgtcagaggcccattgcctgatgctcgaagacgagaccggtaccggaccgcgctacatagctccgacccgagccaagcagaagggcccaagggcatgtcggcggtgctcgagaaggcagagaaaaaacaacagcgaaatcaacacacacttcatcgaacgaaaaattggaattcctgcatacaaaatgaagagcagcaagatgaaaaataataattatgaaaaaagcaggcaggcaggttgaaggaggccatggaatagaggcacctcagcatcgaatccacaacacagcagcagcagctacaatatcataataatcatcagcggccgaataagtgcctatcaatgacgacgtcgtcgacgcaaagctggaatggaagtggcaacaagtggatggccaggggagtagagctcttcgagtttggttcactcaaaaaaatgattagggaatactagcaaaatattttgttgccaaacctaatcaccccccacaagtttgttctgggaaagttttgccgtagcatagagcgttgttcagtttatttggatttacgagaaaacccatttcttttgcacagtgtagaaacggagtcgaagcgagagcgagtgttgcataccaagcccaaaacgcagcatcgaacaaaacccgcagagaaagaggaaaaaacaggtagaaagacaggtaagcagcgctggaaaaaagaggcagctgaaacccaagtcgttcggtttttagccgcagtttttagactccagcctcaaaactcaaagcgatttcttttcgcattcaaatttcactccactccagaagttttcggccaaaggctctccaatggaattcgttcttgtgcacgtatcggaatcctggtattctacgagctgcgggcaggtgttagggccaaaacagtcggatctcgggaagccactcgtctacggcggcctgatgtgatggatcctcacgcaatcccagcgttccattctaccttgcccgctcccaacggcaaagacctaataattaacatattttccatcgcattcctcaacgctcacaattaacacgcacgcactcggtttttggagaagggtttcgaggggcagcgaaataaatcttcaatttgaaacacatgcaacacaaattacagcctcaaaagcaaaggcagctggccaggcagaggcagaggcgggggcaggggcagaggcaaggctcatcaagcagaggaattcctgaggtaatggcaggagaaggaggaggaggtggggggcaggagatggagtcttaagttgaagatggagaaagagaatgagacgcagtcagggacagctgcgcccaatcccatgccatggcttggaattcttcagattcagatttattttcaagaaggtcgcagtccgagctgaagtggccataataaccaaaaaaaaaaaaaaaaatttcgcaggcgaaactaagcgaaaaactactcctggctttaacgtaagactaagacttgtgaaatattaatatattaattaataacaatagaatgctagaggacagaccaccattagagaatattaacttcaatatatgttaaaagcccacaaagtccaataagtttataaaaacaaaatataaaatatttttaaattgccaacttcggatatacccggtaagttggatgtggaggctacagggtatcctaagaatgggcagcaacataaatttatgtgtgtgtctgtgcatcgaaactggctaaggaaaagaagaacgaaagacgaaaaaaaaaaacgtaaaaaccaaaagaattttaatttccgatgttatcagatgcacgcagcccaaagaggagaggcggcagctccaggggatcaggggatggacagccgatgcaaggccgagtgttcacgtccaaagattgaagacgaagacgaaacagccaacgccgtataataatgattatgagccattaacattaaatggaaaagaaaatgctggtctacagatttcagctacaaagggggtggggctccacaaaaaagggtggggaaaatcatgagcccggagccaagggggagcgaaaaatgtgcttttctggcccggaatgcagctgaggagtggaattcaaggaatgcgacagcctaaaaataacaccaaaaggggagaatgtcgcttggtagatgaccactggatgacaatgttgccaaatggccatcggcccagtgccacttaaagtgctgcgatctcaaggagcagcttaaatttgcatgaaaatgcaatttattgacactgggcggccataaaatgtaaattcatttccatccccgttaaaagcaaaagagcagacccaacttaattgtgaccctcttttcgttcattttgagggaaatatcgaaagaccaaaacaacgaactcggaaacatggaaggaccaaaagtctcagattagctatccgaagtattccaggataagtcagcaagcataaatctggcaaatgcaatagcaaattgaattgccaataagaatttcttcctttagtttaaatactttttgattgatttttcgactaaataatatacttaaagtttgctaaatatatgtactctggatgagggattgggtctcggaaacataccaagtccaggccagaagagcaacaacaatatatagccgcataccaatcacagatacaccgtccaccgacattggcaggaatccttggccacaaacccgagcaccagcgcacacacgaaagcagaatgcaaactgccaatttcatagttgcgcctgaggaatcctctgcgaggcgaggacgttggcatgcccagcccgattctcatattcagttaaagctgcatctacagcttcggcagcgactccggcttcaagctgcataccaaattcttagctgaagatgttgtggcaacttcaacgctcccctgcctcctgccgagaaattgatgccaagccaaccagcttcgaaaatttacgtgttgtgttcttgggcttttgctctaacatcggatcacaaaataaagggtataccggaatagtcatttgggttaaataacaacaatctccctaggcgattcgatgttttaatgtacattacttaaacaggcgacatttggcgtggcgtttgaaataaacgataagaatctttcccatacaatttcttttgtacaataattaatatacttttccctttaagagtaagaaaacttcgattaccagaaaatcaaattcctctctcctttcttgtttgcttctccccggacccctcgtttccccgtttttggttgcttgtgggtctttggagaacacatatatctgtggccaatgccaaagacgttgtctgcttgttccccaggtttcagctcagactccggagctctgggctcctccatcctcaatcctccatcttccatcctcgaaactccatcctccgtggctgtcgttcgattcgtttgtgttaatgcaacgcgcgacggctacctgaattactgaacacgcgtcttgtgtctgctcccctgcatctgcagctcaacggctgctcctttgctgagcccctcttctgtattcctgaaattgtttgttcgccatgaaggcgacgcgttccctgcctttttgttcgttttatgtgccattttttgtgttgctccgctgtgttggtatttttatgtgttttggcagatcgctttggccagaaaggaggatggaggctgagtcctctgccgctgctgctgctgctgcttctgctgctgatgatgatgagcagcttttagagcggactggtttatgtttattagttgtatttttcaggccttatcgctagcatttggctactccacaactcggaaacaaactggacgcaactgacttgaaatccccccccagaaccgaaatggacttacctatgagcacagccagaccgaagagttcggtgtccagcatcccttgcgtggcaaagtgcagacatgtctgcgtgtaaacctctcgaactcgactcttggcatcgactaggaagtacaaggttttcggctgctgctgccccagaagtctgcaaattccacacaaaattaagcaacaccatttttgggcggcctttccaccttaaacactcacctcagggccaggaatcgcgagcctggtgatagttgctcggctgaggacgcgcatacttccaaaggcgcgctgacggtgcaaaatgctcgcatgctgcatcattttccgtatacagcgcgcgcgttcgaaatacgttgctatttaaagtaaaagaataacaaagattaatatctgtatagatgaataaagaaactaaactacatagcaggattcgattttgtaaattttgcaagtgagtgtgtggtggtaggcacattatacaaattgaaacgcattcaattacgttttatgtacgtatttacgtattacgtatatgtaagaaaactcattttaaaagatttttttttacaattcttgcaaatagaaattgtcgcattcaacgcgtcatttctaaccgcatttctggctcatcagatgcgataaagctgccgctcgatcggatcggttaggcaccattctttcaggcaaattgatgccgctggagccgccccagacgaagttggagacgaaaggcggaagatggcaatggctatggcgatggcgatggcgcccgcctcttttgggctcaccgactgccgaacaatttcaccaatcaataacgaaagactcaggcgacaaacttgattagcgggcaggggacttggactggcagaaaaactgaatagtgaatagtgaatacctggggactcttagcggtgcgtgcgtggcacgcaagctccctccccctcttgatgcgttgcgcataaaattattaaaattcagttaaagaaagttccaaatgcctgagctaagaggcagacagacaccgaaactggactcgtgatgaaagaaaagtattttgtgcataaattaaaatcaaatcgaatcaaatcaacttttttgaatagagcgccggcagcggcgacaacagtttctaccaacccggcggagacgcataaatttcaatattggcgcattttctgtgtctaataaatttgaacgttcaataaatttattcagagtcaaatcgagagtcgaagtccaactcgaaagccgatagagagggttagtggcatctgcatgccacaccatagatagaccgagagacggatgctgaaagaaccgccctgacttataaatatacgatcggaccgatcggaggtatgcctccgccaccaccgcctcccaaccgaaaagcgatcatcaatcaaagagcacatttgacataaattagaaaccaaagaatatctgggaacaccatagcttcctccccttgaaaagaccgctccaaaaaagcttttcaaaagcaattatatttaagctgatttccatgcgcaccttggtctcggcttaggtgatctggagaacaggctcagacacatactttatgcccgatcacagacgattacgaaacgagaatcgaaattccaggtctctaatgtgctgcgattgacttattaccgaggaatttatacggataaacataaaaactacattgttgagctctcaagaggaactggattaagcgatcactcacatatctcacatgttgagtgactggccaataaagagttgaagtattttttgagggcttggtcacatttcttgcacaatattagtaagtgcttactataaatattaaatcaaatgatttttaccattagcaaggaaattatccttgtcaataaggcataatgatatgtaattcagtgagacaataagaggaaaccgtaaattttctttgacaaaccctcttatcgattccgataacaataaaaggaagctagtcggcagattgcacgaaatgaatagaagctcagaaggaaacgaacgcggctttaatgcaaaaattgccattaatggcaagaaggagaacgctgtctgattggcgagatttctgcggaagtaatacctctgtcataaagttattagacgataaaccttcactatagactacttcgcagaaaactacttgcaatcacttcttttcaattccaagcccccacaatgccggtcattatgtaatcgacaaatcgaatatccaaaaataccgaaaacatatgtgcgatcgcgatttctttgaggatgagtcaacgaaagcgttttaattaaaaattcaaacaaattcaaggtgtttaaaaatttcaatcattgaaaatcatccgcattccattggctaacaagagcggaaagcaaagaaagccgtggcaaagctaattattatagccaacctacgagttgggggtacaaggagagagagaaatattgtcttctcaaaaataaaagaagtgtaagatttataatatttcggtatgcaacgagtatccaggatttcaccgtgcactgctggcaattaaagtcgaggcaaagaagcgagccaagtggagctgagcgaccgcaagagacacgctaatcagcaattagcaaatggcaataaatattttgtttatgattaagcgaggggcgaaggtgtccagtggcgggaggggggttggctgttaggagtttcgcgagtgggtcggctttccgagagagcttggaatgcagacactgatggagcacaagaaggcagagggggcagatgggggctggagcaataaaatctcacgggctctgccgcgatcaaagtcaattaaatggcgcaagcgccagcagtgaatgcttttctgctggctaagcgaatgccaaaggggtaaagagagcaaaaaccagagaactaagttggcgactgagcaacagagacgttccgcatacgccacgttgtgctgcgacagcaactaagcacagaaagaaagcactgtaaaaagtttagcatttaatatacgaattttatttcatttaaaaatgtattatataaaaaaaaaacccattcctaattatacagtcatctaaactcgttgttgttgttgataagttccataagaaaattaagaactttaatatttatttcggttttcttttctccctgtgaacgaccgactactatgtcaactgcacatgccaatgcactgagctcattcggggcgtgtgtttgtcaagcgagttccaacaatcgccaaagtcgaacgatcgattcgatcgatcagacccgagaccccagacctcacagaggtccaactacgaactacgtatcgtggggctggcggggcagtcggaggtgccggaaccaagacctatagagtcgagactacgataaacgtttcaaccgcatgtgcaggcccattgaaatgctgaacgaatcagaaattgaaaatatccatatggatttcagcgcggaatgcgagtgcgcattgagcagatcaataaacatggcagcgcaaacggtcgtaagttcgagcagcgaggaatgcgaatcaaattggctctaaagaggtctcagagatcaccaagctggatagctaactcggggataccacatgtaactgtctttaatcacctaaaaaaatatattaaagaatttaatatatgtgtccatttatccacttaggctctgatgggaagtagccaaaatattttatgtggatctcatcatatcaagcataacatcgaaaagccctcagttctaaacttgaatctggatttagcatgtagccctcactatctatctacctctttatctttctttagcgaaagcgtatgagaagcccgtttaaacccacacactccacgtaaagatccctcaacattcttcgcagtcttgaattctttgagaaaatggcaaggcgatcttttgagtctgcggtaagtgctcgcgtaccgcgcggctctcaagctcgattcgcattttattgaaagtgtttcgagcgctctcagctcgccaactaatgaatgacgatcggatcggatcggcgagcggtaacttttgacgtggaatattttgctcatgagttggacggccgagaccggaatggacttaaagccggagcgggttctacgtgagtctgggccttttaattaccgatagaacggcaactggcgtcaatgggacggccagaaatagttcagttcgaatctgtttgctggcattttcacacgctggccaacgcggcggatgcgcgtcattcaaaacggggcccacaagtggtattccgaaaggggtgtggctcccgggtgttgtcgcgcaaatgagtttagcctcagcctctgcctctggctcagccgatttctggctgatcaggggtaaaaagtccccgaaatgcccattttcggaacgattgttgaaattgcctaatgacgcaaattatgtaaagagccatcaatttgggtgtacctcataaagcacacggtgttttaaattcgcgaactccagacacctttaaagcattatgtggataatatatattgttttgaattgaaatcatcgcaagtaattatgaaagcagttttctgtatgccgggcttagtgtgccatcaaatcgccaaataactcgtcgtctctttgccaaactgcgaatatcgaataggagaaaacagaaatcagggaacaagcgactgagaaataaaacagcaaagcggcaaatgccgaattccgagctgcggaattccacttgttgtgccagttatggccaaacaatttgatgtctttgaaatgcgtgaaatgtccccgccgaccgccgatgataataatgaaaatggtcgcttgctcggttggctggatagctgtgaggagcagccagggcggagtgggccaaaagaaagcagcccacacgtcgtcgctcggcttcagttggctaggcaccacaaaatcgcaccacatcgcaccactctcctccactgcgcaccacaccccgcagacgcgaaatgcccaactgggcgaacgaaggtggtaacggtggcggaggcgatggcctccacaatgagagcagcaaacagcaagatacaaaaacaaaaaagaagccgcaacgtgtgccgcatgccaaatcggaggcgtgcgaaactatgctgccataataccgtagaaaaattagcagtccatacagggtatcttgggttaaatgaatgcgctataatacgagtaaccaataattctaaagtttaaggtattttgattatggctagaataattctttgaccaattctaagtaaagaggcttttaagtttttgcctatctggcaatatgttgttgaaacaatatttttttacgagcatagagataagtacatttttttaatcctcgaaggtcgttcattagtgtatcctctatatctctgagccagcctcgactccgattgtcattcgaaatttgtttaatttgttgtacattttaattgcctgaattgttcgaggcaatgagcaaccagagttttcaatgttcgcacacgcatatcaactgcgtgcaggaatttcagtttacgaaattaatattttgagtttgtatgatcattgctgttgctgttgtcagcttcaatgcaaaagcccattgcctgaggtcaagtgtgatgtggagatcaagagatacgcacggagatggagatgtagacgtcagtgctcaatcgaaaaaaccacaagcgaactaaaactacgatccggggaatacatgtgtacttgccgagatatagatacgtctgtccgcagatacagttacccatatgtatatgattgcctggtggcaaaatcgtttaacgattagcgtttaaccgcttaaagcttatcgactgatacccaaagcgtgtgttttcacccgtttgtttatctttcgctgatttacattcaagatgtctgattgccaagcggtttctgatttcagcaattgttccagggatcccgatggacggttgaaattccaaacccgggaataacaatagaactctgtggagcttccattttcacttaattgcatcgccgtcgatcgttctgacaaccgtttaagtcgcctattagccatagaacctatcaaattgactagctcacttggaaattggatcccgagataagtgaaaccctgtgcaaagatactttagggccgcatagaaaatgtcaaaaaaaattaattaaatgtgaccggtatttaaaaagtcggtcaggcctactatataactacatatgtatgcacatgtgaatgtacatatatatttgacacaatagtactctaaacagcttccccatttcaatataccctccgtagagtgtcaagtttgactgacatttgatattccatggcccgaaatgggttaattgcacaattcgctgaatttttgactcttagcgggacgcaaaaaaaaaaatttaaagaaaaaagctggcgacaacaacgaaatgttaaacaatcgttggacgttggcgattttatggttgacagataagaaatttgctggcatttgttttgtttgccgttttcagggagtcattaaaattccggggaaatggccccatatgggtacaccactctatatctgcacgtgtatctgtccttttcttaccttaagccgctgcagaagtcggcattgttaatgctgtatctgtatctgcttctgtttcggtttcgcgtaatccacaataactggctttttaattttggtttggtagttttgtttaactaaagctcactcttcgtgcactcttaaaaccgatctattgatttggctatcgataagtgcctaacagtaaaattttcgtttcgttgttgttactttctgacctcttccacttccacgacgcgcgctgcgactgcgcagtcaacagcgatcgggtcgcattccagcgtcgcacatactttaatcaaaactcactaacaccagaacaattgcacacgcgggcgagcgcaactgagagtatctgtgtgcgtggagtcgttgttgttgcgcgaaagaatgccgtttgctgggttgttgtttttgctgttgctgactgctttatttgttgtagttgtagtttccagtgggcagttgttgttgcggctgaattttttctttttgaccagcaccaacttttcggagttgacttcagcttttttacactactagtcgtagatattttcgtggttttaaggcgcgttttcccaaaatcagaactagttgcaccaacaccaacaaaaatcacttttgtaattgaggcgagtgcgaaaacgaagcgcgctgtttttgtttcagtgaaaaccgaacttcactttaagcaactgaatctgtgtagctctgtgtgtgtctgggcgatctggtgtgcgtgcggtgtgcatttaagatctgaagaacaacttttccgaatgttaggtctcgaataaattcattaaaccgaatttatatttcccagtggaaagcacatgctttgctgtcccgacgatctgttcggttaccgttgacgtttagcgatatactgattttgcccctgctcagcgaaaccgaacacaacgaagatcgagtcgagatttcgttaaaacttaacgaagccgcgtttaacgaaaagagagcccaagagagaattcgaattcgaaagaagcgcacacagcgatacacaaacccgatggcaacaacaacaacggctacgaaaatgtaaatagcaataagcaataaaagaaaaacaaacttcaaaggagaatcccagtagccaactacatagtgtgtgcgtccgtgtgagtagtggaattccaatggcttatctcgcgagacgacgattccgattctcaagggcttaaaggataccctgttaggatagcagatttaagtaaaatgcatatgagaattttaacaaaggtacctttctttctaattctgctttttatcacatgctatcttgtagtttacattgtatattacaattacattatgagttctatcttttggcattcactttttgccaaactatggcggaagcctattggattcaaatctagctttcagtatccctgcgctagccatcgatgcgactatcttataaataaactctctgggcaaaactccagatacagatgcactggacgagggagaatcggaatcggaacttgagggtctgaagactctgcctctatcggcgtcctctgctgctacgatatcgtcacttgggcgcattcctcagcataatgtgagcttgatttgctggattctttttgctccctcttccctctttttctcttctttagatttcctccttttcatttcccctcctccacctcttcaaccatcatttgcttcaaatatgcggcatacacacgccccacgaaagggcggggatcagtgtaagccaagtaaggttttaaccagttcgtccaaggggctacttagaaaaatccacagaaaacaaaatttagattatatggaaaaaagtctaaatgatataaaaatcgtaacta

SEQ ID NO: 8048 - DNA, 6106 bp, DROSOPHILA
aacagatcgtcgggacagcaaagcatgtgctttccactgggaaatataaattcggtttaatgaatttattcgagacctaacattcggaaaagttgttcttcagatcttaaatgcacaccgcacgcacaccagatcgcccagacacacacagagctacacagattcagttgcttaaagtgaagttcggttttcactgaaacaaaaacagcgcgcttcgttttcgcactcgcctcaattacaaaagtgatttttgttggtgttggtgcaactagttctgattttgggaaaacgcgccttaaaaccacgaaaatatctacgactagtagtgtaaaaaagctgaagtcaactccgaaaagttggtgctggtcaaaaagaaaaaattcagccgcaacaacaactgcccactggaaactacaactacaacaaataaagcagtcagcaacagcaaaaacaacaacccagcaaacggcattctttcgcgcaacaacaacgactccacgcacacagatactctcagttgcgctcgcccgcgtgtgcaattgttctggtgttagtgagttttgattaaagtatgtgcgacgctggaatgcgacccgatcgctgttgactgcgcagtcgcagcgcgcgtcgtggaagtggaagaggtcagaaagtaacaacaacgaaacgaaaattttactgttaggcacttatcgatagccaaatcaatagatcggttttaagagtgcacgaagagtgagctttagttaaacaaaactaccaaaccaaaattaaaaagccagttattgtggattacgcgaaaccgaaacagaagcagatacagatacagcattaacaatgccgacttctgcagcggcttaagcaacgtatttcgaacgcgcgcgctgtatacggaaaatgatgcagcatgcgagcattttgcaccgtcagcgcgcctttggaagtatgcgcgtcctcagccgagcaactatcaccaggctcgcgattcctggccctgagacttctggggcagcagcagccgaaaaccttgtacttcctagtcgatgccaagagtcgagttcgagaggtttacacgcagacatgtctgcactttgccacgcaagggatgctggacaccgaactcttcggtctggctgtgctcatagatggcgagtacatgttcgcagatcccgagagcaagctctcaaaatatggcccaaagagctggcgatcatcgcacacccacgggctggatgccaacggacgaccgctcctggagctacactttcgcgtgcagttctacatcgagagcccgttcatgctgaaagatgagacgtcccgccataattactacctgcagctgcgccacaacatcttgcagcgcgatttgccgagagaacaggcggagcaggcactggtcttccttgctggacttgctcttcaggcggacctgggtgatgctcctccgggcacgagtaattccaaggatgattcaggagaggagacatcggcatctccttctaacggaggaagaggtctaagtgccaccactacattacccaagatcagcaaacgtgctaatgagaggatgcttagactctcgacatatgtggcgtccacatcaaagagagaaacaataccattaccacccagcctgccaccgaatggagcagattactaccggatcgaggattacctacccagtggactgcacactccctgggcgagaagtgcaatgagagcctgtcatcgggagcatttgggcatggccacggcagaggcggagctgctatatattcaacaggcatgcagtcttcatgaaaccatcaatgcccatacctacaggatgcgattggccaaaagcgagcagggatctggtagtgcctggtttgtggtctatgccaagggaatcaagattctgggaggagagtctaccaacagctcttccaatcccgaaaccacaacctttctgtggccgaatatcacgaagctctccttcgagcggaaaaagtttgaaatacgatctggagagagccgaatcaccctgtacgccgcatccgatgagaaaaataaactcctattgaccctctgcaaggatacacatcagtggagcatgaaactggctgccaggctaaaggaggtatccaaacgcgaggaggaggaggctgccgaatcacaaaggctacatgccagctacgcttgttccagaagtctgctcttgccctacaaaagtaaaaacgagcagcgaatatcggttatctcgagtaccagctccaacacaacctctgggatagtaagtgatcgagtgcactccgaagacgagctggagatcatgatcaatacaccaccagcacccttagctgctccgtcaacggaaagtttggccttggctcatcttttggacagacccagtgtgagcagacaaacttcgagcgtgggtcagatgtctctgaaggatttggaagaacaactggctgccttgagtgtgaggccacaagacgcgagttctaacggggccacgatcgtcacgaactcctctgttcagagaaattccatgggaacaactgccaatgattcatctaccgccactgattcacccagttcgcagcataacatcggctctcagtgctcatccacttgtagcactgtggtggtaacatctcctgtaaatggagcaggcgcttcctcttcaggtgctcccatacctgtgcactccacttcatctagtttggagcttggctttagtcacaccgctcaaaactcggccttgagcgaaacgagtcccgacgattttctctccacatcggcaagagaagaaacggagagtgtatcgggcgcatctggggtttatactttggcgcacggagctccacccacggaaacctcaggcgtttacaccatgcacagcagtgagctaactggacaatcatcggagatcgccgagtcggaaaagagttcgcactacgggatgttccagccccaaaaactagaagaaacccacgtgcaacattctgattccgtagatggaaaaaagaaagaagacttcagaccgcgatcggattctaacgtcagcacagggagttcctttagaggcgatggcagcgatccaacagacaacaaacattccttgctctccgcagaagagttaaccaatttgattgtgggcagggggacctaccccagtcggaaaacagtatctagtagccttcactcggactgtgattacgtgacgttaccactaggagatcaaggagaagaggaggtagaccaaccaccagcaccaccaccaccctacagtgctaggcatgagaaaactggtctctgtggcccacctatcgccaaacctatccctaaacctatagctgtggtagctcccaaaccagattcaccgccatgtagtccaccggtaccgccagcaccaattccagccccaccgccggctattcgacgaagagatccaccgccatattccatctctagcaagcctagacccacatccctgatatctgtcagttcgtcggcacatcctgcgcccagtgctgccggctcgatgagttctttaaagtccgaggaggttacagccagatttatcaccaccaggccacagattagtattctgaaagcccacaccagcctgattcccgatggggccaagccaagttacgcggcaccgcaccattgttcatcagttgcctcctccaatggatcggtttgcagccatcagttgagtcagcaatcgctgcataactccaactatgccggcggatcccaggcttcactgcaccatcatcacgtgccgtcacaccaccgacattctggatcggcagccattggaatagttccttacggtctgcacaagagcacggcatcactgcatcatcagcagtcatgtgtactactaccggttattaaacctcggcagttcctggcaccaccaccgcccagtttgccgcggcagcctccaccaccgcccccaccgaatcacccccatttggcgagtcacctttacgagagggaaatggctagaaaacaattggagctctaccagcagcagctttacagcgatgtggattacgtaatttaccccatccaggatccagctgtaagccagcaagagtatctggatgccaaacagggatccttactggcggcaatggcccaagcagcaccacccccaccgcaccacccatatctggccatgcaggtgtcgccggcgatttacagaagcaccccctacctaccactgactctgtcgacccactcacgatatgcatccacccaaaatctatcggatacatatgtgcagcttccaggacccggatactcacccctgtactctccttcgatggccagcctatgctcctcgtatgagcctccaccgcctcctccccttcacccggctgctctagcagcagctgctgcggcgggggctggctcctcgtcttcctcgatgtttgcgcgatcgcgatcagatgacaatattctgaactcactagatttgctgcccaagggaaaacgactgccaccgccgccaccaccaccgtatgtaaacagacggctaaagaaaccacccatgccggcgcccagtgaaaagccacctccaataccctctaagccaattcctagcaggatgagcccgattccaccacgaaaacccccaacgttgaatccgcatcatgcgaactcaccgctaacaaagacctccagcggcgcccagtgggcaggtgagcgtccgagacctgacttgggtcttggtctgggattgaaccggggaaacaacagcattttggcccagctgcaggcttcaatggtagcccagtctcatgcccaggcacaggcccaagcgctagacattgcgcttcttcgggagaagagcaagcatctagatctgccgctgatctcggcgctctgcaacgatcgctccttgctgaaacagactaaggttgttataaatccgaagactggccaggagatgcccacttccagtgcgcaaccttcaggtgccaccacaaatggagttgccaactcctctgcaggagcaggaaccctaagcaaggccagaaaaggatctaccgtaagccaccgtcatccgcaggacaaactgccgcctttacctgtccaacaattggcggaggccaacaactacgtgatcgatcccgctgtcatgatgaagcaacagcagcagcagcagcagcacaacaagaccagctagactcgacaagctaattggaaaccggaacggaagtggacattgggggtccaatacgacactcttctctctagttcgattgctgttcgaagtgctgatgtatgagtgtgcccaggtgaagagctaattctgcgttcggaaatttgcatagatcgggtggtgtagcgttatataaattcgatcacagtgtttcgaagggtaaagattcgccgggcacaaaagggtaaatgtaaacgaaaacccaccgtgagaaaccatttgtcagaacagcagaaacaatagctatttagtaggaactaacatgcatttaactagcgaagacagttttttagaaaaacacaaactagcaggtccaccaacttcagatggtaaaatacacgagccactgaaacaactgaatatcacagagtcaatacttaagcctacaggacgtgagcaacgtaacctcaaaatacacattcaaataatcagaacccagtctagtcacttaagggaattggtaacgtaaccacagcacagaccacaacatgacacaacatcggaaatagagaggaagcttatcaaaatgggaagcaacaatactcaagtataaaatacgaccactacctaatttactaaactacatcgtagatctttagtcttagctgcaaatacttagttaggccagaaatgcgaatacttaaaactaactacttccgcccaaacaactgtgattgatttttatttaaacttatactaaatttataactattttagtcaccaagaacaacgcaacatatactatgcaaattttttagtacgtagcaacgtcgctctttatacacacacacacatactcacaacgaatcgggccagcggtagaatcaagtgaaaagcattcaaatcggctatgaaatggtttgaaatgggtttgcttgc

SEQ ID NO: 8049 - protein, 1427 aa, DROSOPHILA
MRAFCTVSAPLEVCASSAEQLSPGSRFLALRLLGQQQPKTLYFLVDAKSRVREVYTQTCLHFATQGMLDTELFGLAVLIDGEYMFADPESKLSKYGPKSWRSSHTHGLDANGRPLLELHFRVQFYIESPFMLKDETSRHNYYLQLRHNILQRDLPREQAEQALVFLAGLALQADLGDAPPGTSNSKDDSGEETSASPSNGGRGLSATTTLPKISKRANERMLRLSTYVASTSKRETIPLPPSLPPNGADYYRIEDYLPSGLHTPWARSAMRACHREHLGMATAEAELLYIQQACSLHETINAHTYRMRLAKSEQGSGSAWFVVYAKGIKILGGESTNSSSNPETTTFLWPNITKLSFERKKFEIRSGESRITLYAASDEKNKLLLTLCKDTHQWSMKLAARLKEVSKREEEEAAESQRLHASYACSRSLLLPYKSKNEQRISVISSTSSNTTSGIVSDRVHSEDELEIMINTPPAPLAAPSTESLALAHLLDRPSVSRQTSSVGQMSLKDLEEQLAALSVRPQDASSNGATIVTNSSVQRNSMGTTANDSSTATDSPSSQHNIGSQCSSTCSTVVVTSPVNGAGASSSGAPIPVHSTSSSLELGFSHTAQNSALSETSPDDFLSTSAREETESVSGASGVYTLAHGAPPTETSGVYTMHSSELTGQSSEIAESEKSSHYGMFQPQKLEETHVQHSDSVDGKKKEDFRPRSDSNVSTGSSFRGDGSDPTDNKHSLLSAEELTNLIVGRGTYPSRKTVSSSLHSDCDYVTLPLGDQGEEEVDQPPAPPPPYSARHEKTGLCGPPIAKPIPKPIAVVAPKPDSPPCSPPVPPAPIPAPPPAIRRRDPPPYSISSKPRPTSLISVSSSAHPAPSAAGSMSSLKSEEVTARFITTRPQISILKAHTSLIPDGAKPSYAAPHHCSSVASSNGSVCSHQLSQQSLHNSNYAGGSQASLHHHHVPSHHRHSGSAAIGIVPYGLHKSTASLHHQQSCVLLPVIKPRQFLAPPPPSLPRQPPPPPPPNHPHLASHLYEREMARKQLELYQQQLYSDVDYVIYPIQDPAVSQQEYLDAKQGSLLAAMAQAAPPPPHHPYLAMQVSPAIYRSTPYLPLTLSTHSRYASTQNLSDTYVQLPGPGYSPLYSPSMASLCSSYEPPPPPPLHPAALAAAAAAGAGSSSSSMFARSRSDDNILNSLDLLPKGKRLPPPPPPPYVNRRLKKPPMPAPSEKPPPIPSKPIPSRMSPIPPRKPPTLNPHHANSPLTKTSSGAQWAGERPRPDLGLGLGLNRGNNSILAQLQASMVAQSHAQAQAQALDIALLREKSKHLDLPLISALCNDRSLLKQTKVVINPKTGQEMPTSSAQPSGATTNGVANSSAGAGTLSKARKGSTVSHRHPQDKLPPLPVQQLAEANNYVIDPAVMMKQQQQQQQHNKTS

SEQ ID NO: 8050 - DNA, 5283 bp, DROSOPHILA
tgaagcgaatcatcatcgactcggagatcatgcaggaggacgatctgccctggccgccaccagatcgcgtgggtcgacaggtcggtttgccgcactccgtaactagagctcaactaaacaaccatgtgtctttttcaggaactggagatcgtcatcggagacgagcacatctcgttcaccacctcgaaaacgggatcattggtggacgtgaaccggtcaaaagatcccgagggcctgcgatgcttttactacctggtgcaggatctcaagtgcctggtcttctcactcatcggcctgcatttcaagatcaagcccatataagccgtagccaccacctcaagcatagcctatttatcggacggacacatcgtattttataatggaacttctacgatacttgtaattgtataagctatacctttgtactttttggtacagtttgcagtgaataaaaaaggattggaagatactttgttttcaaagtcttgtgtacagtctagattgtgctatagaagtaaatagcaaatcttcgatgtagtagcagacaacaagtttaacaataatagcaaacacaatagtaaaccatttaacttttgatgttataatgtgtaggtatatttgaaaaatacaatttaatatctattgtgtttgaataatatacatactcgagataaaaatttaaagtcctttacatttgtacaattcgtatatgtctaaaacagcttaagctaagtgattaatatctcacaaactggcaaattgtcttaacgtttaagtacaagcagtaacttagcctaagataatgatcggtatcttaagaaactggaataaaatacgcactcacatacggttttgagacttgcaaagggtttggcttacatatgctactaaattcagtctttggggtgagtactttgctaacgaaagtacaaactaagggcctgcaggcgatgcaacactatagaaagctcttatagagccgaatgcgtaggtctcagagtcataattgtggctgctgatgcagcgccaaagtggctgagatattgttactgggtcgctccaaatagctgccatgtcctggcacgggcattgacattggcatctcaagatgctggtggtggtgattcagctgcgcttgctgtagatgctgctgcggaagttgctgctggtgggagagttgtgccttcaggagactgggagatgcctgcagcggagtgttgctggacacaccgacgctactgccgccaggactgggaccaccctccttcagcggaacgccgatagtgagacgcacatgaagaccagactccttgatgagattcactacatcgccgtgcgacatgccagctatctcgatgcggtttactgccactatgcgatcgcccaccttgagctctccacaacgatccgccggactgccgggtattagtttcccttaatacgttgatatgttagatgaattgaaacaaagtctaaagtcagtggcatacctattgtcgagccgtaatagtggttcgatgatgatatgataacaaatccgaagccctcgttttcatgccggctgacaatcacatcataaggataacgacgcagttgtgtgctgactggcgcctgctgcaaaagcggagttcgacgacggcgaaggatcatggtaacctgcccgcgtagcgccgattctcccaccaaagaaacaactttgtgatgcgacgaattaagctgaattaaacacagaagttagccataatttaactaatgtgtgcataagttaacgtaccacgttgatgccatcgatgctcaggatttcatcacccgtattaatgcgctgatcctgatcagcggcgccaccaggcactatgtggcccacagtaacctgagaaccttcctcggtgccgccgactatgcgaaagccgaaacccaaagcctggcgctcaagagtgacctcagttaactcgcactggtccgcgtcctcggagacatccagcaaggctccgtttcgccagcttggcgaatgctgcatctgctgcggaggatccaggttggcgaagcccacacgcctgcgatcgctaagcagctcgttgacgcgtcgttggattcgttcgttttgcagatgcgcagtctgcagcggcgagtactgaccagtggttcccgacatggcagcctgctgggcctggacaaagtatccagggcggtagcgctgcgcctggcagtcgtagcagtagcaagactcgtgatgagccagcggtaggggtaggggctgcatactgggcggcatgccgtaaatgccaccattagcatctccctgaagcgtcacctccgccagacgctcgctcaggcgactaatcttgggatatggatccatatagggaatgtcgtccagctcctgcaaactgctgttcgactttccttgggtctgcagctgaagcggtttcctctccgcggcagcagcaccgtcaccctcgtcgtccacctcgttgttcggcgattgaatttgaacccgtgaccgtcgcgtgtccactagtggtgtctttgggcgcatgggtagcacctccttcacctgggtgctgtacaggtccgccgtgggcgtcttgctgcgaaacaggccgctgcccacaaagttctttcgcagcttggccacattacccacctggttaagttgggcgagcgtgttgttggccggcggatccggcggcgttcgctgaatcttcacagctgtgggcgttgtctggctgcactctttaagaagctctaccacgtagaagtgcggcttgttgcgcacgtttaagccattgatttccagaagaacgtcaccttccatcagctgagtgcagcagttgcgatccaggatcttctttacgatctgaccacaggcggaatcggcaatggtgaagccgaaacccatcgagcccttcatgatcgaaaaggtatagatctcgggtttcttcattagaatgaaaccactgccggaaccgctggttttcttcgctccctcgccggacaaatccaagaagttgtaattgccgtccatgttgaggcgtcgctgcttgtccgactcgcgcccatccaccgccatggtggtcactacctcggtgttgggatcattcggatcaaagggcagcggatatccacggcaaacttcaagggcggccctctcgccaggcagaatcgactgaaagatattgaccatgtcgtggtgcgtgtagcccagcacacaggtgtcattcacatagaccagaacatctcccgtttgcagctggccatccagccaggcaggtccgtttggcaccactgtcttgatctggagaaactcctccacatccccaccagcgctcccgtcacttcccacaatcgtaaaacccagaccgcgggatgacttcagcagcgtagtgttgatacgctggccctgcagctcggcgggattgcgggtgaacttgtacggcagcttcattgggctctcatcctcctcctgttcgtgcgcttctgccgcctctgtgggcattgtttctgacaacgcagtgggtgtcttggagcgctgttcctgcatctgctgttgttgctgttgcatctgctgttgctgttggctctgctcggccgcccgtcgcttggcctccagcactgggttctcgtactgcgtccgccggtttacatgatcgataaagtacattccatacatggagtcctcgatcttctcccatccgtaaggcagctcgtcctcgcagcaatcctccagtgactttttctggtacttggagagccgcggatccagccagtgagaggtgcccgtgttgtgactgtacgatatagtgtataaggtcaatatatatgtttctagcttcttaccatgtattatactcactcgatgaagtagagctcgccgcgttcagtgtatgctgtttcccatttgggcggaagtggtcccaatccgtcgcccggatcatcgtgactctcgtggttctgatgctggacatctccaactccgcactcgctaccaaggctgctgtcccccgtctcgccgttgtagtaggtgttctgcagcaggttctctgtggaatatatgtaacatattacttgattatttactgtacgaacagtgcagtttatgccagttaatcagtatagaaaatcaatcaccaaacccaaatcgttcaatgaaccccttttacaggtggcattttgagctggtgaagttttgatgctcagccagccgaaaatagttggtgtggtcttttgaaattgaagcacatagacaacgaaccccaatccctagtccgcatctcgcagcccattgcccagcccaatccccgccagctctattgggagtccggtgaagcgtgaagcgttttcgattggggcaagccagaataataattattattagcagttgccagttggtggcagacaggctctggttagactgtgacctactttgctggcccacgagatggccagtggccactacgagtaagcactcactcactcatagtccccaatcaagtcggatgagtaatggggaaatgttaattatggccaagcgaaagaagtaaatgagtggcctatgcttttagccaagttgcccttggtgatttcgcttggcaagccgctaagagatgatcagaaggtaagcttcaactatgaagtaaccattgaagaactgaatattatcaaagttggattaacatatgctgaaatatgcatcgttgctcattaaaagagtgaatgtaaagttgtcgttagacttttttttttagaccatgcgtcgttaacccctttcgaggtgcatgctccaacccagttatacatatgtacatatataaacacatccagagataaagccatgcgaatagggctaatcgaatgtcgggagcgccggagagccaacagccccagcggagcatcattcaaaacgtattgcgaatgatttgcatagaaagatgaatatttatgccagacactttcaactggaacatggaagtggagtatgtagatggggctgggcaggtgacacgtctttaaacggtaaaagcgccatcgctccctgtttgcattggctccaaaagagtgggacacaaatggagagaagctcgtttgaataaccacactgagtgaaaagaagtttgaactaatattgaatacagtgaatactatatattgaagtatcattaagatttatactaaaaaattattaaaaccaaatactaattttattgattttgatttttccctttaatatttataaaaaataaaaaagattgaactatttttttcgtgtgcatttcataagtttat

SEQ ID NO: 8051 - DNA, 2781 bp, DROSOPHILA
atgggctgcgagatgcggactagggattgggagaacctgctgcagaacacctactacaacggcgagacgggggacagcagccttggtagcgagtgcggagttggagatgtccagcatcagaaccacgagagtcacgatgatccgggcgacggattgggaccacttccgcccaaatgggaaacagcatacactgaacgcggcgagctctacttcatcgatcacaacacgggcacctctcactggctggatccgcggctctccaagtaccagaaaaagtcactggaggattgctgcgaggacgagctgccttacggatgggagaagatcgaggactccatgtatggaatgtactttatcgatcatgtaaaccggcggacgcagtacgagaacccagtgctggaggccaagcgacgggcggccgagcagagccaacagcaacagcagatgcaacagcaacaacagcagatgcaggaacagcgctccaagacacccactgcgttgtcagaaacaatgcccacagaggcggcagaagcgcacgaacaggaggaggatgagagcccaatgaagctgccgtacaagttcacccgcaatcccgccgagctgcagggccagcgtatcaacactacgctgctgaagtcatcccgcggtctgggttttacgattgtgggaagtgacgggagcgctggtggggatgtggaggagtttctccagatcaagacagtggtgccaaacggacctgcctggctggatggccagctgcaaacgggagatgttctggtctatgtgaatgacacctgtgtgctgggctacacgcaccacgacatggtcaatatctttcagtcgattctgcctggcgagagggccgcccttgaagtttgccgtggatatccgctgccctttgatccgaatgatcccaacaccgaggtagtgaccaccatggcggtggatgggcgcgagtcggacaagcagcgacgcctcaacatggacggcaattacaacttcttggatttgtccggcgagggagcgaagaaaaccagcggttccggcagtggtttcattctaatgaagaaacccgagatctataccttttcgatcatgaagggctcgatgggtttcggcttcaccattgccgattccgcctgtggtcagatcgtaaagaagatcctggatcgcaactgctgcactcagctgatggaaggtgacgttcttctggaaatcaatggcttaaacgtgcgcaacaagccgcacttctacgtggtagagcttcttaaagagtgcagccagacaacgcccacagctgtgaagattcagcgaacgccgccggatccgccggccaacaacacgctcgcccaacttaaccaggtgggtaatgtggccaagctgcgaaagaactttgtgggcagcggcctgtttcgcagcaagacgcccacggcggacctgtacagcacccaggtgaaggaggtgctacccatgcgcccaaagacaccactagtggacacgcgacggtcacgggttcaaattcaatcgccgaacaacgaggtggacgacgagggtgacggtgctgctgccgcggagaggaaaccgcttcagctgcagacccaaggaaagtcgaacagcagtttgcaggagctggacgacattccctatatggatccatatcccaagattagtcgcctgagcgagcgtctggcggaggcgcagcgctaccgccctggatactttgtccaggcccagcaggctgccatgtcgggaaccactggtcagtactcgccgctgcagactgcgcatctgcaaaacgaacgaatccaacgacgcgtcaacgagctgcttagcgatcgcaggcgtgtgggcttcgccaacctggatcctccgcagcagatgcagcattcgccaagctggcgaaacggagccttgctggatgtctccgaggacgcggaccagtgcgagttaactgaggtcactcttgagcgccaggctttgggtttcggctttcgcatagtcggcggcaccgaggaaggttctcaggttactgtgggccacatagtgcctggtggcgccgctgatcaggatcagcgcattaatacgggtgatgaaatcctgagcatcgatggcatcaacgtgcttaattcgtcgcatcacaaagttgtttctttggtgggagaatcggcgctacgcgggcaggttaccatgatccttcgccgtcgtcgaactccgcttttgcagcaggcgccagtcagcacacaactgcgtcgttatccttatgatgtgattgtcagccggcatgaaaacgagggcttcggatttgttatcatatcatcatcgaaccactattacggctcgacaatagggaaactaatacccggcagtccggcggatcgttgtggagagctcaaggtgggcgatcgcatagtggcagtaaaccgcatcgagatagctggcatgtcgcacggcgatgtagtgaatctcatcaaggagtctggtcttcatgtgcgtctcactatcggcgttccgctgaaggagggtggtcccagtcctggcggcagtagcgtcggtgtgtccagcaacactccgctgcaggcatctcccagtctcctgaaggcacaactctcccaccagcagcaacttccgcagcagcatctacagcaagcgcagctgaatcaccaccaccagcatcttgagatgccaatgtcaatgcccgtgccaggacatggcagctatttggagcgacccagtaacaatatctcagccactttggcgctgcatcagcagccacaattatga

SEQ ID NO: 8052 - protein, 922 aa, DROSOPHILA
MRTRDWENLLQNTYYNGETGDSSLGSECGVGDVQHQNHESHDDPGDGLGPLPPKWETAYTERGELYFIDHNTGTSHWLDPRLSKYQKKSLEDCCEDELPYGWEKIEDSMYGMYFIDHVNRRTQYENPVLEAKRRAAEQSQQQQQMQQQQQQMQEQRSKTPTALSETMPTEAAEAHEQEEDESPMKLPYKFTRNPAELQGQRINTTLLKSSRGLGFTIVGSDGSAGGDVEEFLQIKTVVPNGPAWLDGQLQTGDVLVYVNDTCVLGYTHHDMVNIFQSILPGERAALEVCRGYPLPFDPNDPNTEVVTTMAVDGRESDKQRRLNMDGNYNFLDLSGEGAKKTSGSGSGFILMKKPEIYTFSIMKGSMGFGFTIADSACGQIVKKILDRNCCTQLMEGDVLLEINGLNVRNKPHFYVVELLKECSQTTPTAVKIQRTPPDPPANNTLAQLNQVGNVAKLRKNFVGSGLFRSKTPTADLYSTQVKEVLPMRPKTPLVDTRRSRVQIQSPNNEVDDEGDGAAAAERKPLQLQTQGKSNSSLQELDDIPYMDPYPKISRLSERLAEAQRYRPGYFVQAQQAAMSGTTGQYSPLQTAHLQNERIQRRVNELLSDRRRVGFANLDPPQQMQHSPSWRNGALLDVSEDADQCELTEVTLERQALGFGFRIVGGTEEGSQVTVGHIVPGGAADQDQRINTGDEILSIDGINVLNSSHHKVVSLVGESALRGQVTMILRRRRTPLLQQAPVSTQLRRYPYDVIVSRHENEGFGFVIISSSNHYYGSTIGKLIPGSPADRCGELKVGDRIVAVNRIEIAGMSHGDVVNLIKESGLHVRLTIGVPLKEGGPSPGGSSVGVSSNTPLQASPSLLKAQLSHQQQLPQQHLQQAQLNHHHQHLEMPMSMPVPGHGSYLERPSNNISATLALHQQPQL

SEQ ID NO: 8053 - DNA, 3515 bp, DROSOPHILA
agaatttaaaatcagttagttggataaagtatatttccccaagaagccaaaatggattagatttgggcaactttatttaaagttttatatctacctccttgccacatagtataatatgaaaatgccgataaattcgtccctcgcttgagacttaatttttcccagtgtatgggcatcgattatgcagcgttcctatcgtgatttctatttgaaacaaagcacaggcggaaaaatagcaatgcgaggacacagcagctaggagcaggagcaaaaaatggcagcaaagaggtttacaacttctcgtaatgcggcttaaacgatttgcgagtttatggaaagccaaacacactctcatcgcaaacacacacgtcgaagtcatacggctgtgattgtgtcagtgactgtaactgtgtctgtgtgtctgtctcgtgagcgtggccatgtgtgggtgcccaggataagcggcggggtcgggcatattgtaaaacaaatggaaaattgctttttgatgtagtcagtcaactttgccttgccggctgcctgctgccatcatcgacaacgatgacgatgatggaaatgggatgggatacgggaaaatgagaaaacgggaatggcgaaacggccaagcaatgaagatcagtggtgaaaagtaaatcagctatttccagaacccttgttgactctttcacaacttttaatcagaaatggttatgtcaatttagtcccttttctcatcaaatattcgaccatttttaacagatttttataacgttgatttatatattacacatttttttgcttaaaatgaaatttgaagtctaatgtgagaaatcttacgtaaacttttaatatttaatgtttttgagtgttaaacttgcaaatagttgccaaaccgaaagtctgaagtggccaacactgattacggcgagatggtttccctgtttggcctggctgcaaagttataagggtttaagcgcccaagagtgtgctgcactttcagcggctgcaatccttaataccatggggcttatgtgtgagagccaagaaaaggacgacgatgatgaggaagccgcatccactgtcgccagatgcaatattgctccacgctcctcaacgggccatgcaaatgccagtgtgttcagccagtgccgaaggcttttaaaataacaaagggtgccggcagatctcccttttaaattaaggcatatatgtggtggcctacagattacactaagagaaaactatgttttttctgagtctttaccgaaagtcagcaagcaccaatctcctgtcaggtcataaaagaatactatacttagcaatgcaaaattccataccacaccgcacagatttgttaatgtatcataattttgtaagaatttttcccactgttctacagaccctcaaccttcatggcgctgcacccttttgaataaatctcaactcctttacagattttggccaggccgcgctgcgtgacgtaaatctgctggtggagcctccggcggtgcgaaggggtcagtctgtggccctgcggtgcgattaccaattggtggaggcgcccctgtattccattaagttttaccgcggccagatggaattctaccgctacacaccaggcgagtatccgccaaccaaggtctttcagttccccggcatcagagtggacgtaagttgctgtcttttcggagttcggcttattgtttgacggattggaatgggctcggtattttcgaattttcccacaggagaacggctcgaatgccaccaccgtgctcatccgcaacgttagcttcggcctgtccggacaattcagctgcgaggttacggcggatgccccgctctattccacggccacagccttcgcccagatgcaagttgtgggtgagtatctgcgccacgagtatctgacaggagctcacgggtatctgacaatgacaaacagatcgtgtctcattagtcgctggcaaaggcgtgactgggaagtgcagcgaacaatggtccacgacgggtccttgtcgctccgctgccagcaattaaggacccaccaaagtcctgaacactcttgtactctggggtaactggtatttagggtatggcattttctttaaacaaaaaaactgttccacgcctttcggaatgcaacgagtataatcgagaagcttagaagagtctaacaccacaaatcagcatacactcagacttcaatgtaatctctaattttatggaactagtgggttcagagttgaaccgatgattttaattatttatatttttatatgtttgtttatatgtttatatattgttcttttcagaatttccggagaagcgaccgcagctttttacggaacactcgcgatacgaaccaggagatgttttgcgtgcaaattgcagtactttgccatctcggcctcgagctgatcttcgtttcaccatcaacaatattcccgtaagtattcctttgtattcgaagcataaacagggatttgaaaggcttattaaaagctgaaacaaatgtacaagtgtacaatacgaataattgtcaggatccaaagagtctgatccaagtaaattcccatagccttgggctaaagtgctttacaatcggcaattaaaatgttttacatcatgccgcgcattgattgttaattaatgtctgggtggttcaagatgtttgggccaagttcgtaggggatttgcctaattaaactgctttgacttgcctaacggcatcgtaaatcctgcataatggcgcccaccactgctttttgggaacatgtgtggctttcggttaatccagggcgacgtgcctcgcaaaatttgttctttatttatgaatattgtgtaatttaatcagagccaagcgactgaattacaaggggtctcatcctacccacttaattaaaaatttcaagtcggagcccaagcaagaaaccgcaggatattcctcatacccatacccttaagagccccgagaagtcaataaagcaaaaaagggttgtatgccaggatttgatttgatgccgtgatttcctcttttgtcatttatcataacgatatggaggagaggcttagcaaacaagtcatctgcatatatatatgttttaacagcaatcttcacgataataggaacaaagaagtctagcttaaagtataaaatatgtacaattgctttaaaatatgctatgcatttggcttaaaaattttaatatttaacatttatgtaaaagatgtatcataattctgattcactttcagtactaattacttcgttatatatctgcgaatacttagagttatatttcattcagcataggcttttgatactgtgcaccttgtatcttcttgctaggataactatacacattgccacgatataagcctctaagatcattagtcatttgaaggcgcttccatttctgcatccattctgcgagtgccgctaatcagttgcataaatcaacaacgaaatgcttccggcaatcgttttaaagcgaacccagatccaaattttt

SEQ ID NO: 8054 - DNA, 683 bp, DROSOPHILA
cggctgcaatccttaataccatggggcttatgtgtgagagccaagaaaaggacgacgatgatgaggaagccgcatccactgtcgccagatgcaatattgctccacgctcctcaacgggccatgcaaatgccaattttggccaggccgcgctgcgtgacgtaaatctgctggtggagcctccggcggtgcgaaggggtcagtctgtggccctgcggtgcgattaccaattggtggaggcgcccctgtattccattaagttttaccgcggccagatggaattctaccgctacacaccaggcgagtatccgccaaccaaggtctttcagttccccggcatcagagtggacgagaacggctcgaatgccaccaccgtgctcatccgcaacgttagcttcggcctgtccggacaattcagctgcgaggttacggcggatgccccgctctattccacggccacagccttcgcccagatgcaagttgtggaatttccggagaagcgaccgcagctttttacggaacactcgcgatacgaaccaggagatgttttgcgtgcaaattgcagtactttgccatctcggcctcgagctgatcttcgtttcaccatcaacaatattcccgtaagtattcctttgtattcgaagcataaacagggatttgaaaggcttattaaaagctgaaacaaa

SEQ ID NO: 8055 - protein, 215 aa, DROSOPHILA
MCESQEKDDDDEEAASTVARCNIAPRSSTGHANANFGQAALRDVNLLVEPPAVRRGQSVALRCDYQLVEAPLYSIKFYRGQMEFYRYTPGEYPPTKVFQFPGIRVDENGSNATTVLIRNVSFGLSGQFSCEVTADAPLYSTATAFAQMQVVEFPEKRPQLFTEHSRYEPGDVLRANCSTLPSRPRADLRFTINNIPVSIPLYSKHKQGFERLIKS

SEQ ID NO: 8056 - DNA, 2797 bp, DROSOPHILA
ttaataattagatgtaatgccaagctcttcaatggaaaatcaatggaatgcaacgaatttgaattcaaatttggcgccaagctaatgtggtttaggtcttgacttaacgcgttacatttggtattttaccaactatacactgcgaccacacacatcagctggtcgaaatattttcgcaagtgcagtttcactattttatttactttacttaaaaatagtttttaaaactgctgattaatcatggaaattccggatacctactacagcaaagatgaatacgtagagacggcaagtattcgcactgacttccgctttgggattccatttaagcactaagagatgacctcatcatgaccaaaaaactgattgtttacaggcttcgggtaacaaagttagtcgccacacggtgctctgtggttcccaaaacattattttgaacggcaaggtgatcgtacagagcggcgccatcattcgcggcgatctggccaatgtccggacgggaagatattgtgtgattggcaagaactccgtcatccgaccgccgtacaaacaattcagcaagggaatcgccttctttcccatgcacgtcggtgagcatgttttcgttggcgaaggagcagtcgtctcggcggccaccattggatcctatgtgtacatcggcaagaatgccatcatagtaagctattacttattgttatacccttgtaatccatttacttttaccatctttcagggccgtcgctgtgttttgaaagactgctgtgtaattgaggatggggctgtcctgccgccagaaactaccgtgtccagctacatgcgttacacggcgaggggaaccatcgagggtggccagggcaatccgtattttgtgcccgccgccatgcaggacgagatgatcaactacactaagtcattctacgagcatttcgtgagggctccagcgccagccagctgaaaatcgtggtgtctaccaattccatcgacagaaaacattatttatgaaataaacatattatattagttattctataagtatgcgcatagtttgactattaagtgattaatctatcagtcccgtttcgcagtcgtaggcttcctcgccggactcgaaaatgggaaaactcatgccagtacgacgggcaatcaccgaggccagttcctcggagttgttctccttgcgcggctggatgtatcggtccagcagaaggaccgtggccgtattccgacaattggacacagtggcggttatgtgaagcggcgtctgcttgccgtccgattccgcatttacatcggcgccaaactgcagcagcaaatgggcgcaatccgcattgttccacttgcaggcggagtgcaatggcgtccatcccagctccgtgcgggcgttgggattggcatggtactgcagcagcaacttggccatatccacaaagttattataggcagctcggtgcagcggcgtgtatccgtcgttatccttggcgttcacggtgtctgcgtccagttttaggatttcccgcacctcgctgatgcggttctcgttcaccgcccacagaatcatgcgttcaatgctgcctatgatgatgtttaattaaactatttctctaaaatgtattctacttactttgtgggttcttgtcctcttcgatcagttcgtcggcatcgtcgtcccagccgctcacgaacattccgcgcggcactttggcgtggcgcagcttctccacctgtgatttttcatcatcggaatcgtagtcccccattttgtggtaatatattaataataagccggaatttaaacagctcaactttttgttttctatttctcaaagtgaccgttgcttagccgcttaagtacacttaaaaaaatactaaacacttaaaaatatactaaacgaagagtggagttttaaaaagaacagtacatttggtttttcaaataaaaaaaaaaaaactatttatataaataatggtaggaattataaaaaaattattcttttatttgaaaagtctgccatttaaaaaaaggctgtattatttataatattcatcaaaatcaaattaatcaaagattattaagccattaaatttgtgttgaatacataaatgatatacatcattttatatcatcatttatatattttatttttagctatatatgctttatatagttcatttcaatcaattaatgatttcatttatttacaaaaacaataatttttcgattacatttttctgttagcagtaaacggccactctagcacactatactagtaaatccgagaaaaacatctgcttccaagtttgtttgtttgtttgttccttgaaaccaggacgccatgtcgaatccgcaggaagaactactgccgcccagcgccgaggacgacgagctgaccctgccacgggccagcatcaacaagatcatcaaggagctggtgcccacggtgcgggtggccaacgagagtcgcgagctgatactcaactgctgctcagagttcattcatctgatcagttcggaggccaacgaggtgtgcaacatgcgcaacaagaagacgataaacgcagagcacgtcctggaggcgttggaacgcttgggttttcacgactacaaacaagaggcggaggccgttctgcacgactgcaaggaggtggcagccaagcgaaggcgccagagcacgcgcctagagaacctgggcattccggaggaggagctgctgcgccagcagcaggagctgttcgccaaggcacgcgaggagcaggcgcgcgaggagcagcagcagtggatgagcatgcaagcggcagc

SEQ ID NO: 8057 - DNA, 748 bp, DROSOPHILA
ctgtttaaattccggcttattattaatatattaccacaaaatgggggactacgattccgatgatgaaaaatcacaggtggagaagctgcgccacgccaaagtgccgcgcggaatgttcgtgagcggctgggacgacgatgccgacgaactgatcgaagaggacaagaacccacaaagcagcattgaacgcatgattctgtgggcggtgaacgagaaccgcatcagcgaggtgcgggaaatcctaaaactggacgcagacaccgtgaacgccaaggataacgacggatacacgccgctgcaccgagctgcctataataactttgtggatatggccaagttgctgctgcagtaccatgccaatcccaacgcccgcacggagctgggatggacgccattgcactccgcctgcaagtggaacaatgcggattgcgcccatttgctgctgcagtttggcgccgatgtaaatgcggaatcggacggcaagcagacgccgcttcacataaccgccactgtgtccaattgtcggaatacggccacggtccttctgctggaccgatacatccagccgcgcaaggagaacaactccgaggaactggcctcggtgattgcccgtcgtactggcatgagttttcccattttcgagtccggcgaggaagcctacgactgcgaaacgggactgatagattaatcacttaatagtcaaactatgcgcatacttatagaataactaatataatatgtttatttc

SEQ ID NO: 8058 - protein, 215 aa, DROSOPHILA
MGDYDSDDEKSQVEKLRHAKVPRGMFVSGWDDDADELIEEDKNPQSSIERMILWAVNENRISEVREILKLDADTVNAKDNDGYTPLHRAAYNNFVDMAKLLLQYHANPNARTELGWTPLHSACKWNNADCAHLLLQFGADVNAESDGKQTPLHITATVSNCRNTATVLLLDRYIQPRKENNSEELASVIARRTGMSFPIFESGEEAYDCETGLID

SEQ ID NO: 8059 - DNA, 6465 bp, DROSOPHILA
gccggatcatgtcgggggcatctttgaaggccggatttagcgacgccagtatgctctggaactcgtgacgatcgatccggtactcgcatgacaggcacttgaccacatagccactgccatgaacctccacaacatttcggctgcccgccttcgtgtgcagccggtccacgttctgggtgaccaccgcctggacccgctcctcccgctcgaatctggccagcgcgtgatgcgtggcattgggctgtgtggcagaaaacttgggccagcccacaaagttcctggcccagtaccgcttgcgcaccgccgacgacttgacgaactccatgtgctggacgggcttgtggttggagcgggcgtagaggcccacgccttcggaacggtaatcgggaatccctggaatttatttcaagtttttagacagccagaaatgttgatttaaataaaatactaatgcgaatccaagtataagctagaagtcacttgcattagcattatataaataaatgaataatgtacaagcttttggaagtcaatctgaaatatttgtgttaatggcttctgaacatagaaaagtcggaaaatcatgaaactcacccgattccgtcgagatgccagcgcccgtgagaaccaaaacattcggtttggacaggagaaagtcctccagccgtttgatgtcgtcctccacgacgggcttgtgatgcggcacgtactcctgcctggcggtggagctgcgcaagctggtgctccggaagcggagcagctggcccacacgcattgttttgttatgtattattgcaagtaatatttggttctttttcggttacgttactagaggtgagcgcacgcacatcgatggcaactccttcagtcgcttaccgctgtaaatcgattgtatgccccgcaatggcaatcgataactgtacgacccccatcgatttttacacgccatcagccgatagcagcttgccagcagctaccatctctagagcaacggctgcagaaaaaagatattctattcggtaatttacgcgtggatttatcacgcgccgtgaacccagaagttacaggccaacctttccgagattcgatcagtgaaccttgcgggcgtccagcttcgtaagcacgaaacaggacattcacacacatatttatcactccgtgtggcgtttgcgcccatccgtgcgtgcctgtgtgtgtgtgtgtcgctcgtctgtgcgtgcgtgagtgtgtttgtgaattgtcggctttaattttgcaagctcgctaaagttgtgttttcaaaggacatcgcaaaggagtcgcagcgcacaagatgtcgtacccgccgcgggcgcccatgccgcccttcatgaatacagccataccgccgccgcacgtaagtccaccttttctgggtcacaatcaccatgaagctgtcagaatctgacgccaaatccttttccacctactccatccgctttcagataatgcagaacatggccaagccgccgaggagcttccgtaactcggccaccattagttcacagccgacagtataccaacgtccgccggagccgcaaccacagttccgcggacccatcattaccgtcttcgtgggcaacatcagcgaacgcgtcccggaggcactgctcaaacgcatcctgaacgcttgcggcgtggtaatcaattggaaacgggtgtccacattcggcttctgcgaatttgagtacgttcaaccataaatcggtcatcccaaaatcactttagaaggcttagggcagcacaagaaggtttcgttagttaaataacgctagaaaagtaattgaagagccattgcataaacagcagcataacgcatctcactcgttgtttgatgcgtttcctagaatagcttagcttatttataaaaagattgaaatacttctaggaatgctccctactgcgacagctcttcaaattctatatgcgcgatcgaataactactcgagcacttttaagtaacctaactttaagcaatacaacacagggttgagcttgcatacatttatgtttagagccaacgggcagtccacccatttggctctccaattgttcctataaatactctgcctaaccgctttccttggcattctttcagcggacctattgcggcaatgcgagccgttcgcctgctcagcgagatggaaatcgatggcaagaagctggtagccaaggtagatgccaagaacaaggttctcatcgaggattacaaggagcaggagtgcaagaacggcgatcgttccaacccagtggacgaaaagaccgaggacgagttcgccattgcccagatgcacgaattcctggaagagcacaagcacgagttcgaaggattcgatagcagcagtcgcgccgatttgtacggcagcgccaatcgcaataagaagacacgccgcgaggaagacataaagatgaaggtgctaagcgaaaataccctggaggaagaaaagcgcaacttgattagcagcgagataggcaaattccgtatgcgtgcggaggaagacgagcaccgcaaagagctggagaaggagaaggaaaaggagaagcttgcggccagcaaggagaaggagcgcaaaaagcagcgcgaaatggagcgaatgtcgtcgaccagcaagtctggcagctcatcgacagcggccgccagttcctccagcgctacagccacctcttcgacacccgccgccgatggggctgacatgtcggataagacagacaaggaatcagtcgctgttgtgatcaaggaaacagttaaggagtcaaaggaatctgcctcctccaccggacgcaaggagtcgtcgtcggctgccatcgagataacacagaaggagcgccgctctgactcaaaggagacacgtcgccgccgctccaaatcccgctccaaggatcgcgaacgggaacgtgagcgtgagctgcgcgagcttcgcgacaaggagcgcgaacgtgaaagggatcgggagcgtgagcgcgagcgggaacgcaacgaaatgcgcgaacgggagcgcaacgagatgcgcgaacgggaacgcgaaagggagcgtgaacgggagcgcgaggagaagctgctgaagccagtccgggacacgtggcgtgaaaaggaaatggaggacgaactgcgcgaccgcaagaaagccgagaagaaggcgcgcgaaaaggagatcgcctaccagacgcgcctaaccgactgggaggttcgcgagaagcgcaaggctaaggagaacgagaaggtaagtgaccacacagtttgcggcacatgctctcaatcaaccattactaactttatgtccaacagtaccgcctgaaggagttgctgcgccaggaggagcgcgagaccgacgccaagcgactgaaggagttcgtcgaagattacgacgatgagcgcgacgattctctgtattatcgcggccgcgagctgcagcagcgactggcggaacgagtgcgcgaggcggatgccgattccaaggatcgcgagaaggaggccgaagagttggccgaactcaagtccaaattctttagcggggaatacgagaatccgtcgctggagttcgaaaaggcgcgtctcgagatcgagaagctctacgagccgcgcatcctgatcaatgtgaaccaagagcctccggcagcggcgacatcatcggtccaccagcgcaagcaggccgcctcggcgccgggcgaagacgacgaggggcagaagcagcgacagaagagccagcagctggacagctacgacccagacatggccggtacgaatgatgatgactccatatcgaacgacgaccgtgcatccatggccgacacagcctccaatgccagtggtgtctatgccaagaacaacaacaacgaccagtcgctgtcgaatagcttgagcaggcataacagtgagtcgcgcgattcgctggcccagatccatactcccacgcagagcgcgatccttaatgaccaagaatcgggtcacgatgccatactgccatcggccacgccgcccatgaccatgccccttatctcgctgacgctgggcaataacctcaagaagaagaagatagaggccacaggcgtgttcgtcaacgacgacgacaacgatgagaacatcaatcccaagaagcgcaaacttgtgccgctaggtgagttttcgatcaactatattagatcgtagagcatcctctgatgacttgctgtttgttaccttgccttcgcagactacgatgataacataagcaacaccacgccatccaatcatgcagccagcagcggcagcggagctgcgaacaacagcagcagcagcaacaacaataacagcagctcggcggatcgccaaagctccgccgtgtcggcggcaaccgctgcagccgctgccgttagccagaagatcgcccaggctttcggtggcggctcatcggggtcgggttcgggatccggctccggttcgaacgcatcaggcggcaagaacaacggcggcggcagcagcagcagcagcaacaacaaacataacagcaacagcaaacatggtaagaatgaggcagctgcatctgctggcagtagcgcagatgctgccgctgcgaacatcaaaaaggatgagaatggtgcaaaggtgtatgatgaaaaacggcggcatataaaaagcattattgacaggatacccacgcaaaaggaggagctatttaattataagctagaccgcaacgagattgacagcggtctaatggaacgcaaaatacgtccatggataaataagaaaatcatcgagtatatcggtgagccggagccgacgctagtggactttatatgttccaaagtgttggccggcagcccgcctcaaagcatcttggatgatgtgcaaatggtgagtagtttgaagcgatacgatacgatacgataaccactaccattctatgaactaatccaaactctatccctctcgctctgtttcaatgtttcaaatcttcaggtactcgacgaggaagccgaggtctttgtggtgaagatgtggcgtctgctcatttacgaactggacgccaagaagagcggccttgcggggaagtagtaaggagatgggagagatgcccgtcgtgcgcatcactggggaactgggcgggagcaggtgcggatccgaggtatcgatggaggagcaacagcgtgaagttagattctaagttactcttacggaacctatgcgattacaaaaatgtacataaggggcgtgctccgggaattgttgcggccaaatgtccagctttgttttctaagcatccgtcgcgtgcaagggatttacaagaaattgatgaatagcgagcgagccaatcgtgaagaacagcttcattgatttctaaatccaccttgttagcgttaattaataaatattaatcatcgataattgtaaatataaaccgaactcacttataaatttacaccaccagatgcaatagaaataaaaaaaatcgcatagcccatgtacatttcagttggtcactaatccaattctccactttatttgttgcgtttgtgaacgcaaatggaaaactatcatcatgtcaataaaataatgaaaagaaaatgctgaacttgacttttgactggtcgcagacgaaatgcaagcagatggacaataagccgtacaggaatattagaaggatagaatttaaaaaggattctgactgatctgcaaaccctgcaagctaagtgaatcgatagccctgctcagattggagtacacgattgaacgttaaggttgattgactttatgctagtgatattgaaacgattaaataaatacacgatataaatttgacaaaagcacgcataacattcgaaatcaacagtaacacgtagacgcgcttgcctccagatcccgatcgctggcgatgtccagaccggcggaggcattgccattgttgaagtattcggaggagacgatctgcaaagcggatgtggataattggaaacacgaatgccaagtatttggttggtagctagctcaccttctccaccacatctttgaacacatcgctgacgaactgatcgcatttggctgaggtctcgatgaagagcgccctgtgcttcctggcaaactttcgaccctcctcgcgatccacaactcgctcctcgtcgatcttgttgcctaccacaatgatggcaatgttgggattgtcgctgtagctatccagttcagccagccaggtttccagcttgaccaggctgtccctgctggtgatgtcgtacactagaatggcgcccagagccttccgatagaaactgggcgtcaggctgcggaatctctcggcgcccgccgtatcccacagggccaccttgtagtctatgccgtccacctgcatcactttgctcttgaagtccatgccaatcgtgacgtcatggttctggtcgaacttgttctccacgaagcgacgtatcaaactatgatgaaatgataatgaaagttgatgagtgatgcaagctttt

SEQ ID NO: 8060 - DNA, 3721 bp, DROSOPHILA
aaaaaagatattctattcggtaatttacgcgtggatttatcacgcgccgtgaacccagaagttacaggccaacctttccgagattcgatcagtgaaccttgcgggcgtccagcttcgtaagcacgaaacaggacattcacacacatatttatcactccgtgtggcgtttgcgcccatccgtgcgtgcctgtgtgtgtgtgtgtcgctcgtctgtgcgtgcgtgagtgtgtttgtgaattgtcggctttaattttgcaagctcgctaaagttgtgttttcaaaggacatcgcaaaggagtcgcagcgcacaagatgtcgtacccgccgcgggcgcccatgccgcccttcatgaatacagccataccgccgccgcacataatgcagaacatggccaagccgccgaggagcttccgtaactcggccaccattagttcacagccgacagtataccaacgtccgccggagccgcaaccacagttccgcggacccatcattaccgtcttcgtgggcaacatcagcgaacgcgtcccggaggcactgctcaaacgcatcctgaacgcttgcggcgtggtaatcaattggaaacgggtgtccacattcggcttctgcgaatttgacggacctattgcggcaatgcgagccgttcgcctgctcagcgagatggaaatcgatggcaagaagctggtagccaaggtagatgccaagaacaaggttctcatcgaggattacaaggagcaggagtgcaagaacggcgatcgttccaacccagtggacgaaaagaccgaggacgagttcgccattgcccagatgcacgaattcctggaagagcacaagcacgagttcgaaggattcgatagcagcagtcgcgccgatttgtacggcagcgccaatcgcaataagaagacacgccgcgaggaagacataaagatgaaggtgctaagcgaaaataccctggaggaagaaaagcgcaacttgattagcagcgagataggcaaattccgtatgcgtgcggaggaagacgagcaccgcaaagagctggagaaggagaaggaaaaggagaagcttgcggccagcaaggagaaggagcgcaaaaagcagcgcgaaatggagcgaatgtcgtcgaccagcaagtctggcagctcatcgacagcggccgccagttcctccagcgctacagccacctcttcgacacccgccgccgatggggctgacatgtcggataagacagacaaggaatcagtcgctgttgtgatcaaggaaacagttaaggagtcaaaggaatctgcctcctccaccggacgcaaggagtcgtcgtcggctgccatcgagataacacagaaggagcgccgctctgactcaaaggagacacgtcgccgccgctccaaatcccgctccaaggatcgcgaacgggaacgtgagcgtgagctgcgcgagcttcgcgacaaggagcgcgaacgtgaaagggatcgggagcgtgagcgcgagcgggaacgcaacgaaatgcgcgaacgggagcgcaacgagatgcgcgaacgggaacgcgaaagggagcgtgaacgggagcgcgaggagaagctgctgaagccagtccgggacacgtggcgtgaaaaggaaatggaggacgaactgcgcgaccgcaagaaagccgagaagaaggcgcgcgaaaaggagatcgcctaccagacgcgcctaaccgactgggaggttcgcgagaagcgcaaggctaaggagaacgagaagtaccgcctgaaggagttgctgcgccaggaggagcgcgagaccgacgccaagcgactgaaggagttcgtcgaagattacgacgatgagcgcgacgattctctgtattatcgcggccgcgagctgcagcagcgactggcggaacgagtgcgcgaggcggatgccgattccaaggatcgcgagaaggaggccgaagagttggccgaactcaagtccaaattctttagcggggaatacgagaatccgtcgctggagttcgaaaaggcgcgtctcgagatcgagaagctctacgagccgcgcatcctgatcaatgtgaaccaagagcctccggcagcggcgacatcatcggtccaccagcgcaagcaggccgcctcggcgccgggcgaagacgacgaggggcagaagcagcgacagaagagccagcagctggacagctacgacccagacatggccggtacgaatgatgatgactccatatcgaacgacgaccgtgcatccatggccgacacagcctccaatgccagtggtgtctatgccaagaacaacaacaacgaccagtcgctgtcgaatagcttgagcaggcataacagtgagtcgcgcgattcgctggcccagatccatactcccacgcagagcgcgatccttaatgaccaagaatcgggtcacgatgccatactgccatcggccacgccgcccatgaccatgccccttatctcgctgacgctgggcaataacctcaagaagaagaagatagaggccacaggcgtgttcgtcaacgacgacgacaacgatgagaacatcaatcccaagaagcgcaaacttgtgccgctagactacgatgataacataagcaacaccacgccatccaatcatgcagccagcagcggcagcggagctgcgaacaacagcagcagcagcaacaacaataacagcagctcggcggatcgccaaagctccgccgtgtcggcggcaaccgctgcagccgctgccgttagccagaagatcgcccaggctttcggtggcggctcatcggggtcgggttcgggatccggctccggttcgaacgcatcaggcggcaagaacaacggcggcggcagcagcagcagcagcaacaacaaacataacagcaacagcaaacatggtaagaatgaggcagctgcatctgctggcagtagcgcagatgctgccgctgcgaacatcaaaaaggatgagaatggtgcaaaggtgtatgatgaaaaacggcggcatataaaaagcattattgacaggatacccacgcaaaaggaggagctatttaattataagctagaccgcaacgagattgacagcggtctaatggaacgcaaaatacgtccatggataaataagaaaatcatcgagtatatcggtgagccggagccgacgctagtggactttatatgttccaaagtgttggccggcagcccgcctcaaagcatcttggatgatgtgcaaatggtactcgacgaggaagccgaggtctttgtggtgaagatgtggcgtctgctcatttacgaactggacgccaagaagagcggccttgcggggaagtagtaaggagatgggagagatgcccgtcgtgcgcatcactggggaactgggcgggagcaggtgcggatccgaggtatcgatggaggagcaacagcgtgaagttagattctaagttactcttacggaacctatgcgattacaaaaatgtacataaggggcgtgctccgggaattgttgcggccaaatgtccagctttgttttctaagcatccgtcgcgtgcaagggatttacaagaaattgatgaatagcgagcgagccaatcgtgaagaacagcttcattgatttctaaatccaccttgttagcgttaattaataaatattaatcatcgataattgtaaatataaaccgaactcacttataaatttacaccaccagatgcaatagaaataaaaaaaatcgcatagcccatgtaca

SEQ ID NO: 8061 - protein, 998 aa, DROSOPHILA
MSYPPRAPMPPFMNTAIPPPHIMQNMAKPPRSFRNSATISSQPTVYQRPPEPQPQFRGPIITVFVGNISERVPEALLKRILNACGVVINWKRVSTFGFCEFDGPIAAMRAVRLLSEMEIDGKKLVAKVDAKNKVLIEDYKEQECKNGDRSNPVDEKTEDEFAIAQMHEFLEEHKHEFEGFDSSSRADLYGSANRNKKTRREEDIKMKVLSENTLEEEKRNLISSEIGKFRMRAEEDEHRKELEKEKEKEKLAASKEKERKKQREMERMSSTSKSGSSSTAAASSSSATATSSTPAADGADMSDKTDKESVAVVIKETVKESKESASSTGRKESSSAAIEITQKERRSDSKETRRRRSKSRSKDRERERERELRELRDKERERERDRERERERERNEMRERERNEMREREREREREREREEKLLKPVRDTWREKEMEDELRDRKKAEKKAREKEIAYQTRLTDWEVREKRKAKENEKYRLKELLRQEERETDAKRLKEFVEDYDDERDDSLYYRGRELQQRLAERVREADADSKDREKEAEELAELKSKFFSGEYENPSLEFEKARLEIEKLYEPRILINVNQEPPAAATSSVHQRKQAASAPGEDDEGQKQRQKSQQLDSYDPDMAGTNDDDSISNDDRASMADTASNASGVYAKNNNNDQSLSNSLSRHNSESRDSLAQIHTPTQSAILNDQESGHDAILPSATPPMTMPLISLTLGNNLKKKKIEATGVFVNDDDNDENINPKKRKLVPLDYDDNISNTTPSNHAASSGSGAANNSSSSNNNNSSSADRQSSAVSAATAAAAAVSQKIAQAFGGGSSGSGSGSGSGSNASGGKNNGGGSSSSSNNKHNSNSKHGKNEAAASAGSSADAAAANIKKDENGAKVYDEKRRHIKSIIDRIPTQKEELFNYKLDRNEIDSGLMERKIRPWINKKIIEYIGEPEPTLVDFICSKVLAGSPPQSILDDVQMVLDEEAEVFVVKMWRLLIYELDAKKSGLAGK

SEQ ID NO: 8062 - DNA, 7114 bp, DROSOPHILA
tttaactgaacggtagtgtttttaatttgaaattcgatgtttttagtgagtggctattgttgaacgaacacatgtactatgtgcattgtcgaacaatgtgcgcaaacccaaaaaaataattttggcaaaaagtgaaatatatgaagtaagcaaatggtttcaagatactgcatctcgtgatgttggagtgtgtgtgtaaagtaaaggaaacaaaattaattttaaagaaatatattttatataggtatatatactgcaactgaatacttgatgtcaataaaaacttatactaaatgtatgaaaacgtatctacgaaagctttgcgttgggcatgattaatccgatgatccgatttccccattaaaacgacgttagttattgagacgaatgcggtctatcgtaaacgtagaagcacataatatatctatatttttctggtttcgctttaattgtatacattcgttcgtttctatatttgatttctttcgttttattgtatttatccagcgatttacaaaatacgttacaattattagagaacattataaaatgaaaccgggaaacacgataatgttgattggttgctggtacaaaagcacacacaaattatagtacacaattaatcgtaatgtagggatagaaaatcgttaattttaacttatagagttaatgtctcttaaattaatatagcataataggatacaatttttgcacgttcatgcgccaatgtgcatgtgcgggggggtgttcaaacaacaaatgaataatagacaacaaaacaatttttaggatcaaaaatcactgtataagagggggcggggcgataaatgattacagttacaagaatgggtgaacgtgaaatgtacaaattaagagtaaggtgtatatattggagcacttgtgggagcgacactatcagctatggatcgaggggttgtcgattgggtagttctcggcctaacatagtgaacacatagttttgaactttatgaattggatacaaaattgtactacgcctgttgcagaggctcggaagggcaggcagaaacttagacttggtgagtgggtttgcttgattgtgagatgtcgctgacttcgaagcaatcgtgttgttgttgtcagcttgttgatgtagatgtagttgtctgttgtttactgtttgttgtttttggagaagttgtgcgaggcccagttaagggaagtcttccaggagttggccaaagcttcgctgaatttcgctcggaaatgttcgcgtgctttttcctccgtgtagtccagcacctaaaaacagaatacaacgtatagttactcaggcctaaatcgaaaatgtactcttagactcactaaagtttcccgtaggtagtccaaatccttttcggaggacagttctggcagtcccgttgaaatcatcattgagaacagcgatagaataaggcagccgtgtttgcgtaaaactagaaaggcctgcaaatgtaagtaatactcatgttactatatatatttatcatttgattatggtttgatagacgtacgcgctcgcacaattcctgaaaatgacaaaactctttagactcgcggtcattgaagcccttgttgattacgtagacaaagtcgtgggtcaagacaaagggcactcgttctcgacgtactccaagcttttccttgaagtggcccaggatgtggccaaaatcgatgtgaaaaagctgcaaacgaaatgacactttaaaatttgttccatgcacatcaacatgttgacaccaacctgtccatttcgcttgaccattatattgtccgagtgtcgatcagctacgccaagcacataggtggccacgcagtagcctgcacagctgagcgtgaactcgttgatggctttgttcagtttgtcggcgggcttgttgtgctctttgagccaactgagaagcgagcccttcttgaacggcgacgtggcggagaacatgcccttttccttttgtatgttggcaatggtttctgcgtggcgcaccacctcgatcatgcccaggctcttctccatgctgatgcagttgtagatgttcatgcggaagtccatactggaatgtgcaaggataaataaaattctatatacactctttgcactttagcttacccatcgcgtttccacagctggtccatcacacgcaacatctgcaacgtgagcatgtcctggcggagatcgtcaccgtttttgaaaatgatgtgcacatcgctggcgttgacgtcagcattctcgaataccacccatagcggtcgcatcttgctatccattaccttgcacctatcgggagttacaccactgcaccggaagctgggattaagtggattttggatgttctgaaagacagccgagttgcgctggtcccgcagaaagtcctgcagcatggtcttcaccttttccttgctgcccttcttggcaatcagagatccctgtttcagcttctctagcacatgaagctgcttccgcagcggcgccacgtgatgtttgcaacccttgaggtatacctccagcagtaggccaaagcgtgtttgcatagacggcgtctgcatctcagagcgtaggtgccagaagaagtagtggccgatgcgttggttgcgcagtgcccgctccagcagaaacactaccagatcgctttccaggtacgattcgtgcttgatggcctgtaccaattgcagcagatacaggagcaagtcttcgtctctgtcggtaaagaaaaatgtattcaataaaaatttgcaaataaccgatcttgcgcactgattatgttctctttaaaggatttataatcaatgttatcaaacagtcccgatagtcagttctgatagccttatccctattcgaaatggccattaaataaataaccgaagaaatcacattaaactggtaaaacgtgtatcttacttcagaaagtgtaagcaccggatggcaaagcgtctcactgccggatctggataggcgtagtccagtagctccaaggagcgttctatagaaataagcggccactgtttgagaagataccacatatccgctacgtcatcacgctccttccaatagacgcagtgaagtaagatggacagctcttccggaagctcacgcaaaatgtcgtttctgcaaggaaaggggatggttacagagaacgaatattggatgtttatatgttgcatattaacctgcgttcccaaatggcattgcggtcctggtcaaccatctcatagatcttatccagtcctgtataattggccataagctccttcagttctttgatcggcttttctggccctgccagttgccgttgcagtcgattgacctgctctcgatccgcagcgtactgcaacacgacctcctcgctgggataccgcaccgttccggttccgctgctgaggaatgtgaggtccaccagcgcacattcctctttgcgcggattgggttcgatggtgcccagcggatggaaaacctcaaccgactgaatgtcgtcagcatacgtccacgtgtacagcgtatggcgaccggtgcgcaggatgtccttgtggtcgaaaattgttgtgttgacccaggccagcgggtttttgttgtacgggacgtctttcagagcgatgtccttattgttggacgatttcttcgagcgcgacatcttggtcacctcgaagatcacaatgcagaggcgtgtcatccgcggtaggttgcgcatctgtatgtcaaagtccatcaccaggtcattaaacaggaacgtgtcaaagttgccgttaggggagtccgttgatcgctgggcgcataacttcttgtcgccgtgatataggcacacatgcacgcccaccttgagggcacgcgtcttgtcaaagttcacattggaaatgctgtgcagcgtcaactgaaagtagttgcccatgtcccacagcgaggagatcgacttgtggaggtggactgtccgtttcttcggcagcggtcgtttggttaccatggcctgctcgttgtggtggttgatgtaggactctaggcggtaaactgattgcaacaccacatttggaaccgccgagtccgagagcatctcttggatgtacaggaactgaatcaggggatagtcgccaagcaggtactcgtcgcgaccgctcactttgagtatgtagtcggaggtccggtcgttcattttcatctgcgaccgattcatcttctgcagcgtgctttccgtgagcgagaagggagtgtcctgctcgttcaccgacaacgtaaacgtgctctggtcgttctcgttctttacgacgatgagaaaggttctggtcggatgccgctcccgtatcagctcgggcattttagtcgagttcgccagtcgcagaggatgctcgtagagcagtctctgctgccaggtgtaggcggagcgctccagttcgatgttgtcgcaagtttgggtcatatacagccggaagtcgtcaatctcgggcgagccgtgcgttcgattatgatcgaaggtggtgccgatcattccgttaaccatcttggtcagctcgtagtcgctgctaaagctcgttgtgtcggtgcgctcgccgaggctgaggatgccgaagtacggctggacctcactgagtcgcttcgtttcgtcggtgtaaggttcgatgttgaaggtcgagatgccgtacacctggtactcgcaggcctctttgatcacatagcccagtggcatctgtttggcctggttgaccatctccaccttgattacctggatggtgttggccggattgaccctgagctccagcaggaatccattgggcaacaggcagattaggtccacccagttcagcatctcgtttttccacaggttaaccgaaaagcgcatgcagggcggctccgcttcttccggcggtgtctcatacttgggctggtgggccacgtaggccaacgcccggttgtccatcatgttcatgactatttgatcttcaagttcggattttggatctggtgcctcggatcttgaggatcaccagctcctcctaattagacttttcaatggcctctttcaggctacggaggctagttgtcccgcatttcgctggttaccttatcaacagattgttgttttcaaagttttccatttaaatcagcacgccaatctctctgcgaataaataagaaggtggcgccgggttacttgaaagaaaacatatggcgatatatgtaccgataattgttttggtgtcgaattacggaaattactaaaaatcaaccgcccacccgttgataagaaggcgaccccttcccttggctttgccctcgagatgatcagagatctggataacatccattgatgcactgtaaaactgagttggttctaaccgccctttaccacatgggataaaatagaaaagcagcctctaaaatcgtcggttcttgttaattaaaacaaaaacgctgacttttatttagtatgaatcacacagtcataagttgttggctgggggtgggaggggtcaacttgaaaacaaaaacaagaattcagggtcagccaaggcgacctatgaatgcccttacgtgtttttttttgcaattttaggcagttgaatgactgaagtaagcaggatttataacgaattcgatatggccgttgaaagaaaagtttccataatgaaaatctaagccattaaggcatatttcagagccaaatgttcaaattccgtgaccgaacgggtggagttgataccgcggaaagggtataaaaaagttacgcggcaccgatgtctcatctctaagtcgcgatgccacaaaaatggaaattgcagacagtcagaaaagtcttgaaaagcacacggattggcaagttttcatcgaagtttcacttgcattgtggcgcagctcgtttgtttttgttttttgcttccattttggccagccctcgcctttatagcgatttttttttgggtgtgagctgcgcagtttacgctgctccttacttgattctctgcaccggcaccttcagttggcctctgtcggccattccgcggtattgttatttttcaaacgcaccgtgcaatcggctcaaatttgtgttcgattaaggaatattaaattgtttttatttgtattgttgagatcgtgctgttaagcgtctgttaacgaacacagggtgactcctgttgaacacagggcgttctaggctggcgctggttaatatcgatagtgtttcattcgattgttatatcgatataggttacagttggcatcagtatttataaaatatacacaaatacacggtgctaataaattcttgttcgtaaacagtcataacaggaaattgcatgttaaaaaaaaaataaataaaaataattaacagttcctaagaatcaaattcttttagataaaatcatagcatacaaaataaaattcaacaaaaagtaacagtcgatagtgattcactgcttaactgatttaaataatatcgatattactgttgttgagttgacaagcagtgcaaagtaacagaaacgatgaccaccttatcgcgttttggtatttatatatgtatgctatcagaaatgagatatttcagcatcagttgggatttcaaatatttcacttgggaacaaatttttagatgtgtatgaataaaaataataaatgcgtcttccaaatacttgttcggccttgttaaattaattttaatttataaatttaagccaatggacataaaaatcaatgattttgggtagattatgatttagttattaagctggctttaatctttggagaaaagtacgaagccccctgcgtgcgacactgattaacagcattcacttgcgatatttcggtcacacagagcgcttaacagcatatcgtgccaaaatgaggagatatattctaaaacagtaagaggttacactgtttgttgacaaaaaggtaaacaaagtgaaaatttcgcaaaatgtgcaaaataattaagtaagggtcagtaaaaggtgctactggttaatcggaccataacaactacccatttaacacataccatgcatgacttggatatctcgtgaagtacacaaaccaaaacaatgagcgactccgacgaaggtgagataacacaacttttagtgaaattatgcacaatatgctagttttgcgc

SEQ ID NO: 8063 - DNA, 3773 bp, DROSOPHILA
ttaacagacgcttaacagcacgatctcaacaatacaaataaaaacaatttaatattccttaatcgaacacaaatttgagccgattgcacggtgcgtttgaaaaataacaataccgcggaatggccgacagaggccaactgaaggtgccggtgcagagaatcaaagagattggcgtgctgatttaaatggaaaactttgaaaacaacaatctgttgataaggtaaccagcgaaatgcgggacaactagcctccgtagcctgaaagaggccattgaaaagtctaattaggaggagctggtgatcctcaagatccgaggcaccagatccaaaatccgaacttgaagatcaaatagtcatgaacatgatggacaaccgggcgttggcctacgtggcccaccagcccaagtatgagacaccgccggaagaagcggagccgccctgcatgcgcttttcggttaacctgtggaaaaacgagatgctgaactgggtggacctaatctgcctgttgcccaatggattcctgctggagctcagggtcaatccggccaacaccatccaggtaatcaaggtggagatggtcaaccaggccaaacagatgccactgggctatgtgatcaaagaggcctgcgagtaccaggtgtacggcatctcgaccttcaacatcgaaccttacaccgacgaaacgaagcgactcagtgaggtccagccgtacttcggcatcctcagcctcggcgagcgcaccgacacaacgagctttagcagcgactacgagctgaccaagatggttaacggaatgatcggcaccaccttcgatcataatcgaacgcacggctcgcccgagattgacgacttccggctgtatatgacccaaacttgcgacaacatcgaactggagcgctccgcctacacctggcagcagagactgctctacgagcatcctctgcgactggcgaactcgactaaaatgcccgagctgatacgggagcggcatccgaccagaacctttctcatcgtcgtaaagaacgagaacgaccagagcacgtttacgttgtcggtgaacgagcaggacactcccttctcgctcacggaaagcacgctgcagaagatgaatcggtcgcagatgaaaatgaacgaccggacctccgactacatactcaaagtgagcggtcgcgacgagtacctgcttggcgactatcccctgattcagttcctgtacatccaagagatgctctcggactcggcggttccaaatgtggtgttgcaatcagtttaccgcctagagtcctacatcaaccaccacaacgagcaggccatggtaaccaaacgaccgctgccgaagaaacggacagtccacctccacaagtcgatctcctcgctgtgggacatgggcaactactttcagttgacgctgcacagcatttccaatgtgaactttgacaagacgcgtgccctcaaggtgggcgtgcatgtgtgcctatatcacggcgacaagaagttatgcgcccagcgatcaacggactcccctaacggcaactttgacacgttcctgtttaatgacctggtgatggactttgacatacagatgcgcaacctaccgcggatgacacgcctctgcattgtgatcttcgaggtgaccaagatgtcgcgctcgaagaaatcgtccaacaataaggacatcgctctgaaagacgtcccgtacaacaaaaacccgctggcctgggtcaacacaacaattttcgaccacaaggacatcctgcgcaccggtcgccatacgctgtacacgtggacgtatgctgacgacattcagtcggttgaggttttccatccgctgggcaccatcgaacccaatccgcgcaaagaggaatgtgcgctggtggacctcacattcctcagcagcggaaccggaacggtgcggtatcccagcgaggaggtcgtgttgcagtacgctgcggatcgagagcaggtcaatcgactgcaacggcaactggcagggccagaaaagccgatcaaagaactgaaggagcttatggccaattatacaggactggataagatctatgagatggttgaccaggaccgcaatgccatttgggaacgcagaaacgacattttgcgtgagcttccggaagagctgtccatcttacttcactgcgtctattggaaggagcgtgatgacgtagcggatatgtggtatcttctcaaacagtggccgcttatttctatagaacgctccttggagctactggactacgcctatccagatccggcagtgagacgctttgccatccggtgcttacactttctgaaagacgaagacttgctcctgtatctgctgcaattggtacaggccatcaagcacgaatcgtacctggaaagcgatctggtagtgtttctgctggagcgggcactgcgcaaccaacgcatcggccactacttcttctggcacctacgctctgagatgcagacgccgtctatgcaaacacgctttggcctactgctggaggtatacctcaagggttgcaaacatcacgtggcgccgctgcggaagcagcttcatgtgctagagaagctgaaacagggatctctgattgccaagaagggcagcaaggaaaaggtgaagaccatgctgcaggactttctgcgggaccagcgcaactcggctgtctttcagaacatccaaaatccacttaatcccagcttccggtgcagtggtgtaactcccgataggtgcaaggtaatggatagcaagatgcgaccgctatgggtggtattcgagaatgctgacgtcaacgccagcgatgtgcacatcattttcaaaaacggtgacgatctccgccaggacatgctcacgttgcagatgttgcgtgtgatggaccagctgtggaaacgcgatggtatggacttccgcatgaacatctacaactgcatcagcatggagaagagcctgggcatgatcgaggtggtgcgccacgcagaaaccattgccaacatacaaaaggaaaagggcatgttctccgccacgtcgccgttcaagaagggctcgcttctcagttggctcaaagagcacaacaagcccgccgacaaactgaacaaagccatcaacgagttcacgctcagctgtgcaggctactgcgtggccacctatgtgcttggcgtagctgatcgacactcggacaatataatggtcaagcgaaatggacagctttttcacatcgattttggccacatcctgggccacttcaaggaaaagcttggagtacgtcgagaacgagtgccctttgtcttgacccacgactttgtctacgtaatcaacaagggcttcaatgaccgcgagtctaaagagttttgtcattttcaggaattgtgcgagcgcgcctttctagttttacgcaaacacggctgccttattctatcgctgttctcaatgatgatttcaacgggactgccagaactgtcctccgaaaaggatttggactacctacgggaaactttagtgctggactacacggaggaaaaagcacgcgaacatttccgagcgaaattcagcgaagctttggccaactcctggaagacttcccttaactgggcctcgcacaacttctccaaaaacaacaaacagtaaacaacagacaactacatctacatcaacaagctgacaacaacaacacgattgcttcgaagtcagcgacatctcacaatcaagcaaacccactcaccaagtctaagtttctgcctgcccttccgagcctctgcaacaggcgtagtacaattttg

SEQ ID NO: 8064 - protein, 1088 aa, DROSOPHILA
MNMMDNRALAYVAHQPKYETPPEEAEPPCMRFSVNLWKNEMLNWVDLICLLPNGFLLELRVNPANTIQVIKVEMVNQAKQMPLGYVIKEACEYQVYGISTFNIEPYTDETKRLSEVQPYFGILSLGERTDTTSFSSDYELTKMVNGMIGTTFDHNRTHGSPEIDDFRLYMTQTCDNIELERSAYTWQQRLLYEHPLRLANSTKMPELIRERHPTRTFLIVVKNENDQSTFTLSVNEQDTPFSLTESTLQKMNRSQMKMNDRTSDYILKVSGRDEYLLGDYPLIQFLYIQEMLSDSAVPNVVLQSVYRLESYINHHNEQAMVTKRPLPKKRTVHLHKSISSLWDMGNYFQLTLHSISNVNFDKTRALKVGVHVCLYHGDKKLCAQRSTDSPNGNFDTFLFNDLVMDFDIQMRNLPRMTRLCIVIFEVTKMSRSKKSSNNKDIALKDVPYNKNPLAWVNTTIFDHKDILRTGRHTLYTWTYADDIQSVEVFHPLGTIEPNPRKEECALVDLTFLSSGTGTVRYPSEEVVLQYAADREQVNRLQRQLAGPEKPIKELKELMANYTGLDKIYEMVDQDRNAIWERRNDILRELPEELSILLHCVYWKERDDVADMWYLLKQWPLISIERSLELLDYAYPDPAVRRFAIRCLHFLKDEDLLLYLLQLVQAIKHESYLESDLVVFLLERALRNQRIGHYFFWHLRSEMQTPSMQTRFGLLLEVYLKGCKHHVAPLRKQLHVLEKLKQGSLIAKKGSKEKVKTMLQDFLRDQRNSAVFQNIQNPLNPSFRCSGVTPDRCKVMDSKMRPLWVVFENADVNASDVHIIFKNGDDLRQDMLTLQMLRVMDQLWKRDGMDFRMNIYNCISMEKSLGMIEVVRHAETIANIQKEKGMFSATSPFKKGSLLSWLKEHNKPADKLNKAINEFTLSCAGYCVATYVLGVADRHSDNIMVKRNGQLFHIDFGHILGHFKEKLGVRRERVPFVLTHDFVYVINKGFNDRESKEFCHFQELCERAFLVLRKHGCLILSLFSMMISTGLPELSSEKDLDYLRETLVLDYTEEKAREHFRAKFSEALANSWKTSLNWASHNFSKNNKQ

SEQ ID NO: 8065 - DNA, 30942 bp, DROSOPHILA
tagctaactttgagagttttcgatttgttcgccttgcttgcttgttcaataagtacgcaaattatcacttaatcaatacaggtcaatatatatgtatgccatgtaagtgtgcgtgtgagtggatatataagtattatgtataagtcgtaaactagataaagtttagataggctctggataaagcttttaggagaaatcttagttagagcacgcaaatgaaaggctttctgctcgatcgatcgaaccgaatgagctcaacacaaatttttggaggctgcttttcattatcgtatcgtatcgtatcatatcatatcataccgtatataggatataggtgccttgtgccgagatattcatatatatttgttgatacatacgcctggtatgcctggtttcttaatgcttgtagttaaaacccaaacgttaggtagatagttagtaagtggttgggaagccattgtcgtgttaccttctcgctagttttggtaattaggtcgcagatagatacgatagttgggagcaaagattcgtagagttaaggataggatagggggctgcttgcgttaaaaagctgcgctaaacactttaaagtaaatgtctttcgaaaaagaaacgctggcactaactaactcgcattttgttaacgttaagttttcgatttcgttaattcagtatcgcttttacatgtgtatgtgttgtggtttgtgtgtatctgtgagtgagtttctctgtatgtctgtgcgtctgtctgtctgtctgtctgtttaacaattcgattatttagctttagtccactgttaattaatttgtttatcatccattaatttgcttgtatataatttagctaattgggtgtgaggctgacgggggtcctcgtctcgtcctcggcggcatccagatatccttggcaggtatccttgctggctcggtagctcgatggcgcgacagccgggtaactcggtaactattgcccgcttttgtctttgcccctgccccttgtttaaaaggggcacgtgatcacatcgtattcgaacatcagcgatacggcgacaaaggcaaaatacaacagaaacatggtgaagcccaaccccttgttcatgcgccagcggaagcaggcgatcgacatcaccacgaacaccagcatcataaacaggatggttatggagcagaccatgcccaccgagttcacctcgacgggcgccccatagatgatgccgtacagcagccacggtatcggcagtctggcgaggagtggggaatggtgagggaatggcaaagggtattcaacatatccggttagtttcgcttctagttgtcgtccactatggccggatgcccaatactcaccccacggtcacgtcgaatatgttgctgcccaccgaactggatacggccatgtcgccgaatcccttgcgtgccacaatcaccgaggtaatcaagtccggaatggaggtgcccgccgccaggaaggtcagacccatgacctatcggggagaagagaacagaatgtagatggttaatcagcagaaggtacacgattcatacgcattaggcttttcgtacactctaatgaatcacacgaatcatggctatggtttttctagttatattgctaaaaataaagtccggataaatgtttttgtatttttctgggaatgaatttggtctgcaacattgcttaaattttgatattttgaaggcaccaagttaaatgtaatatcgtatatagtatggtgattgtacctcgggcggaatgcgcgctgtgtcgccggccacgttggcccaccagaccatcaggtaggagaaggccgctatccacacgatggagccaatgaaggtgaccggaaagaagcgcttgccgcgcggcgtccgcgtgtcgggcagtgttagccacattggcaccaggagcggggccaccaggacgtaggtgagccgcttccgcgccgtatccggccaggccatgctcagtggttccggctcatcctcgatttcgggcgccttttggtcaaggcaaagggaaagattggcgattagcgacttggaccgaactcgtctgtagtctgttagtatttagtattagccgtagtatatgggtatatatatttatatatatatatatatatatatttatatttataatattcaatatgtacgagtaatacggaatttgttgtataaaatatatagtaaaaaatgtgggtgggagtgtaattgtagtagtgagtgattcgagcgaaactcggtggcgggtgattgatatttcgacgttgggttctgaggtgaaatgcgttctgagccatgtttacagatggtcatgagttggttacgaggtaacagcttttgtcatagtacaaaattttgcttcgctttcgagcttgcaattagatacgaaacgatgttgtttgacttagtttgattaagtttggtttgtttgggttcttttgggttatttcactggtggacaggcgtttagagcttgcttggcggtatctaagtggattcggtgtcggttcgatcgggatacttagtgtttgtagaacgagtgtagtaagttcaagtggtgcacttactttctagcaggtctacaattaggttacgatactgttacttgtgctcagagagatggtaagactttaaacgtgcagagttctaccagcatcgcaagtacagtggtactacagtggtgcattggtacagtggacatgctcaagttcgacttgcaagtgcaacaacacacaggcacaggtctacaaggtcgatcaatcgtgaacaaaagtagaaagtaaaactggttaaaagaagtgtctataggtctagatttcatatcactaaggctaatgctactcgaaatatatggtacttgtgtgtgttttcacaaaagcaacaatgtgtgtttttttttttttttttggtttagtaggtgatgatagtcagaagctttgcaaatgcatcaactaagtggaaatttaactgcggtctacacctcacgctcctggccagtaactcaagtttcccagctggtcccaactattcccagtgtattttattctgttttatgaactgattgatatgggttagtcattgaaaaccctgcggtttttgaacctgacattctgggcattcagaattaatcatcactcaacaagagctgatttcatttacgatttctatacatagaatggacggacttatcgcttaaacgatataaataaactatttgacatataaaataaaaatgagtcaataatctttcaaattgtttcctaaatacctatatatattttttttgctaaattctaaatatgagttttttctttttttttttgttttttttctcaagaggccactgccaaggagcttttgtgtaagactcgcgtgcaattgtcagatattttcattgttattgagtagaaaaaaaaaaaaaacattttcgtttactataaatttgttgcaaaaaatataaaagtaaagattgtatgcaatatatagaagagcgaagttagatagatatagagagagagagatagatagataagagagttcaataaaaattgtttatgaaactaactttgatgctaaatttgcgtgtctgaattttgaccctctgctcaatccagctaggacgtcgaccactcaacgatggctttagttgattgttcaagatattttataaatttatatgacaagtttttgggagaagagtacacatttataagtatatatatagcgattttcaaacataaggttttggaccaagtccagggccaagtccatagaatcagatcagttatggaaataaaactttgattaaaacttaggctgttagaaaagtagaagactttttttttggggggaatagacagatagatagatagatagtttggaaagaaggctgttcacaatgtttggtagaagtgtagaggtattcgggaattacgtaacaaacacatacggatcgggaaagagtggtagaaacacaaacacaatttgctggtcgtgggtaacactgtgttttatatatttttttgtaaggatattcttttactttcttcaagaccagaagcccaactcggaaaattcggtttaagcggccttcgcggccagccatgttgtgtctaattgtgagtcgaattcaaatgaggtcgcagtaattgaggcgagtcagcacctcagaattttgtttgtttgctttgtgtgatctttgcataaatcaaatgaaaggaatgtaattaataaccgactaggaagcgggttgcttaacggcaagccgaagtcaaaatacccttgcagatggagttgtactttagaaattagtttagttggtaaactatgcagcagttatttctgatttagttactctatgcagaatatccacattcatgtcaatatatatgcaaagttttcttttaaggaatattactgcttcatcgtatgcaaccaactgagtttgcacgttggaatcagctacatgtttaatatttgatcgtatcgaacatgcatgcattgctgcttgcatcgtgtaacctcagcttcaagacagactaggatacaattgttccttgaacggatgatggaacttagtgaccctctgctagagatagggtatattgtgcccgcaatgagcatccggaatgcaatgctactaaggctgctgcttttgctgctgctgattttgctgctgatgggggggccaaagccaagtgcttgcgcctatgcataaaaatgttcgcgttaacaaaatgccagcgattacaatatgcgagttacgatatgcgggcacacacgctgtgtgggtggggtgtggtgatcggtggttttttgggcgcagctactttgcattgaaatgactgcatcgcgcattagtgaattatgaatggaaattataatatgcaaggcactgtaacgactttggtggtactcatcggttattgttatttgttgggtattactgttgatgttttttgtggatggttcaacgctaggtacgataaacgaaattaggtaaagacacaaagcaaatgagttccaaatgggtcatacggtataagagtatgcaaaaatttcactattccgaattagctcttcttaatctgggcaagacaaaacacacacagagatatagatagatagatagttcgatagaaatggatggagggtggtaagatgggggcatgaagatactccgaaagtaagggagataaacatacacaaacagaacgaaagaaagtttgagaggtggataggaggaaagttgaggcgtgtatgtatagtgtgtgtgtgtggtgtgtacggtagagaagtgtgtgtgtgtgtgtggtggggatgggtgggttgaacagttgtatggaaaagaattgaggcacaaatcgttgattagtttaagtaaaggtaagtttaaggaggaaattaaaatccataaaaagtcacacataaacgttgcatgaacacactgacagatctttttggttttttgattattttcgcttgtcgggcctacacacttaggaatttcacatttttgaaccggcaaagacagtaggaaacgatcaagggaacacataagaaagaaaattggggaaagagtatacatcaaaacatatatttaggtggggattaagaaaacacaccatgtttcagtttagaatcagttcaaacgttgcttcaatcagttaaccaatcagttgctcaatcaaacaatcgattggcaatgtaaaggaatcatgccaacagctagaattggaaaatggtgtgtacatagatttttgtagatcgcttgaactggtcgctaaactctatctgggaatataggtaacgcttccaattgaatatatccgattttaaacatttaggcaataagttttacgatatggacctacgatattcgataatatgcaattccatgagttatccgttagcgatagtcggattatcactgaattaactattttaccgcgacagtttttaaaatcccgcctattttcaaaattacgacattcagatccgttcgatttataataacttatccgatttgttgcttgtatgaagaatgcagcgcattttgtgtgacacaatcaatcagtttgtaacgaaagcacaaggtaaccgaaaactcaaatcaaatcaatggttattcgaaacgaaaagacatgcctaaggaaaatcatgagcatcatatcattagcacaatcgtacggattacaatggggccgaaacggaaatggtcatggggcgcacttaccgagtcgagggtggtgtcgatgttcccattgggacgatcggcgagcgtggtctccttgagattgatcttgacgtgattggccgccgaggtggtggcaccaccgcgctgtggtttggtggcatccagcaacaccttcagcgaggcgatggcgtgcagctgcgtcgccttctcgtccactttgcctggaacatcatctttgtcattgtaattgtgtgtggttttttttttttttttgcgggtgtttcgataaataatgcagtgtttttgtttattgtttattgtttgttggtacacaaaacacgagtgaggtgttggtggtgttggtgtgtggcgagtagcggtgttgtcgttgtagtatttggttgttgtgtgtgcggttacggtattcggtattcggaattcggttttcgatattcgatattcggttttttgttggcacacaacgaattgagttttgaacgcaaaatccaagtgtttatttttatttgatatatttttttttggtttggtatttttatttttgcgaaaaatcaaaagaaaaaaagaagaaaaagaaagaataaaattgcatcgattaaaatcagaaataaacgaattaacccagttacgagtttcattttcagatttagtttctttcttagatcatttaatttacaatcaaattcactcatttagggtattggattggatcgttcatatacgcaaatatatgtctatatgtatattgaaaatattttatacaaaatgttgatgtcagttgcgagacagcatttggaggttgcttgagtaagttatttagctagggggtacagtctagtctatagagtagagtacgggttatgacagattagagcggaagagagcggggagagcagagagcggtgagcggacagcagaggggaggggttcgtaagctgactaggactacaactaggactatatgtaactaggatctatactaaaaaaaacactactaatatttaccgtgtcagattctcatgggttttttggtctaacttttgtctctgaatcaatccgattcgatctattaagtgtgaacttgtgttttgcactaggagctgattaaatattcaagattttgatctgtttttcgatgatgcttggggatcggacggggtgttcggatggatatcaattcaattcatttcagttcatttcgattcgattcaattcggtttttttttgttgtcaatgcggcgtgaagttctcgttttggaatttacactttctcaggggaccatctgactaaatgaaagacccctttttctagcatttctctaggtatatacatatacatatgtgtgtatatatgttcacgattccgtctgacttacaactaagcttagcttacatttctacagatcgtatgtgtgtgtcgcgatggatgaattttaaagggtactcttaatagtatcgctatgactatctttggttttaatacagacctagagaagaacatgctcatactgataactgagcaaaagcacgtctaactaacgttcgcgatgggacttgtgatttgggttgctcttaactggactggtaactgaaccgaagtggcagggccattagacaaatctaacgagatcattgccatcggaggttggaaaatgatgatttccgcccgtctctgccggatttccaccgattgcaggcccaaaaacacaattcccatgccacgagcatatcgagccgaaagaaacacacatataaacaatatatgacgaacattccagtgacaaaaagcgatccgacctatgcaaaaacaacctgaaacaagctcgactagtcgcacatgcagtcgcagctcgttaatagtttaaatagttttctatctactcgggtgtggagtgtggatggatgggtgtatagtattaaatatttactatatggtatgagtctgagtctgagtctgaatctgagcccctagtccaagtcgaagccgattttgagcagcgttgctgcgagccaattgcactagttgctaaccaattacaatttcaattacaattacgataatgattacatttaacacatacaacactaaaaacgcatagttaatatatgtacagtataaattgttttgtttttgtcacgcgtcaaactcaactcaatccagcattcaatggcataggtactcgaactatggcatatattaaacctgcaatgtatctttatatctgcattgaatttatctagtaagtatgccattgaactgagcgaacaaactctaggaatttgcaactataagttctctatgctagatatataacgcatatgtatatatatatatttatatatagatatattgatataaatgtaactccaaactgacattgaacaacataaaatattttcgttattttggtttcatttttcttgtttgtttttctgcttttattgttttatattttggttttcttgtttgcaacaaaatgaaaaacaaagccgaacgtaagtaagtagcgtatttgtgaagcaattgcaactaaaggcaaaggattaaacccttgtggcccgatctaataaacttaagctaagatccgcattagtttccaactgactgaatcatccaaacaatttaaatggggaattttcgaattgaaaactcagctgtcagttaacaatgagggaattatgcaggtgcattttgcctgagttaatatattcctgacaatttaattgtattaattagtttagctcctgcaagcgatgtctgtacatctactacgaagttctgtctgaatgtatttagtaaacatctcttgatttgaaaccaaattctttgtatctgtagctttaaagaccctgtaataagttagcacatatctaatggttgaggtaggcccacttggagctacacgaattctaacacttggcacctgcgaaccttggcgaacacgcccctgagctgcctcatttcgattcgattcgattcgattcgtttagttttctgtgggccattgccgtggcaacgacactgacgacgcctttcctacatattcatgggattttcagtagccacactcgattcgcaccaaaatcaatgtttcgattggaaacttttcagaattgcagaatctattcaatggtgggggcagtaacaatatcgcgatgaccttttctcttcctgccccacccgaaatcaaagggttagtgctgtcaatcgcgccgctttcctattttcccctatttttattattctcttttttttttgcttttggtgctaattctagtcgacggaacgtctgggcctggcgtgctaattaggtaagtggctccaaggtcgccattaaaaaagtgaaccaaagccaacgaaagccaaaaccgaattgaaagaaaaaacaaaacaaaccgaaccgaactgaactgaaaggcaacaacgcaacgcaaatgagaaatggaagtacgagtggaaatcggagcatagacatagatatagatacagatatagatatagatacagaaacagaaacagtaattgggtaagagcagcagaagtggaaggatgagcgaaagtaacttctggctggcaagtcaaacatccaattagaaggaatactgaatttacacagaattttaggataacccgaacacaaaacgggaaactgaatttataacaattttactttagaacagatatagataacaagtacaggtagtaagtatatatagtatagtatatagtatatagagtagagttctggatgttattgcatttgtatttatcttatttttggatgtaagcgtggcggatttggattgcactgagtcacaaattgtaaatagagattcatttttttatttagtctatcggaaatagacgaaaatttaatcataggaaagctgtgaaacattttgtttatagttacacgtatttaaaggctttcatgactttaaaggaaacgttcaagaatattactcatacggcatgtataccatttctaaaattcattgcttaagtgcgttggtatttgcgaagggatcaaaataaatataatttaattcaaaaattttatttctttttgatttgtacaatttgcttatcagtgctggagtggctccggaatcgggattgtggttgggaagctctgggtggttaatggtaagccgggtatcggggtacttcgttatggggacttttagtagcattcattttttttttttttttggttctttgcatttttattttttggcatttggcttgacttgtgcaaaacacactgtggcaactcaacgaacttaccatcgtgtagtggatctatcgtgtgtatcattagctgtaacaggccgtggcggaacttggcaccggtctgagtactacccgaggtgccgcccccgccgctgctattacctgtggcgcccgcattgctcgatccgggcggacccgagcgggtttcgctggccgcccgcgatgttacggaaccgcccggctgggtggccatcgatgtttccgatgagttggccgcattaccctgcaggtgaaggaacggagagaacggtgggtggcatgggttttgcggttacggtatcggtttcggtatcgggtttatcgggtaacggttacggtttcggatttggggtttttttttggttttttttttgattcggttgagtttttcgagttgtggtatttttcgagagagcggtgtaatgtttagttattttatggtaagcatatttcgagaaaaaggtgaaaagaagaagaagaaaagtttattattgcaatttgtataaatttacagttgagtgtagcttttgttttttttcttttctattgtcgcatgtatctgtagctgttgttgtaattgttcttgttggtggtgttggttttggtgttcttgttattgtagttgtttgtgtgacttaagaactaatcgaatcggtaagtgcaagttgggagccaatatctgaacagaactcaggaaacatcaactgataatgtgaacgaaataagaaactcaaggtatgtcgaaacgtaaaatgaagataaaacaaacaatcggtttaccacaatattcaacaaaatacgttataatatacggaccacttgcgatcaaactgtgcagctgatctatggagtatagtacagtctgaggattatatatcagagagatcgacgacagtcagaaacttggtttcgatttggctgtttgacatactgtcaaaagtggatgttgaacagtacaaaatatatagagtttctgaatgtttttgtgcaacaaaataaacatatcgatcggtgcggaaaacactttcattatttacagaaggaaagtaggtgctatggatcgatcttggaagtattcggaagagaccccaatgaccttgggctctttacagagatgaaacacatgagtcgtatattacaaaatcaaaatgataagttcgaagatgaggaaacaaaatacgtatagatgaacacttttcgtttttggtcgttggaaattttttctgtttgtctgttgcaacagtttggttgggtttaatacatacaagctttatatatgactttctttttggttttcatatatattttttttcagttgcttttgtaaaacaaaatgtacacatattgttgtattttttttttatatatctgtattgatatttgtcaaagcgcagtgggaagttttgttgtatttcattttgccttcactataatcaaaaagaaacagataaaacacaaaaacatttggaataactttgtcggagaactgaaaccgaaaaatactttcaattgatgcgaattaatagttggcacattagcgaaggaagcgcaggcagatgaggggtataaatcggatttttaatcgaaatttgtggttctaactaatgcaatgcaaggcaggcactactaatcgtatagctacgaatatctaaaatgtgtactgaatgaggcgggaggtgactaatgggaggtactctaatgaatgaatggaaacgaaacgatatgataattggcctgcttatactatatagtacatatatactatgtagtggtgtaaatgagtccgatcgcagaacgagtctttcgtaactcccattcataagtcgactggactgaagctgaaactggaactggcactgaaagtgaagcaggtgtagggcaagtcaagttcagacccctcaccatcaccaccaacatcaccatctcgtcgacttaacaagtggctcgtgcccaggtgaactaccccagtgtggctgattataatgctaattaatgcccagtcatgttgttgatcggacgaagtagcctctagctaatggtctgggttttctgatccaatcacactcattcacgattcaaactaatcgcatccactgacgcaaattttgaatacacctgtgaaatgtgatgaatatctcacaagttttcatgcccaagagaaagaactctctccatggggattattcaccttgaacctgttccaagatacgggctgtcagatcgtacagattgatttcgacagtgcaattagacgcaattaatgagagactatctatattagctgcagtcgtgtatgaaatcaccccaaaagtattttataatatcgaaaattcatcaccgttcggagacaaagacgaggggcaatttaccttaccaaagcgcttaaatcacataatgaattatttaagtccagcatgaatcacactacgtaactgcaaaaaaaaaaaaaaaaaaaaaactcaagatcaagactcagctcgaaatttcgcctgtcaacctgagtggcttaccaaatgatctaagagatgcaaatccgcaagacaaacaaaacgctcaaattgtcactcaacctgtttgcacattataatgtaattcgattccaactacgagtggatatctcggaagagaaatcaaaatcggcatcggaagaagttgccaaccagccagggtgacccccaaagccagttccaagaaatggcgcaaatattcctgggatccacttgtgacgtagagcccatttgtttacgctccactagtggaatgataaagcgttatccgactgataaccggctcaaaggccccacgacgatgcactcacttgggcactcgggtgcttaagtctgagcccgacttcggatcttggcagttcgattgcggtcggtgctgtaatacgagggtttatatatagcgcgatgaggcgcgcgtcgtcatttagtcacgaagccttaaccaagccgcatcgaaacgcgaatagatcgaagcctagccaccatgtttcagaaaaggattatcgagctgatcacggtgctggtgtattgggtgatcatcacgcccaccacctacaagtactgcacacaaaacggaataattaggatgagctttgacaccctggttggcactgtgggcgatcactgcaccctggccctctgcctgatgatcggatacgttgtcttctaccgtatcattatcttcatttacatgaagttgaaggtctgtgacattcggatgtgggatgaactgcagcgagccaaagaggatccggaggcgcatctggacaaaaagtcctactaccagcccgtctccaccgagaatatcgatgtcgtggactctggcaagaagaagaacaagccaacgactccgaagatgataaggaccatcagcaatccgctgctcatcgaaagcgatctggcgcgcattcacatcaagcacgaaacacggcctttggaaagtgccaccctacccagactgcagcaggcaatggtccaccctagtccgagtcccagcttgaggagcgcaccaccagtgccccaaatgcagaaaagtgccactctaccgaatcagcacagcaaaggtgtgattatgtctcccaaagttctaatgcccagaactcaacaggtgtagacagcgagtgattagtgctttaaagtgtgctcatgattgcgattaccagtcttagtttctgtgaaattttgagctcaacttaagaggactacgtccgcattcaagtattagctactgcccaaagatcgataatcgaaataaacccgaaattagtcaattatcacattccagtgtactcgttcgcgcgagctaaattaatagtttagttagtgaatatatttattactagacgtaagacagatattgttatccatgcgtaaatatgcgtgagtttattaaagctaaataaattaaatgcatctcttgtaaaacgaaatctctgttatttttgtgggacaaacgggcacggaaaatcataagcctataggtgagttggataattatggcgttatgagctttagctcgatattatcataaatcctatccatcaatgttgcagcaggttcaccctaatccaaatcgtatcttgaaatgtgcagcacttaagtcacagacacaataagaatatacatccaatattaaaaacccactaccaagtttataatcttacataaatgagttaaaaattaaataatattattgcaaggaccttttttgagtggacaagcaaactctatatacctcgttcaagatattaacctgcagctgtgaatgatacggtgtgcacatgagttgtgttagacagagcaagaagcatcggcaatgttctaaataaaggtgttctacgcatgcgtacatatctcgttcttctcccacactcaatccgtctcactcgctctcgctagcagcatgcagcggtatgggttcgagtcccggctgaagtctaagatcatcaacaacaagatcaagttcaaattcaagcagtgtgtgcaaggtttctttctgggattcggattcactcgcatgcagagtactcttcgggtcgtgtcaggagtgtatgccccgtgtcgttgtgtctgtgggtgtgtgtgagtgagtgggcgtgttcggtgggtgtgggtgtgggtgtggatttacacaagtcgaaagacgcatagcaaatcaaacgtttggctaacaaatggaatcgaagctaagtactaaaaaggaaattagaagtataactagtgagtagaattaagattacttcgatagcatgaaagaatagtttaataataagagtaatgataaaagttagtagaactcggaggtgcaacgcagccggatataaccagttagccaagttcttttcaatatcgtaaacacaaagcactttgttaactagcttttgtaggaaagatctatgcatcgattgcagcaatattttttccataggataggcagtcaaatcggtttcgtattcttccagaaaccggtagaattgatatttatttcagatacgtgatctcagtattcaatatattccggaggatctaaaatgtttagttgcaaatataattccaaccggttaagttgtaccttctcaatgggtatttttaattagacactccccgtgggatcgacaaaccggttttgagtagaaaaaaccttaaagatgggtctagaaatgccatataggtgagtagaccgatttcaagctgtaatgaaacttatagtgggtcaaggcgatgaacgaagatcgctctcattcattatttcctggacctgatttcgaatcgcaggtgaaattcgagtggaattgggagttccactctgagtgactgtcgtgctgtcgttcaatgccacagcagcagcagatacatcttagtcacagacgtttcttcgatgattgcaacaacgatggcccttagtcataacgacttagcacctgctaactggttaaagtccggcacgcgccaaatgctcgcatgaaactgagatcgagattgagataggggggatggggatacggatacggatacggatggatgggtggattaataggtgggaaaaacatacacaaaacgaaaatcaaaaacgaaatttcgttcctggcaaaggatctttgttttcgttttaactttgattcttttctttattcatttggcacacaaaattttggctttcaatttcgctttctcttttacgatcttcttgatttacgttttttgtaatggttttttttttctcttggaatttattacgatttcaaaacttttctgttttcgttttcaattaagaattattcgagatagagagagagagatttgttggaacttttggtttgatttgatttgatttgaattgattgattgatttgatctgaatttgatttgttgcaaaaaaacttcccaactacttactgctggcataagttgatctgtacttctgacgcgagtcaccttgtttttggtaatcatcttcttgacgcacgtctccacctggacgttccacttcatgaaggccacgtagccgatgtagatggtgaacaggatgagggcctcccaccagaagatgcggttatcccggaagaagtagatcagcaccagcaaactgatgctgtagaacgagcagtcgcggaacaaaggccaccaggtgagcgacaggaccgtcttggagaagagcgcgcacattccgatcacaaacaggatgttgaacacggcggagccaacgatcgtaccaatgcccacatcatcgaacgacacgaaaacgccaatcacactggtgaagagctcgggggcactgccacccgccgccataaacgtcgcgccggccacatcgtccgtgatgccgagcttttcaatgattacgtcaagggaaggcacgaagaattcatcacagacaatggccagcgccacaaacatatagatcaccccaatgatgtgcaggatgacagcgccgttctcaagctgttctttcgtgaatagatcttttgggaatagtggcgttttcgtggtggtcgagttatcgttgtgcgtgtctgcaagaatataggcgaataaatggattagaccttgaattgaaaagtgcttaagtttagtccttggctttgctacacttcctttgttgttgttcaagaaacgttttcattttattctcgaaaacaacaattgaaagagataattgaatcaaacaaattccagtgaattgatatggaaataaaaacgaatatgcggagaaccatgcaatggtcttgaatgcaacaaaacagaataatgtgtgaatttctgatttcaactgtaattaaatcacaataaaataaattaaatcagttgtgattgctggaaatctctctctgtggggaaagtgaataaaaatagttggactggtaatgttattttcgaggaattttccatcgcggtgttatgcaaaataatccgttagctactgctgatgaatttatatgaataataatgtgtggtttcaaactatggcttcaaatcaaactaataaataattttttcacgattctgtgattattattagctatgcgactgacgaatttgtcattttgtcgtctgccattctgaccttttcgattgctacctgtctatatagtaagtatctctatcgatgcgatgcgatgcgatctagccatccccaattagacatcctcaattaagtggctcgaccttttggaaatcgctggtaaaagtcccttgtcgcatgcggcgtctttggtgtgcgattttcatggcaattatttgcaaattatgcagcgcgttttgcaacaattaacaaattgcacttattcgccgccgacttcagcaatccaacttgctcactctgacgatgatgatgatgatgttgatgttgatgttgatggtaaatgtttgcaatgtaaatgtttaacaatcatttgcactgtgagcaatcattttggcgcgtgtgccaagtaaataattaacgcgactttaatcgttcgtggactgatcacagctccactgattcatgtcattcacatagttctaataagtcagtgtcggtatctgtgtgtggctgccaccaaaagcagtataaatcatcttgggatttgtatcttgaatctcacttagtagtaaacccattcaaggttttttagagggaaagggttacaatgtcacaatgaactatgtatgttagtaatgatatttcaaaatgtcagcggatagttatttagatattttaggaacttttaaatattttattcatttatataggaatttatataatgatatatatttttgcgccagagaaccctatttcctacgcctctgatgtagagtcgggattgactcactttgttttcaattcgagaagatagattgaacggttagacggacagcaaagaaatttgctctataaccggtttcagacagacagatagtcggctatttgcatgcagttaacgggccccaccgcaccacacccactcgacccacccactttctgtgggggcgatgggcgttgggcggtacaacatcgagcgtgagccacaagtgaatgattcttatgaatcactgggcaaatgcttaatgagtgacgacggtgtcactcgaatctgatttaattcaatcgcctgcaaaaagggttgcggacatttggtagcttatatgtacatatgtacataagtacatatacatatgtgggtggctttggcccactcttaacacccgatttgaagtggttgccctgcatatcgaactggaacatccggacactcgaaacatataaatgagcagactttctgatgggttactcatgcagttatgagttggtcaatggtcttgaggcactgcgaaagctattgagaccaattaaaatcggtagaaattggctcaaaaatgcagaaatatatacacaaataccaaatatagctacgtgtcatttaagaagttacctcactgattgtatagtaattaagtcgaaagataagctaaaccaagttctcatacgtgatgcagactgaatcttttcggtgaggttttgataaatgtttatcttatctgtcagaaaaagtgcaattgatttaattaagtgctattcaaacattgccttatttaactggcatgtaaatataaaccactaatgccttgaacacgtaattccataaatataataatgaaaataaaactatctcaaataacagttggtaaattataaaaaaatgcatgttccctacaggtgttaaaaaatctcgaattaataattaaagacttttgcatagcaatgattacgccatcgaatcattatatataaatgaaaatattccatctatggagccaacacgagcccctcgaagttgagctggtcatcaaattgttattggttcacttgctgaaggtaactaaataatgactattaaatattatttattatttattgtatctgattgtttattgtccatgtgggcgtctgcctctcagtttgccacatgctcgccacataaaatacttcatcagggggcgaagggaaaccagttccgagtgccgcaaatgaaatgccacaattttactaagcgattgcagtggtcgtgagctcagaaagcaccagacttcagacggtagagatggcatcgtgaccaatctcgaaagtaattagcattcgaaatgaaacaagtttctagttctactgcctgcacattcaatcgtagaagtggaaatctcattaaaaaagtttttttatttttatcacactacttttgaagactacatttgatgatgtcattcaacagctgagcttgagttaagtcaaaacaaagaaacacatcagataagaaaagttgaagaagataaacatatatggggcttaaaagtttggagtttgcaaattgaagccatagaaatgacatttattgaatatttagctctaaagtttcgttataatattcaaccatcgacaagtgcgaggatagcagttactttatgctaacctaaggtttcttagtgggatcaactctactgctggaacctcacgaccccatccacatgtgggattcgagcccactcacacactcacagcggatacgtgatatgcgtcatgcgaacgagacgcgttgtttacggagcaagcgaagtcgtaaccagagaacaaagccacatcagaatgctctgcggctgtcgccgcactcgcagtgcgaattcgcaatcagttcgcaagtgggaaccgattcattcagatggcagccgcagtagtccaaagtttcggccaggaggagctcttcgtcagccgggccacaattcagttgcagttgccccagggcggagccagttcgcccatcttcgagtggcgcacacaggtggccacgcccacgtctgccgctgatcccgcccacgaggagaagtgcattagtgggcaccagagcacggaagctgccacgcccaagagcaatatctacacgcccccacgaatcctgggcacggaggcgaagcgcaagaatctgccccaaacgttgagcaatttcttcgaggcggagcgctactccagcgcctggaatcgcgtgaccaaataggctgctcttccagtcccaatccgagttccaatcccgaaaaccaaacgaagggaggcctaatcgattaacccattaagtggcaagagctgcaggatagtgaaattccattccgttgccaaaaattcatgccccaaaattgcttaccggattcgggagtcggaatgggaggatagaaatggctgcccagggctaaaccaactatgtatataagcatcccatgaatatttatgtgccaccctcctgtaccctgataatgcaataaaagtattatttgatagataaagcggaattctctgagcaatgtcgccctcccaaggggttaaacttcattagggtccgataagcaggggcccaaatgactttgggacttgttggcggattttcagctttctgctacgtcatcagtgtgcataaatcacggctgaacaaacgcacgaaaattacagggagtcaaagaaaaatcgcacgcctcgccggaagttcattatggtagctcaaagcggaagtgccagctacacacacacaaacacacactcatactaagaaaactggtgtccgcgcgttttcacgctctctgacccgcggaaaagcgggcacctgccgtgaaagcacctgctaatttatcagagagacagcgccctgtggcacgggccaaaacgctccaccgagagcggccagagtttcaaggtggctggcgaatcgattagccagccaaacagcgaagcagctaaacagccaaaatcagagcaagccaaacgtgcaatgcacatgcaagccatcgccagcggcaagagctgagccacactgcgagaaaatatcacttggattagtcaccactgcgataacagcagctatttgttgtcatttatgtggcagtaaaccccaacagaatagccctatcattagtatgtgaatcatttttaaattcagtaataagcaagaaaaattattttaattgtatactctgataacgatacgatgacaatggattgttcaactattgccgttaaatgttaatatttatatttttaattaaaacagatcaacttgtatcgcgtttctctcagtgcatgcagggttgtcaagtggctgttgaatcaatgcaggctgcgagaagagcctcgttcgtcctggcgcagtgtgcccaatacgcggagcgggtggaggcgattctgaatgtgaatgtggatgtggatgggggctgaagctcttaaggattgccatagaaggtttatcacggctatgagcagctgtcaatgaaggttgctcgttggcgtttcttgccaccttcaaaagttacagcgaggcggccataacttggcacagtttcgggcccaaagcaaacacacatacacatggacgtacagatacacacctacacacatgagggggccatgttttagctaatcaaaagcagctctatccccagggcgaaaccgatgtggaccaagcccaaagtgccaacattataatgctatgtgcttgacccaatttcgcagagagctatacccccgaaaatcggactgggaaacctttaatttaatgggaaatgtttcttaaactaattttcgcatttatgaatttatagcacttgcttaagtttgtcgacactataacattaaaaaatcttagagcaacttcgtattctctgcttgttacgacaagtaggtacttgaaagttaagaatcattaaaagcatgtgttgaatatgagcttgggttattaactttggagtatcccatgaaaaacccatatacatataaaaaaggtattccagaaagttaacgtttaatttgatgagtcaacaaaggtttttctttgatcaaaatagttattaaaaacaattggggcttgcacacctttatccatttttcgtttctattaaaacgtttagttatgtggaaacctgtaataaatcaacgtatctttgtgattttctacaaatttacaagtcaactattggtaataataaataacacaaaagtttcgaatcagaaaacatacataaatagctttcttgactaatctaatttgtaggagacataatctctttagtaatactcactagacatcgattcatatctcttactaatttgcgattaatttgttttcaggcagttaaagctagtcataaatatcttgaattcgtttcacctcgcgatattaacataatgaaaacaaacaaaattcgagatcaactatgttttcatagtattcgagaaagatttgcttacgcagttcgctgtgaatgacactcgataccgttgtgcgagattgcatttgctaaccggttttctaagacttcgaccacaaaaccccggatggcatgaatcatgcgcacgataagggcgattcattgatatccaagtggcagtacgtgattcatttgtgacttggatccaaggcgggatacccaatcctgtgggtttagctcacctgagctgactcagttgcagctgggagtgaaatgaatgccgaatcggagccgccagacaggaggggggcaattagtggccacaaggatgttaagaacactggccatgggtggcgcttgtgtccgaagggggaggatatgtcaataattaaaaaggcggccaaatgttgtcatttcagctagaaccgaaaagcccagcgaaagcacagcgacacagaaaaatacatagtagtgaacaaaaaaaaaaaagaaatggcttggaggcaggaaggaaacaaacttcctgccacccacactagcgcttttttgtgcttctgttggttgagtttttcatcgtctctctcgtggcttttagcatgcaactcacacgtccttgccaggacgctattgttgatgttgttgtttttgttgttgctgctgctgttgttggcattttgatttatcgatttaaatttctgtgtttaaggcgctgtgcgtgctcgttgtgctgccttcaatttcgtggcttctagtctcggacttttccgctgccgccatttcgttttcgcttttcgggggttttccagcttttctgcttttcttcttccgtttgtgtttctgttactgtctttgtatttttgtatttctcaatcatttttcaaaatgtttgcccacactcaaacatacaagcgcacacacagccgcaaaaagttaaaccaagtttttggccgcctgccgtttaggtcgaggtctttacttaactttatattctccttccttttgcttgtttttttatttccttttttttcagggtctgtcccgagccacccactcacccacactcacccacaaaacgccgacgttgagagcctgaaacgtcgttaacagccacgtttgcgtgtgctggctcaagcgcacacacacacacacacacgcacacacacaacctcgcgcactagctcacatacttatactatatttcaaccaagagtgtgtgtatttttgttgttattatacggagagcgcgctcgcaatttgggtcgatggtaaaatagaaaagccaaaagcaaggcaaatacacacactcacacaaccatacacactgtcaggaatttctatatgtacctacatatatataaatatatatataaaatttcgaacaaaggtcgctgaagagaagaccagtgcacatttatatagaggtaagtacatacgtacatataaataaacgtacatatgtatatgtttgtatgtatgtatgtatgtgcgcgggtgacctgagttatgttccctcgtctgtctgcattatttttcactgtgtgtacgtcctccgccgcttttttcgtggactttttcccgctagtttcatgttaattgctcgtggcccgtcgcttgttccagcaatctgcgttaattttaaagcctgatttacacacaacaaacgctgtactgaatgtagttgcacttgtacttgcgcaattgcggattgcagtttttttaattcgcaggacacgtcccgccttcgagtagttttgtgtgtcacgagtgctccgatttggtgggggtttatttgcttgtgcggatggtcgggaactggaggaatggaattaaatggaatgggtggcccgaaaaggcaaacaaagcgctggattggatgggatttaccgcgttggcttatcgaggcttgacatcatcaacatccatacccatccggagatttgtccgttgacatcgtaccctctccgttttatttaaacaaaggagtcaactctagtcgatcacatcctttttgccccgaaacttttccagcagcggcagccactttgtgacaggacttggctcggttgagtcattaaaatgagaaatggctccgggctccgtgtgcaatgttgggcttaattgttggccaaaatgtgactgcgccgcttacgggagcagaaacacagtcgccgtggacaggctggctgaatcaggggcataaggtagaaaggttgctggggcgcaaaaggttgcaaaggtgcagaatgtggtggcaagagcagcagcttgactttcgctaatgtggcgcagcaaggtatatatatatctatatatatatatttattcacatatgtgaatgtttgctgggcgcacattaacacgctctgtggtgcatacagaaaaaatatatatttcatcgtccaactgcagacagttgttccattatgttcatttgcagtcgcttatgctgcggccaggataatttatgttatgccatattccgtatacgcaacgcatacgagttttacggaaattactgtggttctttcgcctcagtggcgggcacttcaggcattgcgttacgtatacgaagtgtaagcacataaatatcactcatacgcagtgtggttgcaaaataattgccatagatccgaacaccgttaacatcttaacatcgttcctgtttacaatgccaacggaaagttatagtaaatatcaaaagaacttatctaacaaacattttgtagtcttcttgttgttaaagtaagaaagctttgtgaatgcatatgtatatatgaatgtatatgttaattcaaattgcgtgtgtgggcgaaacaaatatgtacctgcatccccattaaacatttgtctgattccgcgccttgaacttttacccgctatcatttctcagcactcacacccgattccaagtcatcgatgccccatgcaaggcaaattcaatttgtcttcgctgaaaagtttaacgctgggatccgcccagctgaaaacttctcgcccctcgaaattgaaaggctcatttaaatacgaatgccattagtcaagcagcacccacacacccacgttcggatgcaaaattccacatatgcgcaggaatgacttgggatggtattaaaaaaccagagtaggaaggagactcaccattgataccacgttgattgcctgcattatcctcatcggagccgggcactgcattggaattgagctccggatcctgttcctggtcctcctcaaggccaaacatctgctccccggactgaaaggggtacatgatctcggcctcgtcctcgccggacgtttgggatggggcgcccactccgcccaggacatcgttgtggttctggttctgatttgggctgttgctgttgctgccaccgaaatgctgcttggccggcctgggcttggcggcatctccgagacccaatccctgggtggttaggcagagcagcaggatgctgtagatcggcaggcggaggcagcggcgacttctgcagcgactgcggctacttgggtggagcaattgctccgcggaggcaccacgagatgatgttgcagatgctgcagatgttgctggtagctgcgctgctgttctgcttcttgtctttgctttcgttattgttgttgctgatattgtttttaatgttaataatactaagcgcttgaaaatatttacacactcgtccagtatcgtagcttggtgttgcttgttcattgccaggtcactgggggcgtggcctcgtaggcgccccctccgccggcgactattgaagtctatcgttgtgctgctgctgcggctgcggcctgcggacaacatgtcgtcgctgtggcaccaagtgttgctgctgttgcggcttgctgttgctgctgttgcagttgttgcagttgttgatgctgctgttgctgttgcagttgctgctgctaaggctccatgatctttagctgcggctttccgaagcagctcctggaccgctgctccacccactgctgctgttgcgattgctggttgctgcctctgctgttgctgtttgctgcatgttgttggctgcaacattggacccgttggattaatgttgttggttggttacttgtttgatcggtttgtttggtttgttggtttgttggcttggtgttatgtcgattcacttgcaaaaccgtttgttgtcgttgtacgcttttgattagactgagtttaggttacagtttctcgcttgctgtcagatctaagcgattcatttgtatcacacaactttatatatacactatacataaataacaattaacacggaacggagagagcggagaaattgggagcgggcgcggttgctgttgcggatgcggatgcggattcaggttgctgtttccgctggtgttgctgctacatccgctgctggcgaggctaacaggagcctcggcatttccatttccacggggcgcgctattcccctagattttcacacacccccgcctcttgtggtatttttcacgccaccttttttcaggcttttccgtttcacttcacggctccctcacggctactgtgccactgctgctgctgctgctgctgctgctgctgctgctattcctggccatttgtctgaggcttttccgcttttccgacgcggtctgcccctgtgtgcgtgcccgagtgtggaaaagtttccctgagtggccgctgcgaaagctggagctaaatctcggtatcggtagcagtgtcggtctgcagctgggctacatcacgctgcgcactctgctggcgttgtgagcgctggctgcctgagcctctttttgagcctggccaggagttgggctggaaaaccgacagccaacgacggccgaggaccgaaccaagaccgaccaggatgcgagcctggaagctcggctttccgttccaaaactgcttgaggagtgagggagagagtactgctgcgcctgcgtcgcttttgtttacattttcgaaggcttcgctcgatgactgttaaggctcaaaggatgcctgtctgtggaaagaaagtggcaaggatatagtttaatttgtttaaaaaatatttaagctattttgtgatcctcacaagctaaatagtttgctctacaaactgatttctaattcattaattattcacaatatttcattcacacaatgttgttatcaaaaaccaatttttatttttccatgtatcaaatgaaaagttggcttaaaaaataaaaaaaattattctaattatccgatttgctttgtaccattgaacaaaataaatagatgaaatatttaggcgtaatttttagtcaactaaaaacaaatgaacaaattttattaagtaatataaagtaaattaaaaatatataattaaaacatttatagttctgttacaaatatttttataattttgatttttgtgctagaaaataaaattaaataaattaaaccatttgcaaactttgtatagttttaagagaagcagttggttggttcttatgctcgtaaccaaaaagcgtaagatttcttaacaaaatcattgcaagctctcttggtcaacttttctctttgccattttccaggctctctctctctctggtgctcaattttccgcactctctatcgcaattttcctgtccctctctggatgccgcttatctgctaggccttatcgcttttctcacggctttttctttgcttttgctttcgtttgctgctgtgtttgttgttttagcttacgcttacaatttttactttcatttaggtttagtaggtgactcgccacacacccacccccgcccactttcccatttccccgcccaccgagcgtttttttttactgcttctggctgaatgtgcggttatgttcattgttatgctttgagtagctcccgctgcttctagtcctagtcctttctttctcctgctaatcctgcccatccccgctggcccatccgctgctttttgtcctttttccactgttatttttagccgtaggccagagtttgtccaagaattcaacggtgcggctttgttattaattatgtttttcccccgctatgttttatgtgttgttttttttttttagaaaattgcgtaacatttttgcgctttctttgctttacataattgccccctcaatttaaagaaagcaacggacatttgatattttttctatagttcagttttagagacttttttggatttgtctcgtgaacgtagcaataatattgcaagtttgtatagaagactttaaaccattacttttttacaacaaaagccacagccgtaagatatgcaaagcaatgcagaaatctatgctctttcatatgaccgtattaacttagacttgtactttttattttattaaagccaataaaagttatcatttaatcgcagaaaagcagcgcttttatataatttgcacaagctattttacaaaaggagtcagctggtaagcatcgtaaaatccacctaagagcccattagtcgctgtttaagccaagccaaaaagaaggggggcaaatggaaactcctggctaattgttatatcatttgctgggcaattttaaaggggtggggtcgctttaagaacggggtcgaatcctcgtgactgccgaaagtctgactgttaaattttcttcttgacttgaccagtcgaaaaaaaagaaggcaacctgaaagcatgaagaaactctgcacacacacacacacacacacacagcacactcacagatacacgcacacacacacacaaggcagaggcaacgttttgacctctttatgaaaaaggcctcaagcacgagaaggctcagactcacacacaccaacgcacaacaagcacgaacggggctgccattagtgtttctgcactcacacagacgaccgaaaaaacgctttgcctcggccgcctcagcccccctcattcgccccatcatttttgtggctttttattgcttgattatataaaaattggcttttgtatatcatattttgttcaccgttgcggcaattcgttcatttcatctccctcaagtacgcccggatgattggggcactttcgattcctgaggtgagctttttcgatttggcttaagttttccctttgatttcaaactgcaatcaatttgccaacacctcgcgcaccaacacacgcacacagacagcgcacacggttaaaagtttctgcacacacatacaccgagcaggaggactattggacgcaccatccgctccttggtcctgcgaggatgttgtcagcacagcgcccgaaaacgatttgggttccctggcaggcgaccacgagtccggaggccacacacgaagtcaatggcgggccgaatgtgcgacgagctgagccgaaaggataacgacttccaggccgctggaggatggggcgaattcagctggccaggatcgggtttggtttcactctcagtttcgttttcattttcatctgctggcttttagctacgagcatcgcttcgatttgtaattaattaatttacgataacttccgttcgcacatatttgcattaacaacccatcaggacgagcatttcctgctgtcgctctcgggtttccagtttatagcatactttcgggggtacgagagccgccaaagagagcgaacgcgcagctgttttctccactctcattctcccccaccgcacccacacaaacagcaaacgccaaaagaaagaaagaaataaacgtttgtgcatgcgttacaaccacttatacagacacgaaacgaatacacacacacacacacacacgcggacactctccacgcacaattgtattttgattatgcccggttttggtacgccgcatacctcggatacttctacgcacaacaatgccaaatccccgaccccaaaatccagtagctccacgtatctacccaatgccccttacaccgcaggatcccctcggaaaacccaatccaatccaagccaagccaaaccaaccccacgccccattgatagccgccaagtttgccgtcacatcaaatatttattgcgagaagggagcgaaacaagttggaacgaaatagtcgaaaattcggaatttaaaatttaactacgactactgcagaacttttcgcggttgcaatacattaaggtcgacagcgcacacctcaatgagactaatgactttggtataatttctaatggctagaagagtaggcaggaatctaaagctttatttaaatattatgtagacagaaagttaattaaaaatcgaataatta

SEQ ID NO: 8066 - DNA, 3575 bp, DROSOPHILA
acaacatcctcgcaggaccaaggagcggatggtgcgtccaatagtcctcctgctcggtacaggcatcctttgagccttaacagtcatcgagcgaagccttcgaaaatgtaaacaaaagcgacgcaggcgcagcagtactctctccctcactcctcaagcagttttggaacggaaagccgagcttccaggctcgcatcctggtcggtcttggttcggtcctcggccgtcgttggctgtcggttttccagcccaactcctggccaggctcaaaaagaggctcaggcagccagcgctcacaacgccagcagagtgcgcagcgtgatgtagcccagctgcagaccgacactgctaccgataccgagatttagctccagctttcgcagcggccactcagggaaacttttccacactcgggcacgcacacaggggcagaccgcgtcggaaaagcggaaaagcctcagacaaatggccaggaatagcagcagcagcagcagcagcagcagcagcagcagtggcacagtagccgtgagggagccgtgaagtgaaacggaaaagcctgaaaaaaggtggcgtgaaaaataccacaagaggcgggggtgtgtgaaaatctaggggaatagcgcgccccgtggaaatggaaatgccgaggctcctgttagcctcgccagcagcggatgtagcagcaacaccagcggaaacagcaacctgaatccgcatccgcatccgcaacagcaaccgcgcccgctcccaatttctccgctctctccgttccgtgttaattgttatttatgtatagtgtatatataaagttgtgtgatacaaatgaatcgcttagatctgacagcaagcgagaaactgtaacctaaactcagtctaatcaaaagcgtacaacgacaacaaacggttttgcaagtgaatcgacataacaccaagccaacaaaccaacaaaccaaacaaaccgatcaaacaagtaaccaaccaacaacattaatccaacgggtccaatgttgcagccaacaacatgcagcaaacagcaacagcagaggcagcaaccagcaatcgcaacagcagcagtgggtggagcagcggtccaggagctgcttcggaaagccgcagctaaagatcatggagccttagcagcagcaactgcaacagcaacagcagcatcaacaactgcaacaactgcaacagcagcaacagcaagccgcaacagcagcaacacttggtgccacagcgacgacatgttgtccgcaggccgcagccgcagcagcagcacaacgatagacttcaatagtcgccggcggagggggcgcctacgaggccacgcccccagtgacctggcaatgaacaagcaacaccaagctacgatactggacgagtgtgtaaatattttcaagcgcttagtattattaacattaaaaacaatatcagcaacaacaataacgaaagcaaagacaagaagcagaacagcagcgcagctaccagcaacatctgcagcatctgcaacatcatctcgtggtgcctccgcggagcaattgctccacccaagtagccgcagtcgctgcagaagtcgccgctgcctccgcctgccgatctacagcatcctgctgctctgcctaaccacccagggattgggtctcggagatgccgccaagcccaggccggccaagcagcatttcggtggcagcaacagcaacagcccaaatcagaaccagaaccacaacgatgtcctgggcggagtgggcgccccatcccaaacgtccggcgaggacgaggccgagatcatgtacccctttcagtccggggagcagatgtttggccttgaggaggaccaggaacaggatccggagctcaattccaatgcagtgcccggctccgatgaggataatgcaggcaatcaacgtggtatcaatgacacgcacaacgataactcgaccaccacgaaaacgccactattcccaaaagatctattcacgaaagaacagcttgagaacggcgctgtcatcctgcacatcattggggtgatctatatgtttgtggcgctggccattgtctgtgatgaattcttcgtgccttcccttgacgtaatcattgaaaagctcggcatcacggacgatgtggccggcgcgacgtttatggcggcgggtggcagtgcccccgagctcttcaccagtgtgattggcgttttcgtgtcgttcgatgatgtgggcattggtacgatcgttggctccgccgtgttcaacatcctgtttgtgatcggaatgtgcgcgctcttctccaagacggtcctgtcgctcacctggtggcctttgttccgcgactgctcgttctacagcatcagtttgctggtgctgatctacttcttccgggataaccgcatcttctggtgggaggccctcatcctgttcaccatctacatcggctacgtggccttcatgaagtggaacgtccaggtggagacgtgcgtcaagaagatgattaccaaaaacaaggtgactcgcgtcagaagtacagatcaacttatgccagcaggtaatgcggccaactcatcggaaacatcgatggccacccagccgggcggttccgtaacatcgcgggcggccagcgaaacccgctcgggtccgcccggatcgagcaatgcgggcgccacaggtaatagcagcggcgggggcggcacctcgggtagtactcagaccggtgccaagttccgccacggcctgttacagctaatgatacacacgatagatccactacacgatggcaaagtggacgagaaggcgacgcagctgcacgccatcgcctcgctgaaggtgttgctggatgccaccaaaccacagcgcggtggtgccaccacctcggcggccaatcacgtcaagatcaatctcaaggagaccacgctcgccgatcgtcccaatgggaacatcgacaccaccctcgactcggcgcccgaaatcgaggatgagccggaaccactgagcatggcctggccggatacggcgcggaagcggctcacctacgtcctggtggccccgctcctggtgccaatgtggctaacactgcccgacacgcggacgccgcgcggcaagcgcttctttccggtcaccttcattggctccatcgtgtggatagcggccttctcctacctgatggtctggtgggccaacgtggccggcgacacagcgcgcattccgcccgaggtcatgggtctgaccttcctggcggcgggcacctccattccggacttgattacctcggtgattgtggcacgcaagggattcggcgacatggccgtatccagttcggtgggcagcaacatattcgacgtgaccgtgggactgccgataccgtggctgctgtacggcatcatctatggggcgcccgtcgaggtgaactcggtgggcatggtctgctccataaccatcctgtttatgatgctggtgttcgtggtgatgtcgatcgcctgcttccgctggcgcatgaacaaggggttgggcttcaccatgtttctgttgtattttgcctttgtcgccgtatcgctgatgttcgaatacgatgtgatcacgtgccccttttaa

SEQ ID NO: 8067 - protein, 856 aa, DROSOPHILA
MLQPTTCSKQQQQRQQPAIATAAVGGAAVQELLRKAAAKDHGALAAATATATAASTTATTATAATASRNSSNTWCHSDDMLSAGRSRSSSTTIDFNSRRRRGRLRGHAPSDLAMNKQHQATILDECVNIFKRLVLLTLKTISATTITKAKTRSRTAAQLPATSAASATSSRGASAEQLLHPSSRSRCRSRRCLRLPIYSILLLCLTTQGLGLGDAAKPRPAKQHFGGSNSNSPNQNQNHNDVLGGVGAPSQTSGEDEAEIMYPFQSGEQMFGLEEDQEQDPELNSNAVPGSDEDNAGNQRGINDTHNDNSTTTKTPLFPKDLFTKEQLENGAVILHIIGVIYMFVALAIVCDEFFVPSLDVIIEKLGITDDVAGATFMAAGGSAPELFTSVIGVFVSFDDVGIGTIVGSAVFNILFVIGMCALFSKTVLSLTWWPLFRDCSFYSISLLVLIYFFRDNRIFWWEALILFTIYIGYVAFMKWNVQVETCVKKMITKNKVTRVRSTDQLMPAGNAANSSETSMATQPGGSVTSRAASETRSGPPGSSNAGATGNSSGGGGTSGSTQTGAKFRHGLLQLMIHTIDPLHDGKVDEKATQLHAIASLKVLLDATKPQRGGATTSAANHVKINLKETTLADRPNGNIDTTLDSAPEIEDEPEPLSMAWPDTARKRLTYVLVAPLLVPMWLTLPDTRTPRGKRFFPVTFIGSIVWIAAFSYLMVWWANVAGDTARIPPEVMGLTFLAAGTSIPDLITSVIVARKGFGDMAVSSSVGSNIFDVTVGLPIPWLLYGIIYGAPVEVNSVGMVCSITILFMMLVFVVMSIACFRWRMNKGLGFTMFLLYFAFVAVSLMFEYDVITCPF

SEQ ID NO: 8068 - DNA, 2808 bp, DROSOPHILA
accgtaatttcgtcattaaatataatctgttacctttcggtttagaaattttgaaataatttaaaaataagccaattcaaattattttcatgtaatttttcaaaaaccgaaggaattcaacaaatctgaacgcaaatatacgtttatatgtatggtgtctatgtgcatagtggggggatttatttgtgttcagtttgattgtgtcgacaattttgaagttttgttttcggttccctaatttaatatgtacttggcgtattgcggctcatacttgtcgatgtagtgctggacaaaccgacaccttataataatgaagtgcccattcaacagtgcgtagtccagtgccgacttggccagtagcttcccaatgccatgtccgcccagttcctccgggacgttggtgctgttgatggtcatcacaccgtccctgatggagtataccaatacagcccggagctcgccaatgtcggtgtagaaccgacctctcttatgccggacaacaatgtgcgtaccaaaacatctttcctgcgaatttaggtttggaacctttaaaatttgaccagttagggtgtggttacttgtggggatggtgtaatctctcgagcacaaggaatacgttcttcggccaccttgcagaatcagaattggaagcaatttggaaagcatttcttaatttttgtgagtagtttcaggaattcgggccgaataatcatacttcacatcatagtgacgattttcgagtgaccagcttaaattatttagtaaatagttcacactagcaacgcacctgcgaggtgaattgataaaggattggggattaatcgcggtgcatttttccagcttatctacagctacataagtataatatctaaatcagttcaaacattgaagattatttccgaatcccttcttactggcaatgtgaccgtactcgcgcttacttattttgctaccagccatcagctgttgctcggctattgtttttgtttttgttacttggattgctggaggcgtagttttctgcttttgataattactcatagcaaaagcagagaaatggcgctggtggatcacgattcctgggacatcgagtacgagggctgcgagcgactgcggcatcagctgctggtatacctcaaccagcggcagcagctcaatccgaggacgagccagttcgtccaactgacaagcagcattcagacgggaatagagcagctggccaaggacatgaagcacctcaaggtggtgctggacaacgccatcacctgggagacgagcccggaggaggagctgcaacagcggcgcatcgactgggatagacttacttcgcagctgcgcgagatccgcgagaagttcgcaaacagtagccgctccaatgtcccggccgcatccggttctgcttggcaggatcaggatctcggcccaggtcacagcaattcctcgcggaataccgccttggatgtggaggctctgaagcagaaaaagaccgagatgctggcgcagcagaacgaaggactcgaggttctatcagccacattgtccagacagcgccaactggccacacagctgggcaacgaggtggaggaccagaacagtgggtattccccagtccctgcactaccaatgctaatccctacctccttgtagatatccttgacaacttggccaatgccatggaccgtgtggaaacgggtgtgcagcgggaaacacagagcattggacaggttaaccggcgggacagtacctggggctactggctcgtcatcatagccttgttcgtcgccatcattgtcgtggtcttcgtctagctcccacgatccattccagttgttatactactttatactatgacctgcgtggaatgtctatctgttaacccaaagtttgattatttatgtatacaccaattaaagtaggatttataagtatttacgttcgcggatcgatccccttgatcaggtttatttagtcgttacattacggttaacagatgtacaggtgtttatatacttaagccaaatcggaggcgtagggcacgttcgccaggtgcccgatggcgccgacggccagcttggagctgcccaccttcttggccgcctcctggacctgcgactgcgagatgccatcgattgcgccaagcagggcgtccgcctccagcacgttccgggtgagcgccgcctggcgaccgatctccttaattagaccaccgtccgacgagtagcgcgagatgatgcgcgccttcagaagagccttgcctctggccacatccttatcagacaccgaagccgacttcaggccgcgcaccaggaactccacggtcttgccaatgtccttggagtcggcggagaccacaaaaccgaacagaccagcgtccgagtagctggcattcacagccttgacagaggctccgacgccgccggcgcagttgacggcctcgccaaagagtccagcagaagtgccgcgcttggtggcggccttggcgccgagcgcctgctccaggatggcgaatgccagcgcttccttgtggttcgatgcggcggcgccctgtccagcaacggcgacgaccgcacggtgaccagaagtgtccttgcgcgcatctccaccataccagttggcggaggcagccttgctgccgccgctggggaactgcagggtctgggcgaagccggccagcgtgttgttgtcgattcccacgcccacgacagcggcacggccagctgcgaaggtctgggccacgtagtgcagcaggctctcggaggacagcttgcccaactggaagcggggcgagtagatcgagttgcccaggcc

SEQ ID NO: 8069 - DNA, 755 bp, DROSOPHILA
attgctggaggcgtagttttctgcttttgataattactcatagcaaaagcagagaaatggcgctggtggatcacgattcctgggacatcgagtacgagggctgcgagcgactgcggcatcagctgctggtatacctcaaccagcggcagcagctcaatccgaggacgagccagttcgtccaactgacaagcagcattcagacgggaatagagcagctggccaaggacatgaagcacctcaaggtggtgctggacaacgccatcacctgggagacgagcccggaggaggagctgcaacagcggcgcatcgactgggatagacttacttcgcagctgcgcgagatccgcgagaagttcgcaaacagtagccgctccaatgtcccggccgcatccggttctgcttggcaggatcaggatctcggcccaggtcacagcaattcctcgcggaataccgccttggatgtggaggctctgaagcagaaaaagaccgagatgctggcgcagcagaacgaaggactcgaggttctatcagccacattgtccagacagcgccaactggccacacagctgggcaacgaggtggaggaccagaacaatatccttgacaacttggccaatgccatggaccgtgtggaaacgggtgtgcagcgggaaacacagagcattggacaggttaaccggcgggacagtacctggggctactggctcgtcatcatagccttgttcgtcgccatcattgtcgtggtcttcgtctag

SEQ ID NO: 8070 - protein, 232 aa, DROSOPHILA
MALVDHDSWDIEYEGCERLRHQLLVYLNQRQQLNPRTSQFVQLTSSIQTGIEQLAKDMKHLKVVLDNAITWETSPEEELQQRRIDWDRLTSQLREIREKFANSSRSNVPAASGSAWQDQDLGPGHSNSSRNTALDVEALKQKKTEMLAQQNEGLEVLSATLSRQRQLATQLGNEVEDQNNILDNLANAMDRVETGVQRETQSIGQVNRRDSTWGYWLVIIALFVAIIVVVFV

SEQ ID NO: 8071 - DNA, 2798 bp, DROSOPHILA
ggatatgaaatcccttccgtatctcagggcggtcatcaaggaatcgcttcgattgtatccagtcacctttggtaacgcccgatccgccggagctgatgttgtcctcgatggctaccgaatccccaagggcaccaagcttctgatgaccaacagctttttgcttaaggacgaccgactgtatccccgggcaaaggaattcatcccggaacgctggctgcgccgaaaggacgatgacaagtcggatgtccttatgaacaaggacttaaatgcctttatctacttgccgttcggattcggaccacgcatgtgtgtgggcaaacggattgtggatcttgaaatggaactcacggttgccaacttggtgcgaaatttccatattgaatataactattccactgaaaagccatataagtgcaggtttttgtacaagcccaatattcctctgaaattcaagtttaccgatctgaaatattaaaatttgatcaagcaaatcttgtcttaatattatcaaagctctgtggtgcttcactttttatgtgaatatcgttatatccaacaaatgaggtaaattataattaatatcttgtatctgtccaaaatcacatagtgctttcctttaatattttttttaccttggttatttgactttgttttgtataaaattgagctttatattacattctaaaatatcacgtcaaaaaatgaacgacctacagcaaaatactttttcatttttaagtaaaagcattcattgaactaaaaaacatgtttttttaatatatttgtcagcaatacatatatccaattggtaaaagttaaactttcagtttgtgtataatgtaagtgttttgtgtataatgtaaatgtgggaaatgttattcgttaccatttgactggaagtaacagtccaacttgaatttttacagcagggcaacagctgttgctgggaaattccccacgtctggtcacaccaatcctgacaaacagaagtgattcatacaaatcctccaataaaaacaacgtagattgatcaaattcgtcggtttgagttgcaaaccaacacctaatattttttcttcgttcgtcattgtaaattcgtcaagctgggtaacgacatgtctacgagttccatggaaagtaagtgcagcatagcgatgacgccagacgaagattccgaatgacccacacctctttttttccgcccccagaacaccttttcaatctaaagtttgccgtaaaggaattggaacgaaactcaaagaaatgtgagaaggaggagaagctggagaaggcaaaggccaagaaggcgattcagaagggcaacatggacgtggcccgcatccacgcagagaatgcgatccgccagaagaaccaggcggttaactacctcaggatgagtgcccgagtggatgcagtggccagtagggttcagtccgcactcaccacccgcaaggtcaccggctccatggccggcgtggtcaaggccatggatgcagctatgaagggtatgaacctggagaagatttcctccctgatggagaagtttgaatcgcagttcgaagacctggacgtccagagctcggtaatggagggcaccatgtccgacacggtaaccacctcggtgcctcagggagatgtcgacaatctgctccagcaagtggccgacgaggctggcctcgaactcaacatggagctgcccagcggagttcagagccaatccgttggagcctcgacagcagtgtcccaagagcaagacgagctcacccagcgactggcacgtctccgccaggctgaataaaaatagcgacgccctgcccgttgaatttctgttttagcaattaagtacattcaaaatataaataagtataaactcagtgattggaagtctatcgatgctgctttgtctaccataatcagaagaattgccatgaatctttaagtgtaagtgtgctgtttgtataggcttcaaacggattatgatttacatgcttttctaatgcaatatacgataatcatgttttaaaggctttgttgttatagttatttgaagacctgccaatttttgtaacttgtttacttggaaagatatagcataatttggaaatagaaatggttctgcagcaatcacaactttcattgctttggttactataattcatttctggtcttagcttttatttgtcttaatattatatttaaaagtatacaagccctttatcttaaaactagaacacgccaagcaatcgctatgactcaggtcaacagtggaggttgaggttgttgatgcggtggtgcaatgactggattgggattgatgggtgcctgtttggctttttgctttcggggtttccgggcagctggagtattgggtccaggctcagacccgggtgctcctgtttcatccgccgcctgcttgtttttgggcttcggtcctcgacgcttctgctcggttttccctttgggatgtggagcctccatgggaacggatcgccagtcgtctccgtgcttatctagtcgccgttttagaagctccacgtcatgattgcgccttcttactatctttttgatcccatttactctggataaaaggtactgcacatttttgtttacgtttcgtggagcataaaaatgacggttacctcatcacacatcgctcattttccgcctgaatcctttggcacctgtcatacagtttttccaccagctgtttgtacatgagttctttcttatttagcaacattttatacagatattggttatagttcaatatttagaaatgtttttatttacgccatggc

SEQ ID NO: 8072 - DNA, 727 bp, DROSOPHILA
aaatcctccaataaaaacaacgtagattgatcaaattcgtcggtttgagttgcaaaccaacacctaatattttttcttcgttcgtcattgtaaattcgtcaagctgggtaacgacatgtctacgagttccatggaaaaacaccttttcaatctaaagtttgccgtaaaggaattggaacgaaactcaaagaaatgtgagaaggaggagaagctggagaaggcaaaggccaagaaggcgattcagaagggcaacatggacgtggcccgcatccacgcagagaatgcgatccgccagaagaaccaggcggttaactacctcaggatgagtgcccgagtggatgcagtggccagtagggttcagtccgcactcaccacccgcaaggtcaccggctccatggccggcgtggtcaaggccatggatgcagctatgaagggtatgaacctggagaagatttcctccctgatggagaagtttgaatcgcagttcgaagacctggacgtccagagctcggtaatggagggcaccatgtccgacacggtaaccacctcggtgcctcagggagatgtcgacaatctgctccagcaagtggccgacgaggctggcctcgaactcaacatggagctgcccagcggagttcagagccaatccgttggagcctcgacagcagtgtcccaagagcaagacgagctcacccagcgactggcacgtctccgccaggctgaataa

SEQ ID NO: 8073 - protein, 198 aa, DROSOPHILA
MEKHLFNLKFAVKELERNSKKCEKEEKLEKAKAKKAIQKGNMDVARIHAENAIRQKNQAVNYLRMSARVDAVASRVQSALTTRKVTGSMAGVVKAMDAAMKGMNLEKISSLMEKFESQFEDLDVQSSVMEGTMSDTVTTSVPQGDVDNLLQQVADEAGLELNMELPSGVQSQSVGASTAVSQEQDELTQRLARLRQAE

SEQ ID NO: 8074 - DNA, 2779 bp, DROSOPHILA
gcggcgttgccaccttgctgctttgtttacattctcacgatagagatggaccactgtaacagcagccttgccagaccgccacttcgatctagtggtgacctgtggccgtaatctggctacttttttgcacacacatttagcttcttaaaataatttaattccacccttttaacaaaaccgatcgggtcttgacttaggaggactaactatatttaaaaaaataattctgttgttactaccataataaacgcgcaatgaaaactaaaacacgttaagcagatcaaattttgttgccacataggtaacagtgcgttccttatattgttgtataaaaattaattaaaaaaaaaaaattaattataaaaaataattataaaatatcataaatttaggattccttctgcgctcaaaatagttggtgttataattattttatataaacgtttaaattatataagaaataattttcctcgaaaaataattccgaaacgcgtaatgtcttaattttatagctctctaaaatggtattatttagcttttcattggcattagcaaaataaaaaagtaaatattgtgattgaatatttttgcaatcgtagtaatttgatttatctattttaatgacggactcggaaccggttcgatatcagcgttgccactggttcgacgctcgaagttacaatagtgccaccaccaactagttctttcctccaagtcccatctttcttttttgacgtgaccagcgagaaaaatggttggtattttgtgagcgaaaagatttctaacctattttacaacgaaacgaacaattaaaagccaaagtaatggctaaaacgcgccccaaattactgccgttcatggtgttaacacaaaatgcgattaataatgcagtaccacgctagttgagacgcgcaacgctagcacactattttgtgctcacccctagcacctctgcttcttcttctttccttttcttttcgccgcgtttccggagaggttgcgttaagccacgtgctgaatttcttaatttgctggtttagtgaatacggaaaattcgttggtttttttgttctgtgctgagtgttaaagagcagagctagaaaaatggttggttggttacacccatcgacacccgatgctctcagcccaagggccaatgaacatgccatttgcagtgcagcgatactaatgttcttgttttctgcccgtttgtttgtgctcccgtccaggtgaaggttaagtgctccgagctgaggatcaaggacaagaaggaactcaccaagcaattggatgagctcaagaatgagttgctcagcctgcgcgtggccaaggtgaccggcggagctccctccaagctctccaagatgtgagtatgccgcggcacaacgacaagcgtcacgaactaattccggtgttttgtgcatttatgtgcgttcttatccatacagccgcgttgtccgcaaggccatcgctcgcgtctacattgtgatgcaccagaagcagaaggagaatctgcgcaaggtcttcaagaacaagaagtacaagcccctggatctgcgcaagaagaagacccgcgctatccgcaaggccctgtctccgcgcgacgccaaccgcaagaccctcaaggagatccgcaagcgctccgtcttcccccagaggaagttcgccgtcaaggcctagaatgcatccagatactccgactgtctatagtgcgcgttaagggttcttcggtacaatgaagaagaaaaactaaataaaatcttttttttaaagtgaaaatagcgatgcgtgtttgattttgtgaccgaaaaaacgcgagtggcacatggctttggccatgggttcatggaaattagttaaaaaacaaaaaaacaagtgccgcattccctgttctacatatgttagtcggatccaatgggatctacttaactacttgtggtccttaagatcattatagagcaaaaacgttgagttagcgccttgtagaagtaatggcaaatcttaagttcaatctttaattcagccttctttgaatatgcaaacttgaaaaacaccagaattctcaattggtctacgtatatgtatttaattcgattgtctttgatgtaagcacggccatacatcgtaaataattatgaactaacaagtaataagtaggtaattgatatgaattacaagctctcgactgcgagctcgatcatactgaatatgtttggcacatttggttaatactattcttctgcacagcgtgaaacagcggcgtgctgcggatgacgcccgacagctccttggagttcttgctttggtgatagtttctactcggcatcggcgacaacggttcgccccagaacttgagcagcgcaaagatcttgtagtaggccactctgaaatagaagatagattcgctattagcagctaaacccgatagcagccaaaactgccagcaaacttacctgtagttgcgattgctggccgcatagatgatcgggttaatgacactggaagcccaggccatcacggaggcgatgatgtgcagccaggggtacgaggtattgcgctcgtcgtccaccacattggccagcattagcggcaggaagcagacgaggaagcacagaaagatggtgaccatcatgacggtcagtcgattgtcttcgcgcgccttgcgcgtgcatgtggtggtcatgtaggatccgccgccggacgacgaggagcccttggccgctgcgatctggaagttatcgtggttgcgaatcttctttttctggtgcagcaccgtaat

SEQ ID NO: 8075 - DNA, 569 bp, DROSOPHILA
cgttaagccacgtgctgaatttcttaatttgctggtttagtgaatacggaaaattcgttggtttttttgttctgtgctgagtgttaaagagcagagctagaaaaatggttaagtgctccgagctgaggatcaaggacaagaaggaactcaccaagcaattggatgagctcaagaatgagttgctcagcctgcgcgtggccaaggtgaccggcggagctccctccaagctctccaagatccgcgttgtccgcaaggccatcgctcgcgtctacattgtgatgcaccagaagcagaaggagaatctgcgcaaggtcttcaagaacaagaagtacaagcccctggatctgcgcaagaagaagacccgcgctatccgcaaggccctgtctccgcgcgacgccaaccgcaagaccctcaaggagatccgcaagcgctccgtcttcccccagaggaagttcgccgtcaaggcctagaatgcatccagatactccgactgtctatagtgcgcgttaagggttcttcggtacaatgaagaagaaaaactaaataaaatcttttttttaaagtgaaaa

SEQ ID NO: 8076 - protein, 121 aa, DROSOPHILA
MVKCSELRIKDKKELTKQLDELKNELLSLRVAKVTGGAPSKLSKIRVVRKAIARVYIVMHQKQKENLRKVFKNKKYKPLDLRKKKTRAIRKALSPRDANRKTLKEIRKRSVFPQRKFAVKA

SEQ ID NO: 8077 - DNA, 2781 bp, DROSOPHILA
cacgtcctttattttgcaatctatggttttcacaactatcatagtcttcgtctattacctcaatattgacttggctattggattgatcgctgtcacagtccacgaactgatcatcgtctttaaagaggctcgttctacactagacaacattcccattggatcatgccactgcctcgccaatcttcaactacactttcgagttcgacaaaatgctgaaaagcacctccatcgatactcgattccccatcctcggaataagataccttgcggaatcgggattcctccattaactaaacgtaaaattattagctcctctggtgggtttttctaaactcgaacgcattttgtgcatcttggcagcaggaggtgcaaaatgtttcgggtagatgatcgcctttttccactttgaggccagtgcactcggaaatgattgacgctattgaagcttcagtgccgtgcttaacttcaaaaatattgaactcgttttcacattgcccgaggcaaattcggcacaccaaccccaactccatacctccgaaattgagttaaaaaatttagcgatctcgctttcaggtcggatcgatcaatttattgtttgtttattgtgttaaagatgcatgctgataagtatcgatactatcgtgcggttaatggggacgataggtacaacaccactcacaataaagtatttttagtggaaagtataaaaagaagacttcaattaaaacaataaatacaatacaattacattggaagtattctgattgcattgtgaatgttggccacaaagtatgaaaacttttttcagctttactgaatttaaatatttcttaaccatttcgttcgctttcagaataatataatacccagaatgacttcataaattttatcacatcttagtttgaatgtacaccttttagcgatagtttcatgtttcggcctgtgctgctaagcggtgattcgcctgcgctttccaacacacagcaaattcgcataaaagcgaaacttggttcttcctttaaaaacgtgatacttgcctgataggatagaaagccgagatgtccgacgagacgaacgccgcggtgtgggatgactccttgctggtgaagacgtacgacgagtcggtgggactggcccgcgaagctttggcccgccgcctcgccgattccaccaacaagcgcgaggaggagaacgctgccgcagctgaagaagaagctggcgagatctcggccactggtggggctaccagcccggaaccagtatccttcaaagtaggcgactacgccagggccacctacgtggatggtgtggactacgagggcgctgtggtgtctattaacgaggagaagggcacctgcgtactccgctatttgggctatgagaacgagcaggaggtgttgctcgtggacctcctgccgtcctggggcaagcgtgtgcgtcgcgagcagttccttatcgccaagaaggatgaggacgagcagttgagccgccctaaggcatccgctggtagtcattcaaagactcccaagtcatccagaaggagtaggatctctggcggactggttatgccgcccatgccaccagtaccgcccatgattgtcggacaaggggacggcgccgaacaggacttcgtggccatgctcaccgcctggtacatgtccggctattatacgggcctctaccagggaaagaaagaagccagcaccactagcggaaagaaaaagacacccaagaagtaattccatcttatctcatcatcacatcacatcttttcgaaagacttgtagatattaagaaaacagaacgattaaatttattatattaaagagtcagtatcgtcatggtgggatctcgtttcaattgctacataaatggaaaaaaaaaatgccgaggcaggcagaaatttaggttgacattcaatatggccacttgagaaaatcagtgcttcgatacatttcgtagcgagcggttgagtttgtagtataacggaattttcataaccttcgatagatcgtagaatggcgatattttagctggcagtatacaaatcagaaaagaaaaaaaacggatattttgattggtaagcagactttcttacactgcaatagatttctttaactttgggtatcgtgtagctgttttaaaatcagaagctgaaaaattttattgataaaaaataagatataatgataaagagagtacatggtagtattgcctaattaacaaactagctaaaaatgcgcttggaccttttaaccgtccatattcaacactgccaaatgcatcctttattttcacaggcttacgatttgaaatataagtggtaaatccttctcttttgcaatgccaaaccagatgagagtgctggactttggcgatggatcggtgcccatccagctggactatccagattcgaagatcttcagcaagtgcagtagctacggcgatcgtgttccgggtacccattggaacgaaatcacagtgcaccataagggccgcctggaatactcgccaaatccggagcagataatcctggatgccttataccaggcgatagacggtgcggacttctttccggtgttctaccaggtggcctccacatagctcaaacatccgacatctgagttttaaactacatacaatttttagcgtgggaagaacatggataccatgctggtcaggaactgcaaggcggccattgataagctcttcaaacagcggctgtccattaatctgaaaggaggcgcctccatacccatcagtattcaactgggcgtagcc

SEQ ID NO: 8078 - DNA, 781 bp, DROSOPHILA
cgaaacttggttcttcctttaaaaacgtgatacttgcctgataggatagaaagccgagatgtccgacgagacgaacgccgcggtgtgggatgactccttgctggtgaagacgtacgacgagtcggtgggactggcccgcgaagctttggcccgccgcctcgccgattccaccaacaagcgcgaggaggagaacgctgccgcagctgaagaagaagctggcgagatctcggccactggtggggctaccagcccggaaccagtatccttcaaagtaggcgactacgccagggccacctacgtggatggtgtggactacgagggcgctgtggtgtctattaacgaggagaagggcacctgcgtactccgctatttgggctatgagaacgagcaggaggtgttgctcgtggacctcctgccgtcctggggcaagcgtgtgcgtcgcgagcagttccttatcgccaagaaggatgaggacgagcagttgagccgccctaaggcatccgctggtagtcattcaaagactcccaagtcatccagaaggagtaggatctctggcggactggttatgccgcccatgccaccagtaccgcccatgattgtcggacaaggggacggcgccgaacaggacttcgtggccatgctcaccgcctggtacatgtccggctattatacgggcctctaccagggaaagaaagaagccagcaccactagcggaaagaaaaagacacccaagaagtaattccatcttatctcatcatcacatcacatcttttcgaaagac

SEQ ID NO: 8079 - protein, 226 aa, DROSOPHILA
MSDETNAAVWDDSLLVKTYDESVGLAREALARRLADSTNKREEENAAAAEEEAGEISATGGATSPEPVSFKVGDYARATYVDGVDYEGAVVSINEEKGTCVLRYLGYENEQEVLLVDLLPSWGKRVRREQFLIAKKDEDEQLSRPKASAGSHSKTPKSSRRSRISGGLVMPPMPPVPPMIVGQGDGAEQDFVAMLTAWYMSGYYTGLYQGKKEASTTSGKKKTPKK

SEQ ID NO: 8080 - DNA, 5876 bp, DROSOPHILA
atttacgatgccatctacccagcggctggtgccagtgtggactgggcctacggaacccaggatgtgcgcatggccttctgctatgaactgcgtccctcgtcgacctcctacctcaccggattcaagcttcccgccgagcaaatcgtacccgccagcgaggagctgcttgactccatcgtggccatggccaccgaggtcaagagcctgggctactttgactaagcgacactaataaagtactcacagcttttcggcataactacgaagcaggcgtccattgattttgtttgaggtgcataccccaaccgccggaaaggggctattggctacgtgcaccaggtctggggccatatggatctcggtgggctgcaccagatactccaggatgaggtcagcgatcacgatgtgggtgtaaatcataatggcggtgaggaaagccagccagatagctctgcaagtgggagataggtagctaaaggtaatgggataaggccaacttttttaaacattgagttggaattcgaacaagaagatacattccatgaagagatatccatcaaagcacaaattatatagacatttgcttagtttatcaagtttgtttagtttatctcagtctacatatacaatgtcttaaccacttcagtggtgctctaggccgacagtataagcaaagacactagaataacaagaattctagtgtctttggtataagccctttaaactcacttggcatatcgaacgggtgtatgatagagaaacggatgcagaccattgatgtaactctgacgcagaaactctcggaacaggcgccgatagtaggactcctccactcgagccattgtgtttgaagagtgcacgagttcaggcgatttatatagtgctaggtacttttgtagtgccactttgagctactgctcatcaatcagagctctaatgaaagtgtgtcaagtggagtgcaatgatggggtgtgtgcgaagatggctgggaactgccactctactcccggttgatgtagttgaaaactggacggaaggtaagaaagtatatgaactcgaatgccgtcactatgctgaatcccataattagtcccagcaagccgccaaatgaggctgtcaaaggaagtatgctaatcaataatctaacgcttatttaaacatttgttagcatacccaaggcggacagccagttctgaaatatgtccgttcgatatctggtgctcattagatcgctgaaaaacacatggagtagtatcctatctgtggcattgctgttcgggaaatcgcgattaattaaataaatagatatctagataaaagatagggtaaaatacttgaatgttggtcggttggcaaagtagcttatgtccaatcggccagtagtgctctcagaaacataatgattcgactggcagtccggcagacatccacagggaaaactatccgtctcccggacaattgagagcgagaaattcaaattggccagggcatgggaaaagagtcctggcaatacaatatttgtatataactaactagaaaatcttttgaaattactacccacttttactgtgaattatgcaattggtttgcagcacaccacaaactttgtagctgccgttgttgtaaacatacggtggtagacaaccacaaaggtccacagtcatccggacccggcattcgaacatgcagttgatgaaggaatagcgcctgaggccatgcatggtcatctcgcttccaaagaggcagttcctcagtgatagatccatgcggcgaatatcgttggttgcgtaggtggactctggatttattctcacaaaactttccctcgtcgtggtgaccactttggtctccgaattctcatccggaaagttataggcatcgtggagaagcaggcgaaagccaaagccactgaagaaggtgccataatagtccgatatcatggggttaagcagaaccgagagacccgtgggatagccgcatcccgtaacgcgatatggtcgctttggaacctgatatgcaattttcctgcacagtgaaaggtgttatatacagtcataaaaatggttcgattattcaatcttactctggaaaattgttgctgataccgccgaaatagttaaaagtacagcactgcccctccatggtatctatgcgttgaaagaggctttcgcatcgcgtattgatgcccttccaaatgcagctggaaatcatttcgatgcagtccggtgacaattgctgggtaagccggttcagtgtaagattgttaaggctcaaaatccgatcgtatttctgcagcgaatcattgctaatcatggtatccacgggcaaaagtgtcagattgaagaggttatgcagttcggatctattaattccaactggaacttgcctgcaaaggatgaggagcaatatttaccacttgattcctacaaattaacttacatttggtccaacaagctaagtgctttacttttcgatatcttattaaagttgcatatggtgacagccggaaagggaatattccatgtcggaaagtgcgagctttcgataactgtgaccgttggcgtttcctggctccagtaccaggacaccaccaccagcacaatggaggtgatgatggccaggatcacgaccactagccaaaaccaacgctcatggcgactgatgtcctgtcgggtgatgtaactgaatccgtgaagggacgtggtctggcagtagttgcgcatgttctcggtgaaccattcgcctatctggcgaaatcgatgttgcggctggatgggattgtgtgaatggttgtgcatcggatgactgcgtctgtgaatggcggtggtggccatctgttgggcctgaacatgtcgcaagtcgaagatgcgccgcttcttgaaagccatctctacaggctgaacaccttagtttaactgtgacttgggcgatatcagggtaattaggacagctcctaattagccggccctaatgaccttgactccgtgattccaaccctctgattccttcgacgtcgccaaagtatctgttgtctggtcagccagttgcatgtgggtcgcacacaagaaaagaaaatcagttcgaagaccgaaacgaaactgcagcccataaatagtccggttatgccgccaaaggttcctgcccacaaaatgttttcctttatgagtgacactttcgggagcaaccatgtaggtcattagtgagtacacttgcctatgaatgtcagccagttttcgtagacgtccaggagcagctcctccgcaatcgctgagtcgtagtagacacggacacggacctcatttgtggtctcttgattgctaaggtattaattacaaagattagtttttaatataaatatcaatattaattaatacacgtttttgaaatataaaatgttatctaatgattaaccaaagtgaaaagtaaaggtctaacaaaatcatcttcaatttaatgtcaaatatctcctaaacttaaaatcgtattaataacaccatatggattatttcctattaatgcttaatcatttttatggtgcacattcaaataaacaaataaggattaccttgtgttaacaatactattattaatcattccctttataaatcgtatatcactttggaattcatagcgattgaattcacatggcggaaggcaatcgcaattcttttgttctccactgatgatctcatcatgatctataaacatcgagatatcgttatagttccgtaaatatacagttcttaccaaaatctattacacactgcatttgctttagatcgcaaattagccaacttttttcaataggtgattttggcggtatacagccacatgattttaagatactttcggtgcgacattcagccaggcagtttatttggttatatacatcggataatattagacgacgttctgttgaaaaataacatcctcttttctgcagagataagcccttcagatttttcgtgaatcgattgatatatggtctaagcattatgtgagcatctgattcgcctggcacaaatacccttggtgttgctccattgggtatttcatgagattcgtgtataagcacctcaaagccagctgatttcgaactttgaaggatctcatcattggatcttaaaacaaaactaacacccaaataggagctgaaaagctgcttattgtaattaaagctgcagcacagcctttggtcaagagtccaaatgggttgcagttgatctaggcagttcaccattcgattatcccactgacagatttttatttgtgggcagattggtaaggccaaatcctccagaagctctaaccaacttgcatttctttggtttactatttgagaggagttcatccattcctttgtgttgaatccgcaaatggtgacagcgggaaaaggcacttccgccgtgggtttcatcatggtgtctatgaaacgaatggtaggcgtttccttggacatggaaagggacatgatcactagggtaaatgaaagtaggaccgcattacaaatgagaagccaccagagtatcctttgccacgtttttgctcccacaaagatgtgaaagccatgtatgctggccatctcgcagtagatctcaaatccggtcttccgcttacataggccatcatcattacgagcttgcaggaatccaaggaattttggcagtggaaactcttcaaatcgtttcgacacacgattataccacctgagaatctttaaacgttttaggttcctgtatagattggtggctctttcatttggcttcttgaaacgctgaagtggctggcatttgattgattgtttgggcctcaggtaattctcaaagttaactggataaaagtgagttggagaatcctctcctggaacgtcggacatgactacttggaaagtaatcaatgaagaacttatgctgaactagtctattaggctgttctgcatactatttatatccaagctagaagccattagcagtctgtgtaacatcttcttatcagtccgtatcacgcctttcatctgttctatacccaatcagccttatcataatcaataattattagcgccttcaattatcaaaggtcattggaagtgggcggatgactttcacctcgacattcgtgtgtacttagacgtaatcgaggcaatgaatcaatatcaattgttcggttaccttcacacccccaaatgaaaaaaaaaaaaaaaacaaacaattatccacatatttatttgtctatgcgcaactggctactgaactacacagccgataagctcggcaaatttgaataggaaattgtttgcggcaaatatattattatgtgaacttcctactcgctcctccccattattgttattgtttttcagtttgcattggcttgctaatgagcgtattcttatttacccacccacattcacccaccgcccacaattatggtgttcaaatattccgctcgtgtcacctggtcgaatttcaagtgtcattgtggctccaattttgaaatgggacatttgcaccgattcggtttccaaatatgtataaattttaagggttttgccaaatctataatcgtaggtttgtcagctgattggcaatctattagatttggattttcaagattcgtaatcgcatactcacaccgttttttttaaagccattaatgtgtcagattgaaagctatctcaaatggcgataagtccattcagatttgagaattttgatttgtgaaaggagtagtcgaaagttcagaaagttcgcggttgttatcataaagataaggggcgtgtgtctcttaggtgggtatacccaaatgaaaaatggattcatacaaatattagtaaaataagaagtgtacctatacaagtgatattaatgttagtattc

SEQ ID NO: 8081 - DNA, 3132 bp, DROSOPHILA
atgtccgacgttccaggagaggattctccaactcacttttatccagttaactttgagaattacctgaggcccaaacaatcaatcaaatgccagccacttcagcgtttcaagaagccaaatgaaagagccaccaatctatacaggaacctaaaacgtttaaagattctcaggtggtataatcgtgtgtcgaaacgatttgaagagtttccactgccaaaattccttggattcctgcaagctcgtaatgatgatggcctatgtaagcggaagaccggatttgagatctactgcgagatggccagcatacatggctttcacatctttgtgggagcaaaaacgtggcaaaggatactctggtggcttctcatttgtaatgcggtcctactttcatttaccctagtgatcatgtccctttccatgtccaaggaaacgcctaccattcgtttcatagacaccatgatgaaacccacggcggaagtgccttttcccgctgtcaccatttgcggattcaacacaaaggaatggatgaactcctctcaaatagtaaaccaaagaaatgcaagttggttagagcttctggaggatttggccttaccaatctgcccacaaataaaaatctgtcagtgggataatcgaatggtgaactgcctagatcaactgcaacccatttggactcttgaccaaaggctgtgctgcagctttaattacaataagcagcttttcagctcctatttgggtgttagttttgttttaagatccaatgatgagatccttcaaagttcgaaatcagctggctttgaggtgcttatacacgaatctcatgaaatacccaatggagcaacaccaagggtatttgtgccaggcgaatcagatgctcacataatgcttagaccatatatcaatcgattcacgaaaaatctgaagggcttatctctgcagaaaagaggatgttatttttcaacagaacgtcgtctaatattatccgatgtatataaccaaataaactgcctggctgaatgtcgcaccgaaagtatcttaaaatcatgtggctgtataccgccaaaatcacctattgaaaaaagttggctaatttgcgatctaaagcaaatgcagtgtgtaatagattttgatcatgatgagatcatcagtggagaacaaaagaattgcgattgccttccgccatgtgaattcaatcgctatgaattccaaagtgatatacgatttataaagggaatgattaataatagtattgttaacacaagcgattgcggaggagctgctcctggacgtctacgaaaactggctgacattcataggcaagtgtactcactaatgacctacatggttgctcccgaaagtgtcactcataaaggaaaacattttgtgggcaggaacctttggcggcataaccggactatttatgggctgcagtttcgtttcggtcttcgaactgattttcttttcttgtgtgcgacccacatgcaactggctgaccagacaacagatactttggcgacgtcgaaggaatcagaggagatggctttcaagaagcggcgcatcttcgacttgcgacatgttcaggcccaacagatggccaccaccgccattcacagacgcagtcatccgatgcacaaccattcacacaatcccatccagccgcaacatcgatttcgccagataggcgaatggttcaccgagaacatgcgcaactactgccagaccacgtcccttcacggattcagttacatcacccgacaggacatcagtcgccatgagcgttggttttggctagtggtcgtgatcctggccatcatcacctccattgtgctggtggtggtgtcctggtactggagccaggaaacgccaacggtcacagttatcgaaagctcgcactttccgacatggaatattccctttccggctgtcaccatatgcaactttaataagatatcgaaaagtaaagcacttagcttgttggaccaaatgcaagttccagttggaattaatagatccgaactgcataacctcttcaatctgacacttttgcccgtggataccatgattagcaatgattcgctgcagaaatacgatcggattttgagccttaacaatcttacactgaaccggcttacccagcaattgtcaccggactgcatcgaaatgatttccagctgcatttggaagggcatcaatacgcgatgcgaaagcctctttcaacgcatagataccatggaggggcagtgctgtacttttaactatttcggcggtatcagcaacaattttccagagaaaattgcatatcaggttccaaagcgaccatatcgcgttacgggatgcggctatcccacgggtctctcggttctgcttaaccccatgatatcggactattatggcaccttcttcagtggctttggctttcgcctgcttctccacgatgcctataactttccggatgagaattcggagaccaaagtggtcaccacgacgagggaaagttttgtgagaataaatccagagtccacctacgcaaccaacgatattcgccgcatggatctatcactgaggaactgcctctttggaagcgagatgaccatgcatggcctcaggcgctattccttcatcaactgcatgttcgaatgccgggtccggatgactgtggacctttgtggttgtctaccaccgtatgtttacaacaacggcagctacaaagtttgtggtgtgctgcaaaccaattgcataattcacagtaaaagactcttttcccatgccctggccaatttgaatttctcgctctcaattgtccgggagacggatagttttccctgtggatgtctgccggactgccagtcgaatcattatgtttctgagagcactactggccgattggacataagctactttgccaaccgaccaacattcaacaatgccacagataggatactactccatgtgtttttcagcgatctaatgagcaccagatatcgaacggacatatttcagaactggctgtccgccttggcctcatttggcggcttgctgggactaattatgggattcagcatagtgacggcattcgagttcatatactttcttaccttccgtccagttttcaactacatcaaccgggagtag

SEQ ID NO: 8082 - protein, 1043 aa, DROSOPHILA
MSDVPGEDSPTHFYPVNFENYLRPKQSIKCQPLQRFKKPNERATNLYRNLKRLKILRWYNRVSKRFEEFPLPKFLGFLQARNDDGLCKRKTGFEIYCEMASIHGFHIFVGAKTWQRILWWLLICNAVLLSFTLVIMSLSMSKETPTIRFIDTMMKPTAEVPFPAVTICGFNTKEWMNSSQIVNQRNASWLELLEDLALPICPQIKICQWDNRMVNCLDQLQPIWTLDQRLCCSFNYNKQLFSSYLGVSFVLRSNDEILQSSKSAGFEVLIHESHEIPNGATPRVFVPGESDAHIMLRPYINRFTKNLKGLSLQKRGCYFSTERRLILSDVYNQINCLAECRTESILKSCGCIPPKSPIEKSWLICDLKQMQCVIDFDHDEIISGEQKNCDCLPPCEFNRYEFQSDIRFIKGMINNSIVNTSDCGGAAPGRLRKLADIHRQVYSLMTYMVAPESVTHKGKHFVGRNLWRHNRTIYGLQFRFGLRTDFLFLCATHMQLADQTTDTLATSKESEEMAFKKRRIFDLRHVQAQQMATTAIHRRSHPMHNHSHNPIQPQHRFRQIGEWFTENMRNYCQTTSLHGFSYITRQDISRHERWFWLVVVILAIITSIVLVVVSWYWSQETPTVTVIESSHFPTWNIPFPAVTICNFNKISKSKALSLLDQMQVPVGINRSELHNLFNLTLLPVDTMISNDSLQKYDRILSLNNLTLNRLTQQLSPDCIEMISSCIWKGINTRCESLFQRIDTMEGQCCTFNYFGGISNNFPEKIAYQVPKRPYRVTGCGYPTGLSVLLNPMISDYYGTFFSGFGFRLLLHDAYNFPDENSETKVVTTTRESFVRINPESTYATNDIRRMDLSLRNCLFGSEMTMHGLRRYSFINCMFECRVRMTVDLCGCLPPYVYNNGSYKVCGVLQTNCIIHSKRLFSHALANLNFSLSIVRETDSFPCGCLPDCQSNHYVSESTTGRLDISYFANRPTFNNATDRILLHVFFSDLMSTRYRTDIFQNWLSALASFGGLLGLIMGFSIVTAFEFIYFLTFRPVFNYINRE

SEQ ID NO: 8083 - DNA, 5429 bp, DROSOPHILA
cggtgattcgcctgcgctttccaacacacagcaaattcgcataaaagcgaaacttggttcttcctttaaaaacgtgatacttgcctgataggatagaaagccgagatgtccgacgagacgaacgccgcggtgtgggatgactccttgctggtgaagacgtacgacgagtcggtgggactggcccgcgaagctttggcccgccgcctcgccgattccaccaacaagcgcgaggaggagaacgctgccgcagctgaagaagaagctggcgagatctcggccactggtggggctaccagcccggaaccagtatccttcaaagtaggcgactacgccagggccacctacgtggatggtgtggactacgagggcgctgtggtgtctattaacgaggagaagggcacctgcgtactccgctatttgggctatgagaacgagcaggaggtgttgctcgtggacctcctgccgtcctggggcaagcgtgtgcgtcgcgagcagttccttatcgccaagaaggatgaggacgagcagttgagccgccctaaggcatccgctggtagtcattcaaagactcccaagtcatccagaaggagtaggatctctggcggactggttatgccgcccatgccaccagtaccgcccatgattgtcggacaaggggacggcgccgaacaggacttcgtggccatgctcaccgcctggtacatgtccggctattatacgggcctctaccagggaaagaaagaagccagcaccactagcggaaagaaaaagacacccaagaagtaattccatcttatctcatcatcacatcacatcttttcgaaagacttgtagatattaagaaaacagaacgattaaatttattatattaaagagtcagtatcgtcatggtgggatctcgtttcaattgctacataaatggaaaaaaaaaatgccgaggcaggcagaaatttaggttgacattcaatatggccacttgagaaaatcagtgcttcgatacatttcgtagcgagcggttgagtttgtagtataacggaattttcataaccttcgatagatcgtagaatggcgatattttagctggcagtatacaaatcagaaaagaaaaaaaacggatattttgattggtaagcagactttcttacactgcaatagatttctttaactttgggtatcgtgtagctgttttaaaatcagaagctgaaaaattttattgataaaaaataagatataatgataaagagagtacatggtagtattgcctaattaacaaactagctaaaaatgcgcttggaccttttaaccgtccatattcaacactgccaaatgcatcctttattttcacaggcttacgatttgaaatataagtggtaaatccttctcttttgcaatgccaaaccagatgagagtgctggactttggcgatggatcggtgcccatccagctggactatccagattcgaagatcttcagcaagtgcagtagctacggcgatcgtgttccgggtacccattggaacgaaatcacagtgcaccataagggccgcctggaatactcgccaaatccggagcagataatcctggatgccttataccaggcgatagacggtgcggacttctttccggtgttctaccaggtggcctccacatagctcaaacatccgacatctgagttttaaactacatacaatttttagcgtgggaagaacatggataccatgctggtcaggaactgcaaggcggccattgataagctcttcaaacagcggctgtccattaatctgaaaggaggcgcctccatacccatcagtattcaactgggcgtagcccagtaccaaaggcaccagataactccaacgttccacatcgcacgggtggtcaccagactgatgaaacaattgattcaaagggacggtgtggatgggctacttaatctggacaactttgggagtcatccggagtttaaaaaccttgtggtaagcctgggcaatccgagcatcctgatgaacgtgtgccaggtaatacacaatgatgacaatgaacgctttcggctgaacggatttatattgtctaacaaccgcattcgggatatacggcccttgacgctactcgccaatgtggactacgccctgctcgacttaaggggtaacaaggcgagttgactcctcctggttatatgagccctatataaaagttcctttccagattaagtcagccgaacgtttgtgccgcgctctagaacaattccgggccagagaactgcttttggagaacaaccccattgtaaagatatccaactttccggcgaacattaaatcgctggagagtaacttcgagttggtggtgagtgcacgccatgtcgactttctattaaaatatcgccatattactatcctactccgcaggatggaaagcctttcaacatgctgcacaagatcttttctcctctggatgtggagatcgatttggaagtggatggtgcgcggattgatacaaataacatgtggaagttgcccgagtttgagaacagccagcattggcatgcctttatggtgggtttaccctggaacccctaggattatcatgtttgatgcatatttatttttaatagatacccgatcccagtcatgaatttaaccaggaggtgttctttgacttcttctttattaggctcgatccgaccctgagcaacttttatccctgctactacaaggtaagtccgcccattattttcccatcccattcctgcaaacaataacattctatgtgatccagtacattaacacggagcacgttttcctcgtgcgcaattgctttgatcagattgcacacctggtaaacaattgcaacctcgagatgacaattccgaccggtgatcggatttttcgttactatctgcgtatgaatgtgagcactgtcaagcagcatcatgtcgatccggaggagtgcatacagaaagctgtctcgcaatgttatgtggcacagaaccgaatgcttaacctcgaacggtttcactccagagaatgtctaaaggatgtgatggtgtcactaagctcgccaaagattttaacctacgtactgtcggtagcgtcgcggaagttcatgaccacctgttcagagatccgtttgtgccacaacaaggtccttgttctggatggagcccatgtccttggtatgatggggtgcctgagagcggtggatctcagtcacaactgggtgcaggatctgtcaagcatccacagtctgggcaacctacctctgaagtccctggtacttcacggaaataaactctgccgcaactacagactgcccagcgaatatgtcagggcggtgaaggaggtgtttccacagttgaccaccttggatggtgtggacctgcagacgaatcctggccagtcgttgcagaagaactttctttgcgatacaggtgcctacgagttggtgggtgcctttcttgaaaactatctccgggagttcgaaaacgatgagtttcgccacaatctgtacaagtattactctgaaaactcgatttttactctaacgtgcaactacaacgtggttcaaaatcaccagactccaaagatattgcagcgtttatcaaagtacaacaggcatgcacgaaatctgcgcaacaaggactattccaaggcaagcgatggtgtgttctttggctgtacatatattgttgaaatacttttgcaactgccacgagtcacccacgacttccactccctgcagacggacgtaatgcactacaatggtaagggggcggttatctatgttgctggtttgctacgggatgagccacctagcacgaggaacggccacgggagcaaaacggacatcggtggcgttcttttgggctttagccgacagtttgtggtcacgttcgatgaggcgaacttggtgagttaagaaaatgtggatgcgattaacttaagcttttgcttacgatacaatttttttaacaatctagggattgggaaagagagctcgtcgcctaaagatcgccaacgaacgtctacacataacgaatccatcgaaaactgcaatacgaaatgctttcagtgtaaattttccggatccaagtgaacgtcaggcggaagaggattccctggatgtgaaggatcacaagctcctgctctttcaagaggtaaccggcctcatttccacttgggtcacatcgattgtggaggaagccgattgggactttgagcgagcccttaaattgtttattcagaagaatgctgatcacgaaatcccagatctagcattcgcctagaatatgtgatctctatatatgtgatcatatacttttgtaaaataagtggtgctttcaatacctctgtttcctctttcgttataaatactgaacctgtgttgcgaattcgacatcccaataaaactaccttgaattaccaataaaaagtaatttagatggccgaaaacatttatttgataattaagagttaatcacttgcaaagagaagtctcttttctacacatgtacgggagctatatatcctcgacttcgaatccgtagctgcggaggaatgggttttgggcagtgggaaacaaacattgagaaaatgccatcgcttaattatttaaatattttgtagactagaaaatgtttctaaatacatttagcatatgtttttgtataatatgtataatgcattagtaaacgcacagttcaagagccttacacgataaattacaagggagaaaagtccgactaagctctaaggatttttatatatcatttaatcatgtgtgtctgttgattagatttagctgaacgctaatggatcgtttatgtaaatattgtgtacggctgattgggtgtacaaaaagaaagaaattagagtgttttacatgctttttatgtcttgtttttaattccataacttagattaagtttcaaaacatactctaatgccaaaatgaacgaataacactactccaagctatgagcgcgttaatatcagattagtcttttgcgtttcacgtccgtctcgcttccgtttccgacttgtgtgcatctcgtgtgtgactgtatgtgttgtgggtaattacaatggttaatttatcggcaaaggtagtgacaagtggcaagcgctgtgaatgttgcaaaacccttggcttgtacaaaaataaaactgcaaaattggcgctcatagtggtgattagttagatcttcggttttgtatgcttctgtgtttgctgcgtcggcagctgctgctgtatgacccgatttgatttggttctccagcctcccgataatgctttatttgcgtctgccgcttacagtgctccagcctccagaatccgtgtgttgatggttctgttgccgggcgctgcgtcctgaggtgaccgtgtgtggagcaccactggcggcggacgcggcagcatcatttcactttttac

SEQ ID NO: 8084 - DNA, 2844 bp, DROSOPHILA
atttcgtagcgagcggttgagtttgtagtataacggaattttcataaccttcgatagatcgtagaatggcgatattttagctggcagtatacaaatcagaaaagaaaaaaaacggatattttgattggcttacgatttgaaatataagtggtaaatccttctcttttgcaatgccaaaccagatgagagtgctggactttggcgatggatcggtgcccatccagctggactatccagattcgaagatcttcagcaagtgcagtagctacggcgatcgtgttccgggtacccattggaacgaaatcacagtgcaccataagggccgcctggaatactcgccaaatccggagcagataatcctggatgccttataccaggcgatagacggtgcggacttctttccggtgttctaccagcgtgggaagaacatggataccatgctggtcaggaactgcaaggcggccattgataagctcttcaaacagcggctgtccattaatctgaaaggaggcgcctccatacccatcagtattcaactgggcgtagcccagtaccaaaggcaccagataactccaacgttccacatcgcacgggtggtcaccagactgatgaaacaattgattcaaagggacggtgtggatgggctacttaatctggacaactttgggagtcatccggagtttaaaaaccttgtggtaagcctgggcaatccgagcatcctgatgaacgtgtgccaggtaatacacaatgatgacaatgaacgctttcggctgaacggatttatattgtctaacaaccgcattcgggatatacggcccttgacgctactcgccaatgtggactacgccctgctcgacttaaggggtaacaagattaagtcagccgaacgtttgtgccgcgctctagaacaattccgggccagagaactgcttttggagaacaaccccattgtaaagatatccaactttccggcgaacattaaatcgctggagagtaacttcgagttggtggatggaaagcctttcaacatgctgcacaagatcttttctcctctggatgtggagatcgatttggaagtggatggtgcgcggattgatacaaataacatgtggaagttgcccgagtttgagaacagccagcattggcatgcctttatgatacccgatcccagtcatgaatttaaccaggaggtgttctttgacttcttctttattaggctcgatccgaccctgagcaacttttatccctgctactacaagtacattaacacggagcacgttttcctcgtgcgcaattgctttgatcagattgcacacctggtaaacaattgcaacctcgagatgacaattccgaccggtgatcggatttttcgttactatctgcgtatgaatgtgagcactgtcaagcagcatcatgtcgatccggaggagtgcatacagaaagctgtctcgcaatgttatgtggcacagaaccgaatgcttaacctcgaacggtttcactccagagaatgtctaaaggatgtgatggtgtcactaagctcgccaaagattttaacctacgtactgtcggtagcgtcgcggaagttcatgaccacctgttcagagatccgtttgtgccacaacaaggtccttgttctggatggagcccatgtccttggtatgatggggtgcctgagagcggtggatctcagtcacaactgggtgcaggatctgtcaagcatccacagtctgggcaacctacctctgaagtccctggtacttcacggaaataaactctgccgcaactacagactgcccagcgaatatgtcagggcggtgaaggaggtgtttccacagttgaccaccttggatggtgtggacctgcagacgaatcctggccagtcgttgcagaagaactttctttgcgatacaggtgcctacgagttggtgggtgcctttcttgaaaactatctccgggagttcgaaaacgatgagtttcgccacaatctgtacaagtattactctgaaaactcgatttttactctaacgtgcaactacaacgtggttcaaaatcaccagactccaaagatattgcagcgtttatcaaagtacaacaggcatgcacgaaatctgcgcaacaaggactattccaaggcaagcgatggtgtgttctttggctgtacatatattgttgaaatacttttgcaactgccacgagtcacccacgacttccactccctgcagacggacgtaatgcactacaatggtaagggggcggttatctatgttgctggtttgctacgggatgagccacctagcacgaggaacggccacgggagcaaaacggacatcggtggcgttcttttgggctttagccgacagtttgtggtcacgttcgatgaggcgaacttgggattgggaaagagagctcgtcgcctaaagatcgccaacgaacgtctacacataacgaatccatcgaaaactgcaatacgaaatgctttcagtgtaaattttccggatccaagtgaacgtcaggcggaagaggattccctggatgtgaaggatcacaagctcctgctctttcaagaggtaaccggcctcatttccacttgggtcacatcgattgtggaggaagccgattgggactttgagcgagcccttaaattgtttattcagaagaatgctgatcacgaaatcccagatctagcattcgcctagaatatgtgatctctatatatgtgatcatatacttttgtaaaataagtggtgctttcaatacctctgtttcctctttcgttataaatactgaacctgtgttgcgaattcgacatcccaataaaactaccttgaattaccaataaaaagt

SEQ ID NO: 8085 - protein, 841 aa, DROSOPHILA
MPNQMRVLDFGDGSVPIQLDYPDSKIFSKCSSYGDRVPGTHWNEITVHHKGRLEYSPNPEQIILDALYQAIDGADFFPVFYQRGKNMDTMLVRNCKAAIDKLFKQRLSINLKGGASIPISIQLGVAQYQRHQITPTFHIARVVTRLMKQLIQRDGVDGLLNLDNFGSHPEFKNLVVSLGNPSILMNVCQVIHNDDNERFRLNGFILSNNRIRDIRPLTLLANVDYALLDLRGNKIKSAERLCRALEQFRARELLLENNPIVKISNFPANIKSLESNFELVDGKPFNMLHKIFSPLDVEIDLEVDGARIDTNNMWKLPEFENSQHWHAFMIPDPSHEFNQEVFFDFFFIRLDPTLSNFYPCYYKYINTEHVFLVRNCFDQIAHLVNNCNLEMTIPTGDRIFRYYLRMNVSTVKQHHVDPEECIQKAVSQCYVAQNRMLNLERFHSRECLKDVMVSLSSPKILTYVLSVASRKFMTTCSEIRLCHNKVLVLDGAHVLGMMGCLRAVDLSHNWVQDLSSIHSLGNLPLKSLVLHGNKLCRNYRLPSEYVRAVKEVFPQLTTLDGVDLQTNPGQSLQKNFLCDTGAYELVGAFLENYLREFENDEFRHNLYKYYSENSIFTLTCNYNVVQNHQTPKILQRLSKYNRHARNLRNKDYSKASDGVFFGCTYIVEILLQLPRVTHDFHSLQTDVMHYNGKGAVIYVAGLLRDEPPSTRNGHGSKTDIGGVLLGFSRQFVVTFDEANLGLGKRARRLKIANERLHITNPSKTAIRNAFSVNFPDPSERQAEEDSLDVKDHKLLLFQEVTGLISTWVTSIVEEADWDFERALKLFIQKNADHEIPDLAFA
